United States Patent Application Publication US 2018/0126003 A1 - sequence listing, part 77

SEQ ID NO: 140510 - DNA, 2868 bp, Artificial Sequence
  derived and/or modified sequence
atgcccagcctgcccgccccccccgcccccctgctgctgctgggcctactgctccttgggtctcggccagcccgcggagcaggtccagagcctcctgtcctgcccataaggtcagagaaagagccacttcctgttaggggggccgctgggtgcactttcggtgggaaggtatatgcgttggacgagacttggcaccctgacctgggtgaaccgttcggggttatgcgctgcgtgctgtgtgcctgcgaggcaccccagtggggacgacgaacacggggacccgggcgcgtatcgtgtaagaatattaagcctgaatgtccaactccagcttgcggccagccacgacaacttcccgggcactgttgccagacctgtccccaagagagaagctctagcgaacgccagccctccggcctgagttttgaataccctcgtgatcctgagcataggtcatattccgacaggggcgagccaggtgcggaggagagagcaaggggagatgggcacaccgacttcgtagccttattgacaggcccccgatcccaggccgttgccagggcccgagtatctcttttgagatcttccctaaggttctcgattagttaccggcgtctcgaccggccaacaagaatacgtttctccgattccaatggttctgttctgttcgagcaccccgccgcccctacgcaggatggtttggtctgtggcgtctggagggctgtcccacgcctaagccttcgcctcttgagagcagagcagcttcatgttgccctcgtcacccttacgcacccatctggcgaagtgtgggggcccctgatacgacatcgcgcactcgctgccgaaacgttcagtgctattttaacacttgaaggccctccccagcaaggagtagggggcatcacgctgcttactctgtccgatacagaggattctctacattttctcttattgtttagaggcctgttagagccacgcagcggcgggttaacacaggtgccgctgaggctgcaaatcctccaccagggtcagctgctgcgcgagcttcaggcaaatgtctccgctcaggagcccggattcgccgaggtgctgccaaatctaacagtgcaagaaatggattggcttgtgctaggtgaattacagatggccctggaatgggcagggagacccggtctgcgcatatctgggcacatcgccgccagaaaatcctgcgacgtgctccagtccgtgctatgtggcgcagacgccctcataccagtccagactggagccgccggctcagctagcctgacactgctgggaaatggaagtctgatttaccaggtccaggtggtaggcaccagttccgaggttgtcgctatgactctggagacaaaaccacagagaagggaccaacgcaccgttctttgtcatatggcaggtctgcagcccggtggccacaccgcggtgggcatctgtcccggactgggcgcacgcggcgcccatatgctgctgcaaaatgaattgtttctcaacgtaggcacgaaggattttccagacggggaactgcggggacatgtagccgctctgccctattgtgggcactcagcccggcatgacacattacctgtgcctctggcaggagccctagtgctgccaccagtcaaatctcaggccgccgggcatgcctggctctcactcgacactcattgtcacctgcactatgaagtccttctggctgggctgggtggctccgagcaaggaacagtgaccgcccatctgcttgggccacccggaacccccggtcctcggcgcctgctcaaaggcttctatggctccgaggcccagggcgtcgtaaaagatctcgaaccagaattgctgcggcacctcgccaagggaatggcttctttgatgatcactactaaaggatcccctcggggggagttgcggggccaggttcatatcgccaatcagtgtgaagttggaggtctccgcctcgaagctgccggtgctgaaggcgtccgagccctgggagcacccgacactgcttcagcagccccccctgtggtgcccggcctccctgcgcttgccccggctaagcctggcgggcccggtagaccccgcgatcccaatacctgcttcttcgaaggacaacaacgtcctcacggcgcacgatgggcacccaactacgatccactttgctcactgtgcacctgtcagagaaggaccgtgatatgtgatcctgtggtctgcccgcccccatcttgtccgcaccccgtgcaggcaccagatcaatgctgtcctgtgtgccctgagaagcaggatgttcgagatctcccggggctccctagaagcagagatcctggagagggatgctatttcgatggagataggtcttggagggcggccggtactcggtggcaccccgtggtgcctccttttggtttgataaagtgcgctgtgtgcacctgtaaaggaggcactggagaggtccattgcgagaaggtgcagtgtccaagactggcctgcgcccagccggttcgggtcaatccaactgactgttgcaagcagtgcccggtcggaagtggagcccatccacagctgggggacccgatgcaggccgacggtcccagggggtgccgctttgccgggcagtggtttccagagtcccaatcctggcacccctctgtgcccccctttggggagatgagctgcatcacgtgtaggtgcggcgctggagtgccgcattgcgagagagacgactgcagtctgccccttagttgcggaagtggcaaggagagccgatgctgctctcgctgcacggcccacagaagacctgcccccgagactcggacagaccccgagctggagaaagaggccgagggcagctag

SEQ ID NO: 140511 - DNA, 2748 bp, Artificial Sequence
  derived and/or modified sequence
atgcccagcctgcccgccccccccgcccccctgctgctgctgggcttgttactactggggtctaggccagcgcggggagccggtccggagccccctgtcctcccgatccgcagcgagaaggagcctctacctgtgcgcggggccgccggctgcaccttcggcgggaaagtctacgccctagacgagacttggcatcccgatcttggagaaccttttggggtcatgcgatgtgttctgtgtgcttgtgaggccccccagtgggggaggcggactcgaggccccggccgtgtaagttgcaaaaatattaaacctgagtgcccaacacctgcctgcggccagccacgtcagctgccaggtcactgttgccagacctgtcctcaggagagatcaagttccgagcgccaacccagcggactctctttcgagtaccccagggatcccgagcatcgttcatattctgaccggggggagccaggcgctgaggaacgtgcgagaggcgacggccatactgacttcgtagctctcttaacaggcccacgatctcaggcggtggctagagcccgcgtttccctcctgcggtcctccttacgcttcagcatctcctatcggaggttggacagaccgacacggattagatttagcgatagtaatgggtccgtgctcttcgaacatccagctgctccaacccaggatggattggtatgtggggtttggagggccgtgcctcgcctgagtctcagattactacgcgcagaacagcttcacgtggccttggtcacactgactcatcccagcggtgaagtgtgggggccactgataaggcaccgggcactggctgcggaaaccttctccgctattcttacacttgagggaccacctcagcagggcgtaggcggcatcaccttgctcacactgtcagatacggaggatagtctacatttcctccttctatttcgtggcctgctcgaaccgcggtccggcgggttgactcaggtacccttacgtctgcagattttgcatcagggtcagctccttagggaactgcaggcaaacgtctccgcgcaggagccaggctttgctgaagttcttcccaatcttacagtgcaggaaatggactggctggtccttggtgagctgcagatggccctggaatgggccggcaggccaggactgcgcatttctggccacattgccgcgaggaagagctgcgacgtattgcagagtgtcttgtgcggcgcagacgctctgatccctgtacagaccggcgccgcagggtctgctagcctgacattgttgggcaacggttccctaatctaccaggcagtcgggatttgccctggtctgggcgcccgaggagctcacatgctgttgcagaacgagttgtttctcaacgtggggacaaaagactttccagacggtgaactccgtggtcatgtggctgctctgccatactgcggtcactctgcacgtcacgataccctgcctgtgccactggccggcgctctggttctccctcccgtgaaatcccaggccgcgggacatgcctggttgagcctggacacacattgccacctgcactatgaggtcctgctggccgggttgggaggtagcgagcaaggtaccgttactgctcacctattaggtccccccgggaccccagggccgcggcgcttgcttaaaggcttttatgggagcgaggcacagggagtggtcaaggatcttgaacctgagctcctgcgccacctggccaagggtatggcctcgctcatgataaccactaagggaagccctcgaggggaactccgaggacaggtgcacatcgccaatcagtgcgaggtgggtggtcttaggctggaggctgccggagccgagggcgtcagggctctcggcgccccagacaccgcctcagcagcaccaccggtggtacctggcctgccagctctcgcacctgccaagccagggggcccgggtaggccaagggatcctaacacctgtttctttgagggtcagcagcgacctcacggtgccagatgggctcccaattacgatccattatgttccctctgcacgtgccagcgccggacagtgatctgtgaccccgttgtttgccccccccctagttgcccccaccccgtccaggctccagaccagtgctgcccagtctgcccagagaagcaagacgttcgggatctgcctggcctaccacgttcacgggacccaggggagggctgttacttcgatggagatcggagctggagagctgctggcacaagatggcatcctgtcgtgcccccatttgggctaataaagtgcgcggtctgcacttgcaaaggtggtaccggggaggtgcattgtgaaaaagtgcagtgcccacgcctggcctgcgcacagcccgtaagggtgaaccccacagattgctgcaagcaatgcccggtggggagcggcgctcaccctcaactcggagaccctatgcaggctgatggccctcgcggttgtcggtttgctggtcagtggtttcctgagagccagtcctggcacccatccgtgcctccatttggtgaaatgagctgcattacgtgccgttgtggcgcaggggtgccccattgcgaaagggacgactgctcactgcctctctcgtgcggatcaggaaaggagtcccgatgttgtagcagatgcacagcacaccgccgccctgcccctgaaactaggacagatcccgagttagaaaaggaagctgagggatcctag

SEQ ID NO: 140512 - DNA, 2868 bp, Artificial Sequence
  derived and/or modified sequence
atgccaagtctgcccgcacctccagcccctctgctgctcctgggattattgctcctgggaagccgcccagctagaggcgcaggccctgaaccgcctgttcttcctatcaggtcagagaaagagcctttgccagttagaggggcagctgggtgcacctttggagggaaggtgtacgctctggacgaaacctggcaccctgatctcggcgagccttttggagtcatgaggtgtgtgctctgtgcctgcgaagccccacagtggggaaggagaacacgtggtcctgggagggtctcctgtaagaacatcaaacctgaatgtcccacccctgcgtgcgggcagccacgtcaactgcccggacactgttgccagacttgtccgcaggagcggtcaagtagtgaacgccagccatctgggttgtccttcgagtacccacgcgatcccgaacatagaagctattccgacaggggagaaccaggcgcagaggaacgcgctaggggcgacggccatactgactttgtcgccctccttaccggccctcggtcccaagctgtggcccgtgcaagagtgagtttactccgctcgagtctgcgcttctctattagttacaggcgcttggatagacccactaggatccgtttctccgatagtaatggctctgttctcttcgagcaccccgcagctcctacgcaggacgggctggtgtgcggcgtgtggagagccgtgcccaggttaagcttgcgattgttgcgtgctgaacagctccatgttgcattggtgaccctcacccacccatccggggaggtgtggggcccactgatcaggcaccgcgctctggcagccgaaacgttctcagccatcctgaccctggaaggaccaccccagcagggcgtgggtgggataacattgctaaccttgagcgataccgaagatagcctccacttccttctgctctttcgtggcctgctggagcccaggtccggaggacttacacaggttccattaagactccagatcttgcaccaggggcaacttctccgggagctccaagcaaacgtgtccgctcaggagcccggtttcgccgaggtgttaccgaacctgacagtccaggagatggattggttagtactgggagaattacagatggccctagaatgggctggacgcccaggtctcagaattagtggacacattgccgctaggaaatcctgcgatgtgctgcaatcagtcctgtgcggggctgacgccctgattcccgtgcagaccggcgctgctggttcagctagcctgacgctgctgggcaatgggtccctgatctaccaggtgcaagtggtcggtacttctagtgaggttgttgccatgaccctcgaaactaagccacagcggagagaccaacgtactgtgctctgtcatatggctggactccaacctgggggacacacagccgttgggatctgcccaggtctgggagctaggggcgctcatatgttgttgcaaaatgagctgtttcttaacgtcggcaccaaggattttcctgacggcgagctccgtggccatgtcgctgctctcccctactgcggccactctgcccgacacgacactcttcccgtgcccttagccggagctcttgttcttcctcctgtgaagtcccaggctgcgggacacgcatggttatcgctggacactcattgccatctgcactacgaggttcttctggctggattaggtggaagcgagcaaggcacggtaactgcgcacctgctcggtcctccgggaacgcccggaccacggagactgctgaaaggtttctatggtagcgaagcacagggagtggttaaagatcttgaacctgaactccttcgtcatttggccaaaggcatggcctcgcttatgattacgaccaaaggcagtccccgaggcgagcttcgcggacaggtgcatattgcaaatcagtgcgaagtcgggggactgcggctggaggccgctggcgctgagggtgttcgggcacttggggctcccgacacggcctccgctgctccccctgttgtccccggtctacctgctctcgcacctgccaagcctggtggcccaggtagacctagggacccaaatacctgcttctttgagggacagcaacggcctcatggtgccagatgggccccaaactacgatcccttgtgtagcctgtgtacctgccaacgacgcacagtcatatgcgatccagttgtgtgtccccctcccagctgcccccacccagtccaggcccctgaccagtgctgccctgtgtgtccggagaaacaggacgttagggatctgccaggcctcccacggagcagagatccgggagagggctgttactttgacggagatcgctcatggcgcgcagcagggacccgctggcaccccgtggtccctccttttggcctgataaaatgtgccgtttgcacctgcaaagggggaactggtgaagtgcactgtgagaaggtgcaatgtccacgcctggcttgcgcccagcccgttagagtaaatcccacggactgctgcaagcaatgccccgtgggcagtggggctcacccccagctcggagaccccatgcaggcggatggacccaggggatgccgattcgctggacagtggttcccagaatcccagtcctggcatccttccgtcccaccgtttggagaaatgtcttgtatcacctgcagatgtggggcaggcgtcccccattgtgagcgcgacgactgcagcttacctctctcatgcggaagtgggaaagaatcgcgctgctgttctcgctgtactgctcaccgccgtccagcccctgaaacaaggacagatccggaactggagaaagaagccgaggggtcctag

SEQ ID NO: 140513 - DNA, 2748 bp, Artificial Sequence
  derived and/or modified sequence
atgccctctcttccagcgccacccgctccccttctgctcttagggctgctcctgctggggagccgccctgcgcgaggggctggacccgaaccacccgttctgcctatcagatccgaaaaagagcctctgcctgtgcgaggggctgccggttgcacctttgggggtaaagtgtacgcactcgacgaaacctggcaccccgacctgggtgaaccttttggggttatgaggtgcgtgttatgcgcatgcgaggcacctcaatgggggaggagaacccgagggcctgggcgtgtctcctgcaagaatataaagccagaatgccctactcccgcttgcgggcagcctcgccaattgcccggacattgctgtcagacctgtccccaggagagaagctcgtccgagcgtcagccttctggtctgagttttgagtacccacgcgaccctgaacaccggagttactcagataggggcgaaccaggagcagaagaaagggctaggggagatgggcacactgacttcgtcgctctgctgactggaccaaggtctcaggctgttgcaagggccagggtctccctgttgaggagctctctgcggttttctatttcttacaggagattagacaggccaacaagaattagattttccgactccaacggcagcgtactttttgagcacccagcagctcccacccaggatggccttgtgtgcggagtgtggcgcgcagtgccgagattgtcgctgcggctcctgcgtgcagagcaactgcacgttgcattggttacccttacccaccccagcggtgaggtttggggtcctctaattcgccaccgtgctctggcggctgagaccttttctgctatactgactttggaaggccctcctcagcagggcgtggggggaatcacactcttgacccttagtgacacagaagatagcctccactttctgttgctctttcgcggactcctggagcctcgatcaggcggtctgacccaggttcccctccgcctgcagatattacaccaggggcagctgctaagggaactgcaagctaatgtctcggcgcaagagcccggattcgcggaggttctaccgaacctgacagtccaggaaatggactggctggttctgggtgagttgcagatggctctggaatgggctggcagacctgggttgcggatctctggacacatcgcggctcgaaagtcctgtgacgtgctgcagagtgtgctgtgtggtgctgacgcacttataccagttcagaccggcgcagcaggcagtgcatctctgaccctcctgggcaacgggagtctgatttatcaagcggtaggtatttgtcccggtttgggcgctcggggagcccacatgctgcttcagaatgagttgttcttgaatgtagggaccaaagatttcccggatggcgagttgcgcggacatgttgctgcattgccatactgtggccattctgccagacacgataccttgcctgtccccctggcaggagctctcgttcttccaccggttaagtctcaagcggcaggccacgcctggttgtccctggacacccattgccatctccactacgaggtcctgctcgctggactgggaggctctgagcagggcactgttactgcccacctgctcggtcctccaggcactcccggaccaaggcgcctgctgaaaggcttctacggttccgaagcacagggagtcgtcaaggacctggagcctgaactcctgaggcatctggctaagggcatggcttcgctgatgatcaccactaagggctcacccagaggcgaactaaggggccaggtccatattgccaaccagtgcgaagtgggtgggctgaggctggaggcggcaggcgctgaaggtgttcgggctttgggcgcaccagacactgcttccgcagcccctcccgtcgtccctggccttcccgctttggcccctgccaagcccggaggaccgggaaggccccgagaccccaacacctgcttctttgaaggacaacagagacctcatggggctcgatgggcacccaactacgaccccctgtgctctctatgcacatgtcagagacggaccgtgatatgtgaccccgtcgtgtgtcctccgccttcatgtccccaccctgttcaggccccagatcaatgttgccccgtgtgccctgaaaagcaggacgtacgagaccttccaggtctccccaggagtcgagatcccggagagggctgctattttgatggggaccgatcctggagagcagccggtactcgatggcaccctgtggtgccgcctttcgggcttatcaagtgcgctgtgtgcacatgcaaagggggaaccggtgaagtgcattgtgaaaaggtgcagtgtcctaggctggcttgcgcacagcccgtccgagtgaatcccactgactgctgtaagcagtgtccagtgggctctggcgctcatccgcagctgggtgaccctatgcaagcagatggaccaagggggtgcagatttgcgggtcagtggtttcccgaaagtcagtcctggcacccaagcgtgccaccgttcggagaaatgagctgcataacttgtcgctgtggcgcaggagttccccactgcgaaagggacgactgcagcctccctctctcttgcggctccggtaaagagagccgctgctgcagcaggtgtaccgcccacaggcggccagctcccgaaaccaggaccgacccggagttagaaaaggaagcagaaggcagctag

SEQ ID NO: 140514 - DNA, 3521 bp, Artificial Sequence
  derived and/or modified sequence
cccgggtcagcgcccgcccgcccgcgctcctcccggccgctcctcccgccccgcccggcccggcgccgactctgcggccgcccgacgagcccctcgcggcactgccccggccccggccccggccccggccccctcccgccgcaccgcccccggcccggccctccgccctccgcactcccgcctccctccctccgcccgctcccgcgccctcctccctccctcctccccagctgtcccgttcgcgtcatgccgagcctcccggccccgccggccccgctgctgctcctcgggctgctgctgctcggctcccggccggcccgcggcgccggcccagagccccccgtgctgcccatccgttctgagaaggagccgctgcccgttcggggagcggcaggctgcaccttcggcgggaaggtctatgccttggacgagacgtggcacccggacctaggggagccattcggggtgatgcgctgcgtgctgtgcgcctgcgaggcgcctcagtggggtcgccgtaccaggggccctggcagggtcagctgcaagaacatcaaaccagagtgcccaaccccggcctgtgggcagccgcgccagctgccgggacactgctgccagacctgcccccaggagcgcagcagttcggagcggcagccgagcggcctgtccttcgagtatccgcgggacccggagcatcgcagttatagcgaccgcggggagccaggcgctgaggagcgggcccgtggtgacggccacacggacttcgtggcgctgctgacagggccgaggtcgcaggcggtggcacgagcccgagtctcgctgctgcgctctagcctccgcttctctatctcctacaggcggctggaccgccctaccaggatccgcttctcagactccaatggcagtgtcctgtttgagcaccctgcagcccccacccaagatggcctggtctgtggggtgtggcgggcagtgcctcggttgtctctgcggctccttagggcagaacagctgcatgtggcacttgtgacactcactcacccttcaggggaggtctgggggcctctcatccggcaccgggccctggctgcagagaccttcagtgccatcctgactctagaaggccccccacagcagggcgtagggggcatcaccctgctcactctcagtgacacagaggactccttgcattttttgctgctcttccgagggctgctggaacccaggagtgggggactaacccaggttcccttgaggctccagattctacaccaggggcagctactgcgagaacttcaggccaatgtctcagcccaggaaccaggctttgctgaggtgctgcccaacctgacagtccaggagatggactggctggtgctgggggagctgcagatggccctggagtgggcaggcaggccagggctgcgcatcagtggacacattgctgccaggaagagctgcgacgtcctgcaaagtgtcctttgtggggctgatgccctgatcccagtccagacgggtgctgccggctcagccagcctcacgctgctaggaaatggctccctgatctatcaggtgcaagtggtagggacaagcagtgaggtggtggccatgacactggagaccaagcctcagcggagggatcagcgcactgtcctgtgccacatggctggactccagccaggaggacacacggccgtgggtatctgccctgggctgggtgcccgaggggctcatatgctgctgcagaatgagctcttcctgaacgtgggcaccaaggacttcccagacggagagcttcgggggcacgtggctgccctgccctactgtgggcatagcgcccgccatgacacgctgcccgtgcccctagcaggagccctggtgctaccccctgtgaagagccaagcagcagggcacgcctggctttccttggatacccactgtcacctgcactatgaagtgctgctggctgggcttggtggctcagaacaaggcactgtcactgcccacctccttgggcctcctggaacgccagggcctcggcggctgctgaagggattctatggctcagaggcccagggtgtggtgaaggacctggagccggaactgctgcggcacctggcaaaaggcatggcctccctgatgatcaccaccaagggtagccccagaggggagctccgagggcaggtgcacatagccaaccaatgtgaggttggcggactgcgcctggaggcggccggggccgagggggtgcgggcgctgggggctccggatacagcctctgctgcgccgcctgtggtgcctggtctcccggccctagcgcccgccaaacctggtggtcctgggcggccccgagaccccaacacatgcttcttcgaggggcagcagcgcccccacggggctcgctgggcgcccaactacgacccgctctgctcactctgcacctgccagagacgaacggtgatctgtgacccggtggtgtgcccaccgcccagctgcccacacccggtgcaggctcccgaccagtgctgccctgtttgccctgagaaacaagatgtcagagacttgccagggctgccaaggagccgggacccaggagagggctgctattttgatggtgaccggagctggcgggcagcgggtacgcggtggcaccccgttgtgcccccctttggcttaattaagtgtgctgtctgcacctgcaaggggggcactggagaggtgcactgtgagaaggtgcagtgtccccggctggcctgtgcccagcctgtgcgtgtcaaccccaccgactgctgcaaacagtgtccagtggggtcgggggcccacccccagctgggggaccccatgcaggctgatgggccccggggctgccgttttgctgggcagtggttcccagagagtcagagctggcacccctcagtgcccccttttggagagatgagctgtatcacctgcagatgtggggcaggggtgcctcactgtgagcgggatgactgttcactgccactgtcctgtggctcggggaaggagagtcgatgctgttcccgctgcacggcccaccggcggccagccccagagaccagaactgatccagagctggagaaagaagccgaaggctcttagggagcagccagagggccaagtgaccaagaggatggggcctgagctggggaaggggtggcatcgaggaccttcttgcattctcctgtgggaagcccagtgcctttgctcctctgtcctgcctctactcccacccccactacctctgggaaccacagctccacaagggggagaggcagctgggccagaccgaggtcacagccactccaagtcctgccctgccaccctcggcctctgtcctggaagccccacccctttcctcctgtacataatgtcactggcttgttgggatttttaatttatcttcactcagcaccaagggcccccgacactccactcctgctgcccctgagctgagcagagtcattattggagagttttgtatttattaaaacatttctttttcagtc

SEQ ID NO: 140515 - DNA, 3155 bp, Artificial Sequence
  derived and/or modified sequence
atgccgagcctcccggccccgccggccccgctgctgctcctcgggctgctgctgctcggctcccggccggcccgcggcgccggcccagagccccccgtgctgcccatccgttctgagaaggagccgctgcccgttcggggagcggcaggctgcaccttcggcgggaaggtctatgccttggacgagacgtggcacccggacctaggggagccattcggggtgatgcgctgcgtgctgtgcgcctgcgaggcgcctcagtggggtcgccgtaccaggggccctggcagggtcagctgcaagaacatcaaaccagagtgcccaaccccggcctgtgggcagccgcgccagctgccgggacactgctgccagacctgcccccaggagcgcagcagttcggagcggcagccgagcggcctgtccttcgagtatccgcgggacccggagcatcgcagttatagcgaccgcggggagccaggcgctgaggagcgggcccgtggtgacggccacacggacttcgtggcgctgctgacagggccgaggtcgcaggcggtggcacgagcccgagtctcgctgctgcgctctagcctccgcttctctatctcctacaggcggctggaccgccctaccaggatccgcttctcagactccaatggcagtgtcctgtttgagcaccctgcagcccccacccaagatggcctggtctgtggggtgtggcgggcagtgcctcggttgtctctgcggctccttagggcagaacagctgcatgtggcacttgtgacactcactcacccttcaggggaggtctgggggcctctcatccggcaccgggccctggctgcagagaccttcagtgccatcctgactctagaaggccccccacagcagggcgtagggggcatcaccctgctcactctcagtgacacagaggactccttgcattttttgctgctcttccgagggctgctggaacccaggagtgggggactaacccaggttcccttgaggctccagattctacaccaggggcagctactgcgagaacttcaggccaatgtctcagcccaggaaccaggctttgctgaggtgctgcccaacctgacagtccaggagatggactggctggtgctgggggagctgcagatggccctggagtgggcaggcaggccagggctgcgcatcagtggacacattgctgccaggaagagctgcgacgtcctgcaaagtgtcctttgtggggctgatgccctgatcccagtccagacgggtgctgccggctcagccagcctcacgctgctaggaaatggctccctgatctatcaggccgtgggtatctgccctgggctgggtgcccgaggggctcatatgctgctgcagaatgagctcttcctgaacgtgggcaccaaggacttcccagacggagagcttcgggggcacgtggctgccctgccctactgtgggcatagcgcccgccatgacacgctgcccgtgcccctagcaggagccctggtgctaccccctgtgaagagccaagcagcagggcacgcctggctttccttggatacccactgtcacctgcactatgaagtgctgctggctgggcttggtggctcagaacaaggcactgtcactgcccacctccttgggcctcctggaacgccagggcctcggcggctgctgaagggattctatggctcagaggcccagggtgtggtgaaggacctggagccggaactgctgcggcacctggcaaaaggcatggcctccctgatgatcaccaccaagggtagccccagaggggagctccgagggcaggtgcacatagccaaccaatgtgaggttggcggactgcgcctggaggcggccggggccgagggggtgcgggcgctgggggctccggatacagcctctgctgcgccgcctgtggtgcctggtctcccggccctagcgcccgccaaacctggtggtcctgggcggccccgagaccccaacacatgcttcttcgaggggcagcagcgcccccacggggctcgctgggcgcccaactacgacccgctctgctcactctgcacctgccagagacgaacggtgatctgtgacccggtggtgtgcccaccgcccagctgcccacacccggtgcaggctcccgaccagtgctgccctgtttgccctgagaaacaagatgtcagagacttgccagggctgccaaggagccgggacccaggagagggctgctattttgatggtgaccggagctggcgggcagcgggtacgcggtggcaccccgttgtgcccccctttggcttaattaagtgtgctgtctgcacctgcaaggggggcactggagaggtgcactgtgagaaggtgcagtgtccccggctggcctgtgcccagcctgtgcgtgtcaaccccaccgactgctgcaaacagtgtccagtggggtcgggggcccacccccagctgggggaccccatgcaggctgatgggccccggggctgccgttttgctgggcagtggttcccagagagtcagagctggcacccctcagtgcccccttttggagagatgagctgtatcacctgcagatgtggggcaggggtgcctcactgtgagcgggatgactgttcactgccactgtcctgtggctcggggaaggagagtcgatgctgttcccgctgcacggcccaccggcggccagccccagagaccagaactgatccagagctggagaaagaagccgaaggctcttagggagcagccagagggccaagtgaccaagaggatggggcctgagctggggaaggggtggcatcgaggaccttcttgcattctcctgtgggaagcccagtgcctttgctcctctgtcctgcctctactcccacccccactacctctgggaaccacagctccacaagggggagaggcagctgggccagaccgaggtcacagccactccaagtcctgccctgccaccctcggcctctgtcctggaagccccacccctttcctcctgtacataatgtcactggcttgttgggatttttaatttatcttcactcagcaccaagggcccccgacactccactcctgctgcccctgagctgagcagagtcattattggagagttttgtatttattaaaacatttctttttcagtc

SEQ ID NO: 140516 - DNA, 2868 bp, Artificial Sequence
  derived and/or modified sequence
atgcccagcctgcccgccccccccgcccccctgctgctgctgggcctgctgctgctgggcagcagacccgccagaggcgccggccccgagccccccgtgctgcccatcagaagcgagaaggagcccctgcccgtgagaggcgccgccggctgcaccttcggcggcaaggtgtacgccctggacgagacctggcaccccgacctgggcgagcccttcggcgtgatgagatgcgtgctgtgcgcctgcgaggccccccagtggggcagaagaaccagaggccccggcagagtgagctgcaagaacatcaagcccgagtgccccacccccgcctgcggccagcccagacagctgcccggccactgctgccagacctgcccccaggagagaagcagcagcgagagacagcccagcggcctgagcttcgagtaccccagagaccccgagcacagaagctacagcgacagaggcgagcccggcgccgaggagagagccagaggcgacggccacaccgacttcgtggccctgctgaccggccccagaagccaggccgtggccagagccagagtgagcctgctgagaagcagcctgagattcagcatcagctacagaagactggacagacccaccagaatcagattcagcgacagcaacggcagcgtgctgttcgagcaccccgccgcccccacccaggacggcctggtgtgcggcgtgtggagagccgtgcccagactgagcctgagactgctgagagccgagcagctgcacgtggccctggtgaccctgacccaccccagcggcgaggtgtggggccccctgatcagacacagagccctggccgccgagaccttcagcgccatcctgaccctggagggccccccccagcagggcgtgggcggcatcaccctgctgaccctgagcgacaccgaggacagcctgcacttcctgctgctgttcagaggcctgctggagcccagaagcggcggcctgacccaggtgcccctgagactgcagatcctgcaccagggccagctgctgagagagctgcaggccaacgtgagcgcccaggagcccggcttcgccgaggtgctgcccaacctgaccgtgcaggagatggactggctggtgctgggcgagctgcagatggccctggagtgggccggcagacccggcctgagaatcagcggccacatcgccgccagaaagagctgcgacgtgctgcagagcgtgctgtgcggcgccgacgccctgatccccgtgcagaccggcgccgccggcagcgccagcctgaccctgctgggcaacggcagcctgatctaccaggtgcaggtggtgggcaccagcagcgaggtggtggccatgaccctggagaccaagccccagagaagagaccagagaaccgtgctgtgccacatggccggcctgcagcccggcggccacaccgccgtgggcatctgccccggcctgggcgccagaggcgcccacatgctgctgcagaacgagctgttcctgaacgtgggcaccaaggacttccccgacggcgagctgagaggccacgtggccgccctgccctactgcggccacagcgccagacacgacaccctgcccgtgcccctggccggcgccctggtgctgccccccgtgaagagccaggccgccggccacgcctggctgagcctggacacccactgccacctgcactacgaggtgctgctggccggcctgggcggcagcgagcagggcaccgtgaccgcccacctgctgggcccccccggcacccccggccccagaagactgctgaagggcttctacggcagcgaggcccagggcgtggtgaaggacctggagcccgagctgctgagacacctggccaagggcatggccagcctgatgatcaccaccaagggcagccccagaggcgagctgagaggccaggtgcacatcgccaaccagtgcgaggtgggcggcctgagactggaggccgccggcgccgagggcgtgagagccctgggcgcccccgacaccgccagcgccgccccccccgtggtgcccggcctgcccgccctggcccccgccaagcccggcggccccggcagacccagagaccccaacacctgcttcttcgagggccagcagagaccccacggcgccagatgggcccccaactacgaccccctgtgcagcctgtgcacctgccagagaagaaccgtgatctgcgaccccgtggtgtgccccccccccagctgcccccaccccgtgcaggcccccgaccagtgctgccccgtgtgccccgagaagcaggacgtgagagacctgcccggcctgcccagaagcagagaccccggcgagggctgctacttcgacggcgacagaagctggagagccgccggcaccagatggcaccccgtggtgccccccttcggcctgatcaagtgcgccgtgtgcacctgcaagggcggcaccggcgaggtgcactgcgagaaggtgcagtgccccagactggcctgcgcccagcccgtgagagtgaaccccaccgactgctgcaagcagtgccccgtgggcagcggcgcccacccccagctgggcgaccccatgcaggccgacggccccagaggctgcagattcgccggccagtggttccccgagagccagagctggcaccccagcgtgccccccttcggcgagatgagctgcatcacctgcagatgcggcgccggcgtgccccactgcgagagagacgactgcagcctgcccctgagctgcggcagcggcaaggagagcagatgctgcagcagatgcaccgcccacagaagacccgcccccgagaccagaaccgaccccgagctggagaaggaggccgagggcagctag

SEQ ID NO: 140517 - DNA, 2748 bp, Artificial Sequence
  derived and/or modified sequence
atgcccagcctgcccgccccccccgcccccctgctgctgctgggcctgctgctgctgggcagcagacccgccagaggcgccggccccgagccccccgtgctgcccatcagaagcgagaaggagcccctgcccgtgagaggcgccgccggctgcaccttcggcggcaaggtgtacgccctggacgagacctggcaccccgacctgggcgagcccttcggcgtgatgagatgcgtgctgtgcgcctgcgaggccccccagtggggcagaagaaccagaggccccggcagagtgagctgcaagaacatcaagcccgagtgccccacccccgcctgcggccagcccagacagctgcccggccactgctgccagacctgcccccaggagagaagcagcagcgagagacagcccagcggcctgagcttcgagtaccccagagaccccgagcacagaagctacagcgacagaggcgagcccggcgccgaggagagagccagaggcgacggccacaccgacttcgtggccctgctgaccggccccagaagccaggccgtggccagagccagagtgagcctgctgagaagcagcctgagattcagcatcagctacagaagactggacagacccaccagaatcagattcagcgacagcaacggcagcgtgctgttcgagcaccccgccgcccccacccaggacggcctggtgtgcggcgtgtggagagccgtgcccagactgagcctgagactgctgagagccgagcagctgcacgtggccctggtgaccctgacccaccccagcggcgaggtgtggggccccctgatcagacacagagccctggccgccgagaccttcagcgccatcctgaccctggagggccccccccagcagggcgtgggcggcatcaccctgctgaccctgagcgacaccgaggacagcctgcacttcctgctgctgttcagaggcctgctggagcccagaagcggcggcctgacccaggtgcccctgagactgcagatcctgcaccagggccagctgctgagagagctgcaggccaacgtgagcgcccaggagcccggcttcgccgaggtgctgcccaacctgaccgtgcaggagatggactggctggtgctgggcgagctgcagatggccctggagtgggccggcagacccggcctgagaatcagcggccacatcgccgccagaaagagctgcgacgtgctgcagagcgtgctgtgcggcgccgacgccctgatccccgtgcagaccggcgccgccggcagcgccagcctgaccctgctgggcaacggcagcctgatctaccaggccgtgggcatctgccccggcctgggcgccagaggcgcccacatgctgctgcagaacgagctgttcctgaacgtgggcaccaaggacttccccgacggcgagctgagaggccacgtggccgccctgccctactgcggccacagcgccagacacgacaccctgcccgtgcccctggccggcgccctggtgctgccccccgtgaagagccaggccgccggccacgcctggctgagcctggacacccactgccacctgcactacgaggtgctgctggccggcctgggcggcagcgagcagggcaccgtgaccgcccacctgctgggcccccccggcacccccggccccagaagactgctgaagggcttctacggcagcgaggcccagggcgtggtgaaggacctggagcccgagctgctgagacacctggccaagggcatggccagcctgatgatcaccaccaagggcagccccagaggcgagctgagaggccaggtgcacatcgccaaccagtgcgaggtgggcggcctgagactggaggccgccggcgccgagggcgtgagagccctgggcgcccccgacaccgccagcgccgccccccccgtggtgcccggcctgcccgccctggcccccgccaagcccggcggccccggcagacccagagaccccaacacctgcttcttcgagggccagcagagaccccacggcgccagatgggcccccaactacgaccccctgtgcagcctgtgcacctgccagagaagaaccgtgatctgcgaccccgtggtgtgccccccccccagctgcccccaccccgtgcaggcccccgaccagtgctgccccgtgtgccccgagaagcaggacgtgagagacctgcccggcctgcccagaagcagagaccccggcgagggctgctacttcgacggcgacagaagctggagagccgccggcaccagatggcaccccgtggtgccccccttcggcctgatcaagtgcgccgtgtgcacctgcaagggcggcaccggcgaggtgcactgcgagaaggtgcagtgccccagactggcctgcgcccagcccgtgagagtgaaccccaccgactgctgcaagcagtgccccgtgggcagcggcgcccacccccagctgggcgaccccatgcaggccgacggccccagaggctgcagattcgccggccagtggttccccgagagccagagctggcaccccagcgtgccccccttcggcgagatgagctgcatcacctgcagatgcggcgccggcgtgccccactgcgagagagacgactgcagcctgcccctgagctgcggcagcggcaaggagagcagatgctgcagcagatgcaccgcccacagaagacccgcccccgagaccagaaccgaccccgagctggagaaggaggccgagggcagctag

SEQ ID NO: 140518 - protein, 1321 aa, Artificial Sequence
  derived and/or modified sequence
MSDSVILRSIKKFGEENDGFESDKSYNNDKKSRLQDEKKGDGVRVGFFQLFRFSSSTDIWLMFVGSLCAFLHGIAQPGVLLIFGTMTDVFIDYDVELQELQIPGKACVNNTIVWTNSSLNQNMTNGTRCGLLNIESEMIKFASYYAGIAVAVLITGYIQICFWVIAAARQIQKMRKFYFRRIMRMEIGWFDCNSVGELNTRFSDDINKINDAIADQMALFIQRMTSTICGFLLGFFRGWKLTLVIISVSPLIGIGAATIGLSVSKFTDYELKAYAKAGVVADEVISSMRTVAAFGGEKREVERYEKNLVFAQRWGIRKGIVMGFFTGFVWCLIFLCYALAFWYGSTLVLDEGEYTPGTLVQIFLSVIVGALNLGNASPCLEAFATGRAAATSIFETIDRKPIIDCMSEDGYKLDRIKGEIEFHNVTFHYPSRPEVKILNDLNMVIKPGEMTALVGPSGAGKSTALQLIQRFYDPCEGMVTVDGHDIRSLNIQWLRDQIGIVEQEPVLFSTTIAENIRYGREDATMEDIVQAAKEANAYNFIMDLPQQFDTLVGEGGGQMSGGQKQRVAIARALIRNPKILLLDMATSALDNESEAMVQEVLSKIQHGHTIISVAHRLSTVRAADTIIGFEHGTAVERGTHEELLERKGVYFTLVTLQSQGNQALNEEDIKDATEDDMLARTFSRGSYQDSLRASIRQRSKSQLSYLVHEPPLAVVDHKSTYEEDRKDKDIPVQEEVEPAPVRRILKFSAPEWPYMLVGSVGAAVNGTVTPLYAFLFSQILGTFSIPDKEEQRSQINGVCLLFVAMGCVSLFTQFLQGYAFAKSGELLTKRLRKFGFRAMLGQDIAWFDDLRNSPGALTTRLATDASQVQGAAGSQIGMIVNSFTNVTVAMIIAFSFSWKLSLVILCFFPFLALSGATQTRMLTGFASRDKQALEMVGQITNEALSNIRTVAGIGKERRFIEALETELEKPFKTAIQKANIYGFCFAFAQCIMFIANSASYRYGGYLISNEGLHFSYVFRVISAVVLSATALGRAFSYTPSYAKAKISAARFFQLLDRQPPISVYNTAGEKWDNFQGKIDFVDCKFTYPSRPDSQVLNGLSVSISPGQTLAFVGSSGCGKSTSIQLLERFYDPDQGKVMIDGHDSKKVNVQFLRSNIGIVSQEPVLFACSIMDNIKYGDNTKEIPMERVIAAAKQAQLHDFVMSLPEKYETNVGSQGSQLSRGEKQRIAIARAIVRDPKILLLDEATSALDTESEKTVQVALDKAREGRTCIVIAHRLSTIQNADIIAVMAQGVVIEKGTHEELMAQKGAYYKLVTTGSPIS

SEQ ID NO: 140519 - DNA, 3963 bp, Artificial Sequence
  derived and/or modified sequence
atgagcgacagcgtgatcctgcgcagcatcaagaagttcggcgaggagaacgacggcttcgagagcgacaagagctacaacaacgacaagaagagccgcctgcaggacgagaagaagggcgacggcgtgcgcgtgggcttcttccagctgttccgcttcagcagcagcaccgacatctggctgatgttcgtgggcagcctgtgcgccttcctgcacggcatcgcccagcccggcgtgctgctgatcttcggcaccatgaccgacgtgttcatcgactacgacgtggagctgcaggagctgcagatccccggcaaggcctgcgtgaacaacaccatcgtgtggaccaacagcagcctgaaccagaacatgaccaacggcacccgctgcggcctgctgaacatcgagagcgagatgatcaagttcgccagctactacgccggcatcgccgtggccgtgctgatcaccggctacatccagatctgcttctgggtgatcgccgccgcccgccagatccagaagatgcgcaagttctacttccgccgcatcatgcgcatggagatcggctggttcgactgcaacagcgtgggcgagctgaacacccgcttcagcgacgacatcaacaagatcaacgacgccatcgccgaccagatggccctgttcatccagcgcatgaccagcaccatctgcggcttcctgctgggcttcttccgcggctggaagctgaccctggtgatcatcagcgtgagccccctgatcggcatcggcgccgccaccatcggcctgagcgtgagcaagttcaccgactacgagctgaaggcctacgccaaggccggcgtggtggccgacgaggtgatcagcagcatgcgcaccgtggccgccttcggcggcgagaagcgcgaggtggagcgctacgagaagaacctggtgttcgcccagcgctggggcatccgcaagggcatcgtgatgggcttcttcaccggcttcgtgtggtgcctgatcttcctgtgctacgccctggccttctggtacggcagcaccctggtgctggacgagggcgagtacacccccggcaccctggtgcagatcttcctgagcgtgatcgtgggcgccctgaacctgggcaacgccagcccctgcctggaggccttcgccaccggccgcgccgccgccaccagcatcttcgagaccatcgaccgcaagcccatcatcgactgcatgagcgaggacggctacaagctggaccgcatcaagggcgagatcgagttccacaacgtgaccttccactaccccagccgccccgaggtgaagatcctgaacgacctgaacatggtgatcaagcccggcgagatgaccgccctggtgggccccagcggcgccggcaagagcaccgccctgcagctgatccagcgcttctacgacccctgcgagggcatggtgaccgtggacggccacgacatccgcagcctgaacatccagtggctgcgcgaccagatcggcatcgtggagcaggagcccgtgctgttcagcaccaccatcgccgagaacatccgctacggccgcgaggacgccaccatggaggacatcgtgcaggccgccaaggaggccaacgcctacaacttcatcatggacctgccccagcagttcgacaccctggtgggcgagggcggcggccagatgagcggcggccagaagcagcgcgtggccatcgcccgcgccctgatccgcaaccccaagatcctgctgctggacatggccaccagcgccctggacaacgagagcgaggccatggtgcaggaggtgctgagcaagatccagcacggccacaccatcatcagcgtggcccaccgcctgagcaccgtgcgcgccgccgacaccatcatcggcttcgagcacggcaccgccgtggagcgcggcacccacgaggagctgctggagcgcaagggcgtgtacttcaccctggtgaccctgcagagccagggcaaccaggccctgaacgaggaggacatcaaggacgccaccgaggacgacatgctggcccgcaccttcagccgcggcagctaccaggacagcctgcgcgccagcatccgccagcgcagcaagagccagctgagctacctggtgcacgagccccccctggccgtggtggaccacaagagcacctacgaggaggaccgcaaggacaaggacatccccgtgcaggaggaggtggagcccgcccccgtgcgccgcatcctgaagttcagcgcccccgagtggccctacatgctggtgggcagcgtgggcgccgccgtgaacggcaccgtgacccccctgtacgccttcctgttcagccagatcctgggcaccttcagcatccccgacaaggaggagcagcgcagccagatcaacggcgtgtgcctgctgttcgtggccatgggctgcgtgagcctgttcacccagttcctgcagggctacgccttcgccaagagcggcgagctgctgaccaagcgcctgcgcaagttcggcttccgcgccatgctgggccaggacatcgcctggttcgacgacctgcgcaacagccccggcgccctgaccacccgcctggccaccgacgccagccaggtgcagggcgccgccggcagccagatcggcatgatcgtgaacagcttcaccaacgtgaccgtggccatgatcatcgccttcagcttcagctggaagctgagcctggtgatcctgtgcttcttccccttcctggccctgagcggcgccacccagacccgcatgctgaccggcttcgccagccgcgacaagcaggccctggagatggtgggccagatcaccaacgaggccctgagcaacatccgcaccgtggccggcatcggcaaggagcgccgcttcatcgaggccctggagaccgagctggagaagcccttcaagaccgccatccagaaggccaacatctacggcttctgcttcgccttcgcccagtgcatcatgttcatcgccaacagcgccagctaccgctacggcggctacctgatcagcaacgagggcctgcacttcagctacgtgttccgcgtgatcagcgccgtggtgctgagcgccaccgccctgggccgcgccttcagctacacccccagctacgccaaggccaagatcagcgccgcccgcttcttccagctgctggaccgccagccccccatcagcgtgtacaacaccgccggcgagaagtgggacaacttccagggcaagatcgacttcgtggactgcaagttcacctaccccagccgccccgacagccaggtgctgaacggcctgagcgtgagcatcagccccggccagaccctggccttcgtgggcagcagcggctgcggcaagagcaccagcatccagctgctggagcgcttctacgaccccgaccagggcaaggtgatgatcgacggccacgacagcaagaaggtgaacgtgcagttcctgcgcagcaacatcggcatcgtgagccaggagcccgtgctgttcgcctgcagcatcatggacaacatcaagtacggcgacaacaccaaggagatccccatggagcgcgtgatcgccgccgccaagcaggcccagctgcacgacttcgtgatgagcctgcccgagaagtacgagaccaacgtgggcagccagggcagccagctgagccgcggcgagaagcagcgcatcgccatcgcccgcgccatcgtgcgcgaccccaagatcctgctgctggacgaggccaccagcgccctggacaccgagagcgagaagaccgtgcaggtggccctggacaaggcccgcgagggccgcacctgcatcgtgatcgcccaccgcctgagcaccatccagaacgccgacatcatcgccgtgatggcccagggcgtggtgatcgagaagggcacccacgaggagctgatggcccagaagggcgcctactacaagctggtgaccaccggcagccccatcagc

SEQ ID NO: 140520 - DNA, 3966 bp, Artificial Sequence
  derived and/or modified sequence
atgagcgacagcgtgatcctgagaagcatcaagaagttcggcgaggagaacgacggcttcgagagcgacaagagctacaacaacgacaagaagagcagactgcaggacgagaagaagggcgacggcgtgagagtgggcttcttccagctgttcagattcagcagcagcaccgacatctggctgatgttcgtgggcagcctgtgcgccttcctgcacggcatcgcccagcccggcgtgctgctgatcttcggcaccatgaccgacgtgttcatcgactacgacgtggagctgcaggagctgcagatccccggcaaggcctgcgtgaacaacaccatcgtgtggaccaacagcagcctgaaccagaacatgaccaacggcaccagatgcggcctgctgaacatcgagagcgagatgatcaagttcgccagctactacgccggcatcgccgtggccgtgctgatcaccggctacatccagatctgcttctgggtgatcgccgccgccagacagatccagaagatgagaaagttctacttcagaagaatcatgagaatggagatcggctggttcgactgcaacagcgtgggcgagctgaacaccagattcagcgacgacatcaacaagatcaacgacgccatcgccgaccagatggccctgttcatccagagaatgaccagcaccatctgcggcttcctgctgggcttcttcagaggctggaagctgaccctggtgatcatcagcgtgagccccctgatcggcatcggcgccgccaccatcggcctgagcgtgagcaagttcaccgactacgagctgaaggcctacgccaaggccggcgtggtggccgacgaggtgatcagcagcatgagaaccgtggccgccttcggcggcgagaagagagaggtggagagatacgagaagaacctggtgttcgcccagagatggggcatcagaaagggcatcgtgatgggcttcttcaccggcttcgtgtggtgcctgatcttcctgtgctacgccctggccttctggtacggcagcaccctggtgctggacgagggcgagtacacccccggcaccctggtgcagatcttcctgagcgtgatcgtgggcgccctgaacctgggcaacgccagcccctgcctggaggccttcgccaccggcagagccgccgccaccagcatcttcgagaccatcgacagaaagcccatcatcgactgcatgagcgaggacggctacaagctggacagaatcaagggcgagatcgagttccacaacgtgaccttccactaccccagcagacccgaggtgaagatcctgaacgacctgaacatggtgatcaagcccggcgagatgaccgccctggtgggccccagcggcgccggcaagagcaccgccctgcagctgatccagagattctacgacccctgcgagggcatggtgaccgtggacggccacgacatcagaagcctgaacatccagtggctgagagaccagatcggcatcgtggagcaggagcccgtgctgttcagcaccaccatcgccgagaacatcagatacggcagagaggacgccaccatggaggacatcgtgcaggccgccaaggaggccaacgcctacaacttcatcatggacctgccccagcagttcgacaccctggtgggcgagggcggcggccagatgagcggcggccagaagcagagagtggccatcgccagagccctgatcagaaaccccaagatcctgctgctggacatggccaccagcgccctggacaacgagagcgaggccatggtgcaggaggtgctgagcaagatccagcacggccacaccatcatcagcgtggcccacagactgagcaccgtgagagccgccgacaccatcatcggcttcgagcacggcaccgccgtggagagaggcacccacgaggagctgctggagagaaagggcgtgtacttcaccctggtgaccctgcagagccagggcaaccaggccctgaacgaggaggacatcaaggacgccaccgaggacgacatgctggccagaaccttcagcagaggcagctaccaggacagcctgagagccagcatcagacagagaagcaagagccagctgagctacctggtgcacgagccccccctggccgtggtggaccacaagagcacctacgaggaggacagaaaggacaaggacatccccgtgcaggaggaggtggagcccgcccccgtgagaagaatcctgaagttcagcgcccccgagtggccctacatgctggtgggcagcgtgggcgccgccgtgaacggcaccgtgacccccctgtacgccttcctgttcagccagatcctgggcaccttcagcatccccgacaaggaggagcagagaagccagatcaacggcgtgtgcctgctgttcgtggccatgggctgcgtgagcctgttcacccagttcctgcagggctacgccttcgccaagagcggcgagctgctgaccaagagactgagaaagttcggcttcagagccatgctgggccaggacatcgcctggttcgacgacctgagaaacagccccggcgccctgaccaccagactggccaccgacgccagccaggtgcagggcgccgccggcagccagatcggcatgatcgtgaacagcttcaccaacgtgaccgtggccatgatcatcgccttcagcttcagctggaagctgagcctggtgatcctgtgcttcttccccttcctggccctgagcggcgccacccagaccagaatgctgaccggcttcgccagcagagacaagcaggccctggagatggtgggccagatcaccaacgaggccctgagcaacatcagaaccgtggccggcatcggcaaggagagaagattcatcgaggccctggagaccgagctggagaagcccttcaagaccgccatccagaaggccaacatctacggcttctgcttcgccttcgcccagtgcatcatgttcatcgccaacagcgccagctacagatacggcggctacctgatcagcaacgagggcctgcacttcagctacgtgttcagagtgatcagcgccgtggtgctgagcgccaccgccctgggcagagccttcagctacacccccagctacgccaaggccaagatcagcgccgccagattcttccagctgctggacagacagccccccatcagcgtgtacaacaccgccggcgagaagtgggacaacttccagggcaagatcgacttcgtggactgcaagttcacctaccccagcagacccgacagccaggtgctgaacggcctgagcgtgagcatcagccccggccagaccctggccttcgtgggcagcagcggctgcggcaagagcaccagcatccagctgctggagagattctacgaccccgaccagggcaaggtgatgatcgacggccacgacagcaagaaggtgaacgtgcagttcctgagaagcaacatcggcatcgtgagccaggagcccgtgctgttcgcctgcagcatcatggacaacatcaagtacggcgacaacaccaaggagatccccatggagagagtgatcgccgccgccaagcaggcccagctgcacgacttcgtgatgagcctgcccgagaagtacgagaccaacgtgggcagccagggcagccagctgagcagaggcgagaagcagagaatcgccatcgccagagccatcgtgagagaccccaagatcctgctgctggacgaggccaccagcgccctggacaccgagagcgagaagaccgtgcaggtggccctggacaaggccagagagggcagaacctgcatcgtgatcgcccacagactgagcaccatccagaacgccgacatcatcgccgtgatggcccagggcgtggtgatcgagaagggcacccacgaggagctgatggcccagaagggcgcctactacaagctggtgaccaccggcagccccatcagctag

SEQ ID NO: 140521 - DNA, 3966 bp, Artificial Sequence
  derived and/or modified sequence
atgtcagattctgtcattctgcgatctattaagaagttcggcgaggaaaacgacggctttgagtcggataagagctataacaacgataagaagtcccgattgcaggacgagaagaaaggcgatggcgtccgcgtgggtttcttccagctcttcaggttttccagttccaccgacatctggttgatgttcgtaggctctttgtgcgcatttctgcacggcatcgcccagcccggagtacttctgatcttcggaacgatgaccgatgtgttcatcgattatgatgtcgaactgcaggaactgcagattcctggaaaggcctgtgtcaataatacaatcgtctggacgaattcctctctcaatcagaacatgacaaacgggacacgttgtggactgctgaacatcgagagtgaaatgatcaagttcgctagctactatgccgggattgcggtcgcagtgcttatcaccggctacattcagatctgcttctgggtcatcgctgcagctaggcagattcagaagatgaggaagttttacttcaggaggatcatgcgcatggaaattgggtggtttgattgcaacagtgtcggagagctcaatacaagattttccgatgacatcaacaaaattaatgatgctatcgctgatcagatggccctgttcatccaaaggatgacgtcaaccatctgcggcttcctgctgggcttctttcgaggctggaagcttacgctggtcatcatatctgtcagccctctcatcggcattggagccgccacgatcgggttgagcgtctccaaatttacggattatgaactcaaggcatatgccaaagctggcgttgttgcggacgaagtaatctcaagcatgcgaacagtcgccgcatttggaggcgagaagcgggaggtagagcgatacgagaaaaacctggtgtttgcccagcgttggggcatccggaagggcatcgtcatgggcttcttcactggcttcgtatggtgtctgatcttcctgtgctatgccctcgccttctggtacggaagtactctcgttctggacgagggtgagtacaccccaggaaccctagtgcagatctttctgagcgttattgtaggtgcattgaacctgggcaacgctagcccatgcctggaagcattcgccaccgggcgagccgcagcaacgagcatttttgagactatagataggaaacctatcatcgattgcatgtctgaggatgggtacaaactggatagaattaagggtgagatcgagttccataatgtgacctttcactatcctagtcgaccagaggttaaaatcctgaatgatttgaatatggtcatcaaacccggggaaatgaccgctctggtgggcccgagcggcgccggcaagagcactgcccttcaattgatccagcggttttacgatccatgtgaaggaatggtcacggtagatggacatgatatccgcagcttgaatattcaatggctcagggaccagataggcattgtggagcaggagcctgtcctcttctctacaaccatcgccgagaatataagatacggccgggaggatgcaacgatggaagacatcgtacaggccgctaaagaggccaatgcctataacttcatcatggacctgccacaacagttcgatacgctggtcggcgagggaggggggcaaatgtcaggcgggcagaagcagagggtagcgatcgctcgcgccctcattcgtaacccaaaaatattgctcttggacatggccactagtgcgctggataatgaatcggaggccatggtgcaggaggtactgtctaagatacagcacggccacacaataatctctgtggcccacagattgtctaccgtaagagcagccgatactattatcggcttcgaacacggaactgcggtagagagaggcactcacgaggagctgcttgaacggaagggagtctatttcaccctggtgactctccagtctcagggaaaccaggctttaaacgaagaagatattaaggacgccacggaagacgatatgctggcgcgcaccttcagtagaggttcctaccaagattccctgcgtgcaagcattcggcagcggagcaaaagccagttatcttatttggtccacgaaccacctctcgctgttgttgaccataagagtacatacgaggaagatcggaaggacaaggatattcccgtccaagaggaggttgaacctgcaccagtccgccgtattttgaagtttagtgctcctgaatggccctacatgttggtgggatccgtgggcgccgcagtcaacggcacagtaactcccctgtacgcctttcttttctctcagattctgggaacattctctattcccgataaggaggagcagcgaagccagattaacggcgtttgccttcttttcgtggccatggggtgtgtcagtctgttcacccaattcctacagggctacgcctttgcaaagagcggcgagctcctaacaaagagacttcgcaagttcggatttagggccatgttggggcaggacatcgcctggttcgacgatctcaggaatagtccaggagctctgacaacgcgcttagccactgacgcatcccaggttcagggtgccgccggatcacagattgggatgattgtcaactcctttacaaacgtgactgttgcgatgattatcgccttctccttttcctggaaattaagcctggtcatcctgtgtttcttcccattcctggccctgtccggagccacccagacacgaatgttaaccggattcgcgtcacgagacaagcaggccctcgagatggtggggcagattaccaacgaggctctttccaatatcaggacagtcgccggcattggcaaagagcgcagatttattgaagcgctcgaaaccgaattggaaaaaccgtttaaaactgccatacaaaaggctaacatctatggcttttgctttgcgttcgcacagtgcatcatgttcatcgccaactctgcatcctacaggtatggtggttacctgatatccaatgaagggctccatttctcttatgtgttcagagtcatctcagctgtcgtactgagtgccactgccttaggccgggcttttagctacacaccaagctacgcaaaagccaagatctccgctgcccggttttttcaactgctggataggcagccaccaatctcagtgtataacaccgccggggagaaatgggacaattttcagggtaagatcgattttgttgactgtaaattcacatacccaagtcgacccgactctcaggtgctaaacggactgagcgtcagcatatcgcctggccaaacactggcctttgtgggtagtagtggttgcgggaagagtacctccattcagttgctggaacgattttatgacccagaccaggggaaggtgatgattgatggccacgatagtaagaaagtaaatgtacagttcctccggagcaacatcgggattgtgtcacaggagccggtgctatttgcctgcagtattatggataatattaaatatggtgataacaccaaagagatcccaatggagcgtgttatagccgcggccaagcaggcacagttgcacgatttcgtcatgagtctgccagagaagtacgagacgaacgtcgggtcacagggatcacagttgagcaggggagagaaacagaggattgccattgcacgggctatcgtacgggaccctaagattctcctgctggacgaagctacaagcgcactggataccgagagcgaaaagaccgtccaggtggcattggataaagcacgcgaaggccggacatgcatcgtgattgcacaccgtttatccaccatccaaaatgcagatatcattgcggttatggctcagggggtggtgatcgagaaagggactcacgaagaattgatggctcaaaaaggggcctactacaagctggttacaacaggatctccaattagttag

SEQ ID NO: 140522 - DNA, 4775 bp, Artificial Sequence
  derived and/or modified sequence
aatgatgaaaaccgaggttggaaaaggttgtgaaaccttttaactctccacagtggagtccattatttcctctggcttcctcaaattcatattcacagggtcgttggctgtgggttgcaattaccatgtctgactcagtaattcttcgaagtataaagaaatttggagaggagaatgatggttttgagtcagataaatcatataataatgataagaaatcaaggttacaagatgagaagaaaggtgatggcgttagagttggcttctttcaattgtttcggttttcttcatcaactgacatttggctgatgtttgtgggaagtttgtgtgcatttctccatggaatagcccagccaggcgtgctactcatttttggcacaatgacagatgtttttattgactacgacgttgagttacaagaactccagattccaggaaaagcatgtgtgaataacaccattgtatggactaacagttccctcaaccagaacatgacaaatggaacacgttgtgggttgctgaacatcgagagcgaaatgatcaaatttgccagttactatgctggaattgctgtcgcagtacttatcacaggatatattcaaatatgcttttgggtcattgccgcagctcgtcagatacagaaaatgagaaaattttactttaggagaataatgagaatggaaatagggtggtttgactgcaattcagtgggggagctgaatacaagattctctgatgatattaataaaatcaatgatgccatagctgaccaaatggcccttttcattcagcgcatgacctcgaccatctgtggtttcctgttgggatttttcaggggttggaaactgaccttggttattatttctgtcagccctctcattgggattggagcagccaccattggtctgagtgtgtccaagtttacggactatgagctgaaggcctatgccaaagcaggggtggtggctgatgaagtcatttcatcaatgagaacagtggctgcttttggtggtgagaaaagagaggttgaaaggtatgagaaaaatcttgtgttcgcccagcgttggggaattagaaaaggaatagtgatgggattctttactggattcgtgtggtgtctcatctttttgtgttatgcactggccttctggtacggctccacacttgtcctggatgaaggagaatatacaccaggaacccttgtccagattttcctcagtgtcatagtaggagctttaaatcttggcaatgcctctccttgtttggaagcctttgcaactggacgtgcagcagccaccagcatttttgagacaatagacaggaaacccatcattgactgcatgtcagaagatggttacaagttggatcgaatcaagggtgaaattgaattccataatgtgaccttccattatccttccagaccagaggtgaagattctaaatgacctcaacatggtcattaaaccaggggaaatgacagctctggtaggacccagtggagctggaaaaagtacagcactgcaactcattcagcgattctatgacccctgtgaaggaatggtgaccgtggatggccatgacattcgctctcttaacattcagtggcttagagatcagattgggatagtggagcaagagccagttctgttctctaccaccattgcagaaaatattcgctatggcagagaagatgcaacaatggaagacatagtccaagctgccaaggaggccaatgcctacaacttcatcatggacctgccacagcaatttgacacccttgttggagaaggaggaggccagatgagtggtggccagaaacaaagggtagctatcgccagagccctcatccgaaatcccaagattctgcttttggacatggccacctcagctctggacaatgagagtgaagccatggtgcaagaagtgctgagtaagattcagcatgggcacacaatcatttcagttgctcatcgcttgtctacggtcagagctgcagataccatcattggttttgaacatggcactgcagtggaaagagggacccatgaagaattactggaaaggaaaggtgtttacttcactctagtgactttgcaaagccagggaaatcaagctcttaatgaagaggacataaaggatgcaactgaagatgacatgcttgcgaggacctttagcagagggagctaccaggatagtttaagggcttccatccggcaacgctccaagtctcagctttcttacctggtgcacgaacctccattagctgttgtagatcataagtctacctatgaagaagatagaaaggacaaggacattcctgtgcaggaagaagttgaacctgccccagttaggaggattctgaaattcagtgctccagaatggccctacatgctggtagggtctgtgggtgcagctgtgaacgggacagtcacacccttgtatgcctttttattcagccagattcttgggactttttcaattcctgataaagaggaacaaaggtcacagatcaatggtgtgtgcctactttttgtagcaatgggctgtgtatctcttttcacccaatttctacagggatatgcctttgctaaatctggggagctcctaacaaaaaggctacgtaaatttggtttcagggcaatgctggggcaagatattgcctggtttgatgacctcagaaatagccctggagcattgacaacaagacttgctacagatgcttcccaagttcaaggggctgccggctctcagatcgggatgatagtcaattccttcactaacgtcactgtggccatgatcattgccttctcctttagctggaagctgagcctggtcatcttgtgcttcttccccttcttggctttatcaggagccacacagaccaggatgttgacaggatttgcctctcgagataagcaggccctggagatggtgggacagattacaaatgaagccctcagtaacatccgcactgttgctggaattggaaaggagaggcggttcattgaagcacttgagactgagctggagaagcccttcaagacagccattcagaaagccaatatttacggattctgctttgcctttgcccagtgcatcatgtttattgcgaattctgcttcctacagatatggaggttacttaatctccaatgaggggctccatttcagctatgtgttcagggtgatctctgcagttgtactgagtgcaacagctcttggaagagccttctcttacaccccaagttatgcaaaagctaaaatatcagctgcacgcttttttcaactgctggaccgacaacccccaatcagtgtatacaatactgcaggtgaaaaatgggacaacttccaggggaagattgattttgttgattgtaaatttacatatccttctcgacctgactcgcaagttctgaatggtctctcagtgtcgattagtccagggcagacactggcgtttgttgggagcagtggatgtggcaaaagcactagcattcagctgttggaacgtttctatgatcctgatcaagggaaggtgatgatagatggtcatgacagcaaaaaagtaaatgtccagttcctccgctcaaacattggaattgtttcccaggaaccagtgttgtttgcctgtagcataatggacaatatcaagtatggagacaacaccaaagaaattcccatggaaagagtcatagcagctgcaaaacaggctcagctgcatgattttgtcatgtcactcccagagaaatatgaaactaacgttgggtcccaggggtctcaactctctagaggggagaaacaacgcattgctattgctcgggccattgtacgagatcctaaaatcttgctactagatgaagccacttctgccttagacacagaaagtgaaaagacggtgcaggttgctctagacaaagccagagagggtcggacctgcattgtcattgcccatcgcttgtccaccatccagaacgcggatatcattgctgtcatggcacagggggtggtgattgaaaaggggacccatgaagaactgatggcccaaaaaggagcctactacaaactagtcaccactggatcccccatcagttgacccaatgcaagaatctcagacacacatgacgcaccagttacaggggttgtttttaaagaaaaaaacaatcccagcaggagggattgctgggattgttttttctttaaagaagaatgttaatattttacttttacagtcattttcctacatcggaatccaagctaatttctaatggccttccataataattctgctttagatgtgtatacagaaaatgaaagaaactagggtccatatgagggaaaacccaatgtcaagtggcagctcagccaccactcagtgcttctctgtgcaggagccagtcctgattaatatgtgggaattagtgagacatcagggagtaagtgacactttgaactcctcaagggcagagaactgtctttcatttttgaaccctcggtgtacacagaggcgggtctataacaggcaatcaacaaacgtttcttgagctagaccaaggtcagatttgaaaagaacagaaggactgaagaccagctgtgtttcttaactaaatttgtctttcaagtgaaaccagcttccttcatctctaaggctaaggatagggaaagggtggatgctctcaggctgagggaggcagaaagggaaagtattagcatgagctttccagttagggctgttgatttatgctttaacttcagagtgagtgtaggggtggtgatgcta

SEQ ID NO: 140523 - DNA, 3966 bp, Artificial Sequence
  derived and/or modified sequence
atgtctgacagcgtcatcctgcggagcatcaagaagtttggagaggagaatgatggctttgaaagtgacaagagctacaacaatgacaagaagagccggctgcaggatgagaagaagggagatggagtgcgggtgggcttcttccagctgttccgcttcagcagcagcacagacatctggctgatgtttgtgggcagcctgtgtgccttcctgcacggcatcgcccagcccggggtgctgctgatcttcggcaccatgacagatgtgttcattgattatgatgtggagctgcaggagctgcagatccctgggaaggcctgtgtgaacaacaccatcgtgtggaccaacagcagcctgaaccagaacatgaccaacggcacccgctgtggcctgctgaacatcgagagcgagatgatcaagtttgccagctactatgccggcattgctgtggccgtgctgatcaccggctacatccagatctgcttctgggtgattgctgctgcccggcagatccagaagatgaggaagttctacttccgccgcatcatgaggatggagatcggctggtttgactgcaacagcgtgggggagctgaacacccgcttcagtgatgacatcaacaagatcaatgatgccatcgctgaccagatggccctcttcatccagaggatgaccagcaccatctgtggcttcctgctgggcttcttccggggctggaagctgaccctggtgatcatctctgtgagccccctcatcggcatcggggccgccaccatcggcctgtctgtgtccaagttcacagattatgagctgaaggcctatgccaaggccggcgtggtggctgatgaggtgatcagctccatgaggacagtggccgccttcggcggggagaagcgggaggtggagagatatgagaagaacctggtgtttgcccagcgctggggcatcaggaagggcatcgtgatgggcttcttcaccggctttgtgtggtgcctgatcttcctgtgctacgccctggccttctggtacggcagcaccctggtgctggatgaaggagagtacaccccaggcaccctggtgcagatcttcctgtctgtgattgtgggcgccctgaacctgggcaatgccagcccctgcctggaggcctttgccaccggccgggctgctgccaccagcatctttgagaccatcgacaggaagcccatcatcgactgcatgtctgaagatggctacaagctggaccgcatcaagggggagattgagttccacaacgtgaccttccactaccccagcaggcctgaggtgaagatcctgaatgacctgaacatggtgatcaagccaggagagatgacagccctggtgggccccagcggggccggcaagagcacagccctgcagctgatccagcgcttctatgacccctgtgagggcatggtgacagtggatggccatgacatccgcagcctgaacatccagtggctgcgggaccagatcggcatcgtggagcaggagcctgtgctcttcagcaccaccatcgccgagaacatccgctatggaagagaagatgccaccatggaggacatcgtgcaggccgccaaggaggccaatgcctacaacttcatcatggacctgccccagcagtttgacaccctggtgggggagggcggcggccagatgtctgggggccagaagcagagggtggccatcgcccgggccctgatccggaaccccaagatcctgctgctggacatggccaccagcgccctggacaatgaaagtgaggccatggtgcaggaggtgctgagcaagatccagcacggccacaccatcatctctgtggcccaccggctgagcacagtgcgggctgctgacaccatcattggatttgaacatggaacagctgtggagcggggcacccatgaggagctgctggagaggaaaggagtgtacttcaccctggtgaccctgcagagccagggcaaccaggccctgaatgaggaggacatcaaggatgccacagaagatgacatgctggcccggaccttcagccggggcagctaccaggacagcctgcgggccagcatccggcagaggagcaagagccagctgagctacctggtgcatgagccccccctggccgtggtggaccacaagagcacctatgaggaggacaggaaggacaaggacatccctgtgcaggaggaggtggagcccgcccctgtgcggcgcatcctgaagttcagcgcccctgagtggccctacatgctggtgggctctgtgggcgctgctgtgaatggaacagtgacccccctgtatgccttcctgttcagccagatcctgggcaccttcagcatcccagacaaggaggagcagaggagccagatcaacggggtgtgcctgctgtttgtggccatgggctgtgtgtccctcttcacccagttcctgcagggctacgcctttgccaagtctggagagctgctgaccaagaggctgaggaagtttggcttccgggccatgctgggccaggacatcgcctggtttgatgacctgaggaacagccctggggccctgaccacccggctggccacagatgccagccaggtgcagggcgccgccggcagccagatcggcatgattgtgaacagcttcaccaacgtgacagtggccatgatcatcgccttctccttctcctggaagctgagcctggtgatcctgtgcttcttccccttcctggccctgagcggggccacccagaccaggatgctgactggatttgccagccgggacaagcaggccctggagatggtgggccagatcaccaatgaggccctgagcaacatcagaacagtggccggcatcggcaaggagcggcgcttcatcgaggccctggagacagagctggagaagcccttcaagacagccatccagaaggccaacatctacggcttctgctttgcctttgcccagtgcatcatgttcatcgccaacagcgccagctaccgctatggaggctacctgatcagcaatgaaggcctgcacttctcctatgtgttccgggtcatctctgctgtggtgctgagcgccacagccctgggccgggccttctcctacacccccagctatgccaaggccaagatctctgctgcccgcttcttccagctgctggaccggcagccccccatctctgtgtacaacacagctggggagaagtgggacaacttccagggcaagattgactttgtggactgcaagttcacctaccccagcaggccagacagccaggtgctgaatggcctgtctgtgtccatcagccctggccagaccctggcctttgtgggcagcagcggctgcggcaagagcaccagcatccagctgctggagcgcttctatgaccctgaccagggcaaggtgatgattgatggccatgacagcaagaaggtgaatgtgcagttcctgcggagcaacatcggcatcgtgtcccaggagcctgtgctgtttgcctgcagcatcatggacaacatcaagtacggggacaacaccaaggagatccccatggagcgggtgattgctgctgccaagcaggcccagctgcatgactttgtgatgagcctgcctgagaagtatgagaccaacgtgggcagccagggcagccagctgagcagaggagagaagcagagaattgccatcgcccgggccatcgtgcgggaccccaagatcctgctgctggatgaggccaccagcgccctggacacagaaagtgagaagacagtgcaggtggccctggacaaggcccgggagggccgcacctgcatcgtgattgcccaccggctgagcaccatccagaatgctgacatcatcgctgtgatggcccagggcgtggtgattgagaagggcacccatgaggagctgatggcccagaagggggcctactacaagctggtgaccaccggcagccccatctcctag

SEQ ID NO: 140524 - DNA, 3966 bp, Artificial Sequence
  derived and/or modified sequence
atgagcgacagcgtgatcctgcggagcatcaagaagttcggcgaggaaaacgatggctttgaaagtgacaagtcttacaataatgataagaagagccgcctccaagacgagaagaagggcgacggcgtccgggtcggcttctttcagctgtttcgtttctcttcctctaccgacatctggctgatgtttgtggggtccctgtgtgcttttctgcacggtatcgcacagccaggagtgcttttaatcttcgggacgatgacggacgtcttcattgactatgacgttgaactccaggagctgcagatccctgggaaggcatgcgtcaacaacaccatagtgtggacaaatagtagtctcaatcagaatatgactaacggaactagatgtggtctgctcaatatcgaaagcgagatgataaaatttgccagctactatgccggaatcgccgtagctgttctgataaccgggtacattcagatctgcttctgggtgatagctgccgcacgtcagattcagaagatgagaaagttttactttcggagaataatgcggatggagattggatggttcgactgtaacagcgtcggagaattaaatacacggtttagcgacgacatcaacaaaattaatgatgcgatagccgaccagatggcactcttcattcaaagaatgacctccactatttgcggctttctgctcggcttttttcgcggatggaaactcacattggtgataatttccgtatcacccctcattggaataggggctgcaactattggcctctccgtgtcaaaattcacggattatgaacttaaagcctatgctaaagctggggttgtggccgacgaagtaatctcatcaatgcggacagtggccgcttttggtggagagaaacgcgaggtagagagatatgaaaagaacctcgtgtttgcccaacgttggggtattcgcaagggcatcgtaatgggattctttaccgggtttgtttggtgtctgattttcctttgttatgcgctggctttctggtatgggtccaccctggtcttagatgaaggcgagtacacccccggaacccttgttcagatattcctgtcagtcattgtgggcgccctgaatctcggaaatgctagcccatgccttgaggcgttcgctacagggagagctgccgcgactagtatttttgaaacaatagatagaaagcctatcattgattgtatgtctgaagacggctacaaactggacaggataaagggagagatcgaattccataacgtcactttccattatccatcaagaccagaggtgaaaattctcaatgatctgaacatggtgattaaaccgggcgagatgacggccctggtgggcccatctggggctggtaaatctactgcactccaactgattcagcggttctacgacccatgcgaaggaatggtaaccgtcgacggacacgacatccgaagtctgaatatccagtggctccgggaccagatcgggatagtagagcaagagccggtgctgttcagcaccactattgcggagaatattcggtatggaagggaagatgccactatggaggatatcgtgcaggcggcaaaggaggcaaatgcttacaacttcataatggacctcccccagcagtttgacactcttgttggtgaggggggtggtcaaatgagcggaggtcagaaacaaagggtggcaattgcccgcgctttgatccggaacccaaaaatcctcctacttgacatggccacctccgcgctagacaacgaaagcgaggcgatggtccaggaggtgcttagtaagatccaacacgggcatactataattagcgtggcccataggctgagcactgttagagccgccgataccatcattggatttgaacacggaaccgctgtggagcgtggtacgcacgaagaactgctggagcgtaagggcgtgtatttcaccctggtcacactccaaagccagggcaaccaggctctgaatgaggaagatatcaaggatgctaccgaagacgacatgctggcacgaaccttcagccggggatcctaccaggacagcctcagagccagtattaggcagcgatcaaaatcgcagctctcctatttggtgcatgagcctcccctggcagttgttgaccataagagcacttatgaagaagaccggaaagataaagacatacccgtgcaggaagaggtggagcccgcccccgttcgtcgtatcctgaaattttccgcacccgaatggccctacatgctggtggggtcggttggggcagccgtgaatggcaccgtgacgcccttatacgcttttctgttttctcagatcctgggcacctttagcatacctgataaagaagaacagcgtagtcagataaatggcgtgtgcctgctctttgtggcgatggggtgcgtcagtcttttcacccagttccttcagggctatgcgttcgcgaagagcggagagcttctgactaaacggctcagaaaatttggctttcgcgctatgctgggacaagacatcgcgtggtttgatgacctgagaaattcccctggcgctctgacaaccaggctggcaacagacgcaagccaggtccagggcgcagcaggttcccagatcggcatgattgtcaacagcttcactaacgtgacagtcgccatgataatagccttcagtttctcgtggaagctgtcgttagttatcctctgtttcttccccttcctcgctctgtccggcgccacccagactcgaatgctcactggctttgccagccgggacaaacaggctctggaaatggttggccaaatcactaacgaagccctctctaatattagaacggtcgcaggcatcggcaaagagcggcgcttcattgaggcgcttgagacagaacttgaaaaaccgttcaagaccgccattcagaaggctaatatctatggcttttgtttcgccttcgcccagtgtattatgtttattgccaactcagcctcttatcggtatgggggatatctcatcagcaatgaggggctgcattttagttacgttttcagagtcatcagtgctgttgttctgtccgccactgccctgggacgcgcgttctcgtacactccctcttacgccaaagctaaaatcagtgccgcccgcttctttcaacttctcgaccgccagcccccaatttcggtctacaacactgcgggcgagaagtgggataacttccaggggaagatcgatttcgtggactgtaagttcacatacccttctcgacccgattcccaagtcctgaatggactgagtgtatccatctctccgggccagacactcgccttcgttggctcctcagggtgtggcaagtctactagtatacagctgctcgagcggttctacgaccctgatcagggcaaagtgatgatagacggtcacgactccaagaaggtgaatgttcagtttctccgatccaatatcgggatagtatcccaggagccagtgctgttcgcatgttcaattatggacaacatcaagtatggggacaacacaaaagaaatacccatggagagagtgatagccgccgcaaagcaagctcagctgcatgacttcgtgatgagcctcccggagaagtacgagaccaatgtagggtcccaggggtctcaactttctcggggcgagaaacagcgaatcgcaatcgccagggcaatcgttcgtgacccaaagatcctgcttcttgacgaggctacaagcgccctggacactgaaagcgaaaaaaccgttcaggtggccctggacaaagccagagagggccgtacatgcattgtaatcgcccacaggctctccacaatacagaacgccgacatcatcgccgttatggcccagggggtggtgatcgaaaaggggacccatgaagagttgatggcccagaaaggagcttactacaagcttgtgaccaccggtagtcctatctcctag

SEQ ID NO: 140525 - DNA, 3966 bp, Artificial Sequence
  derived and/or modified sequence
atgtctgacagcgtgatcctgcggagcatcaaaaagtttggcgaggagaatgacgggtttgagtcagataaaagctataacaatgataaaaagagtcgattgcaggatgagaagaagggggacggagtccgtgtgggcttcttccaattgttccgtttttcaagttctacagacatttggctcatgtttgtgggctctctgtgtgccttcttgcacggcatcgcacaaccgggagtcctcctcatcttcggaaccatgacagacgtttttatagattatgatgtggagctccaggagttgcagattccgggaaaagcgtgcgtcaacaacacaatagtttggactaattccagtttaaaccagaatatgactaacggaactcgatgcggtctcctgaatattgagagcgagatgattaagttcgccagttattatgctggtattgcagttgccgttctcatcactggctatattcagatctgcttttgggttatcgccgctgccaggcaaatccagaaaatgaggaaattttatttcagacggatcatgagaatggaaatcggctggtttgattgcaactccgtgggtgagttgaatacacgattctccgacgatataaacaaaataaacgatgccatcgctgaccagatggccttattcattcaacgaatgacaagcaccatctgcggatttctgcttgggttttttcgtggatggaaactcactctcgttatcatttcagttagtccactgatcggtataggcgcagctacaatcgggctctccgtcagcaagttcacagattacgagcttaaagcctacgctaaagcgggagtggttgcggacgaggtgatcagtagtatgagaactgttgccgcatttggtggcgaaaagcgcgaggtggagagatacgagaaaaatctcgtgtttgctcaacggtgggggatccggaagggaatagttatgggcttctttaccgggtttgtttggtgcctgatctttctgtgctacgctctcgctttctggtatgggtctactctggtgctggacgagggcgaatatacccccggaaccctggtacaaatctttcttagtgtaattgttggtgccctgaacctcggtaacgcctctccttgtctggaggccttcgctaccggaagagcagccgctacgtctatctttgaaaccatagacagaaagcccatcatagattgcatgagcgaggacgggtacaagctggataggattaaaggtgagattgaattccataacgtaactttccactaccctagcaggccagaggtgaagatcttaaatgacctgaacatggtgatcaagcccggagagatgacagccctagttggtcctagcggcgcaggcaagagtacagccctgcaattgatccaacggttttacgatccctgtgagggtatggtgaccgtggacggtcacgacattcggtcactcaacatccagtggcttcgcgatcaaattgggatcgtggaacaggagcccgtgctgttcagcacaacgatcgctgaaaatatccgatacggcagagaggatgccaccatggaagatatcgtgcaggccgcaaaggaggccaacgcttataacttcatcatggatctgcctcaacagtttgacacgttagtcggtgagggcggaggccaaatgtctggaggccaaaaacagcgtgtggccattgccagggccctcattagaaatccaaaaatcttactactcgacatggctacatctgccctcgacaatgagtcagaggcaatggtgcaagaagtgttgtctaaaattcagcatggccataccattatttcagtagctcacagattgtccacagtgcgtgcagcggatactataattggcttcgagcatgggactgccgtggagcgcggaacccacgaggagctgctggagcgaaaaggagtttactttacactggtgactctgcaaagtcagggaaaccaagccctgaatgaggaagacatcaaagacgcaactgaggacgatatgctggccagaacattttcgaggggttcttaccaagactctctgcgggctagtataagacagagatcaaaaagccagttgtcctatttagtgcacgaaccgccactcgccgtcgtggaccacaagtctacttatgaagaggataggaaggataaggatattcctgtgcaggaagaggttgaacctgcgcctgtaagacgaattctgaaattcagcgccccagaatggccatacatgcttgtggggtccgtaggcgcagctgtgaacggcactgtcacacctctgtacgcatttttgtttagtcagatcctcggaaccttttcaatcccagacaaggaggagcagaggtcccagattaatggcgtgtgcttgcttttcgtcgccatgggctgtgtcagcctttttacgcagttcttacaaggatacgcgttcgccaaatccggcgaactgctgaccaagcgattgcgtaagttcggttttagggcaatgttgggccaggacatcgcttggtttgatgacctgcggaattctcctggagcacttaccactcggttggcaaccgatgcctcccaggtgcaaggcgctgccggtagtcagatcggcatgatcgtcaacagcttcacaaatgtcaccgttgcaatgattattgcctttagcttttcctggaaattgagtctcgtaatcctgtgtttttttccttttctggccctctcaggcgcaacccaaacccggatgttaacaggatttgctagcagagacaaacaggcactcgagatggtggggcagataacgaacgaagcgttatcaaatatccggaccgtcgccggtatcggcaaagagcggcgattcatagaagcacttgaaaccgaattggaaaaaccttttaagacagctattcaaaaagctaatatttacgggttctgctttgccttcgcccagtgcataatgttcatcgccaacagcgctagttaccgctacggaggctacttgatcagcaatgaaggtcttcacttctcatacgtgtttagagtcatctccgccgttgtgctatccgcaacggcgctgggacgcgctttcagctacaccccatcgtatgctaaggctaaaatctctgctgcacggttttttcagctgctcgacagacagcccccaatttccgtgtacaataccgcaggagagaaatgggacaacttccagggtaagatcgattttgtggactgtaagtttacgtacccttcccgacctgacagtcaggtacttaacggtctgtcagtgagtatttcacccggacagacattagcctttgtgggtagctccggatgcgggaagtccacatccatccaactccttgagcggttttacgatccggaccagggaaaggtgatgatcgatgggcacgacagcaaaaaggtgaatgtgcagtttctgcgaagcaacatcggcatcgtgtcgcaggaacctgtgcttttcgcgtgcagcatcatggacaacataaaatacggagataatacaaaggagatccccatggagagagttatagccgctgctaagcaggctcagttgcacgacttcgtgatgtcactgcccgagaagtacgagaccaacgtcgggtctcaagggagccagctttcccgtggtgagaagcagagaatcgcaatcgccagggccatcgttagagatcccaagatattgcttctcgatgaagccacttctgccctcgataccgaatcggagaagacagtgcaggtagcattggataaggccagagaagggcgtacgtgtatcgtcatcgcccacaggctctcaacaatccagaatgctgatattatagctgttatggcacagggagtcgtgatagaaaaggggactcacgaagagctcatggctcaaaagggtgcctactataagctggtgacaactggctcaccaatctcttag

SEQ ID NO: 140526 - protein, 211 aa, Artificial Sequence
  derived and/or modified sequence
MVAHNQVAADNAVSTAAEPRRRPEPSSSSSSSPAAPARPRPCPAVPAPAPGDTHFRTFRSHADYRRITRASALLDACGFYWGPLSVHGAHERLRAEPVGTFLVRDSRQRNCFFALSVKMASGPTSIRVHFQAGRFHLDGSRESFDCLFELLEHYVAAPRRMLGAPLRQRRVRPLQELCRQRIVATVGRENLARIPLNPVLRDYLSSFPFQI

SEQ ID NO: 140527 - DNA, 636 bp, Artificial Sequence
  derived and/or modified sequence
atggtggcccacaaccaggtggccgccgacaacgccgtgagcaccgccgccgagcccagaagaagacccgagcccagcagcagcagcagcagcagccccgccgcccccgccagacccagaccctgccccgccgtgcccgcccccgcccccggcgacacccacttcagaaccttcagaagccacgccgactacagaagaatcaccagagccagcgccctgctggacgcctgcggcttctactggggccccctgagcgtgcacggcgcccacgagagactgagagccgagcccgtgggcaccttcctggtgagagacagcagacagagaaactgcttcttcgccctgagcgtgaagatggccagcggccccaccagcatcagagtgcacttccaggccggcagattccacctggacggcagcagagagagcttcgactgcctgttcgagctgctggagcactacgtggccgcccccagaagaatgctgggcgcccccctgagacagagaagagtgagacccctgcaggagctgtgcagacagagaatcgtggccaccgtgggcagagagaacctggccagaatccccctgaaccccgtgctgagagactacctgagcagcttccccttccagatctag

SEQ ID NO: 140528 - DNA, 636 bp, Artificial Sequence
  derived and/or modified sequence
atggtcgcgcataaccaagtggccgctgacaacgcagtgtcaaccgcggccgagcccagacgtcggcccgaaccctcctcaagtagttccagtagcccagcggctcccgcccgcccccgtccctgcccggccgtgccggccccagcgcccggggatactcactttagaacattcaggagtcatgctgactacagacgcatcactagggccagcgctctgctggatgcatgtggattttactggggtccattgagtgtgcatggcgcccatgaacgccttagggccgagcccgttgggacctttctggtaagagacagtcgacaaaggaattgctttttcgccctcagcgtgaaaatggcctcaggtcctacttccattcgcgtacactttcaggctggcaggttccaccttgatggatcgagagagtcattcgattgtcttttcgagctgcttgagcactatgtggcagctccacggaggatgctgggcgctcctcttagacagcggagagtgcgacctttacaggagctgtgcaggcaaagaatcgtcgccacagtgggcagagagaatctggccagaatcccattgaatcccgtgctgagggattatctgagcagtttcccattccagatttag

SEQ ID NO: 140529 - DNA, 636 bp, Artificial Sequence
  derived and/or modified sequence
atggtggcccacaaccaggtggccgctgacaatgctgtgtccacagctgctgagcccaggagaagacctgagcccagcagcagcagcagcagcagccctgctgccccagcccggccccggccctgcccagctgtgcctgccccagcccctggggacacccacttccgcaccttccgcagccacgccgactaccgccgcatcacccgggccagcgccctgctggatgcctgtggcttctactggggccccctgtctgtgcatggagcccacgagcggctgcgggcagagcctgtgggcaccttcctggtgcgggacagccggcagaggaactgcttctttgccctgtctgtgaagatggccagcggccccaccagcatccgggtgcacttccaggccggccgcttccacctggatggcagccgggagagctttgactgcctgtttgagctgctggagcactacgtggccgcccccaggaggatgctgggcgcccccctgcggcagaggagagtgcggcccctgcaggagctgtgccggcagagaattgtggccaccgtgggccgggagaacctggcccgcatccccctgaaccctgtgctgcgggactacctgagcagcttccccttccagatctag

SEQ ID NO: 140530 - DNA, 636 bp, Artificial Sequence
  derived and/or modified sequence
atggtggcccacaaccaggtggccgccgacaacgccgtgagcaccgcagcagagccacgccggaggccggagccgagttcttccagttcctcatctccggccgccccagcccgccctcgcccttgtcccgctgttccagcacccgctccaggagatacccactttcgcactttccggagccatgcagattatagaagaattacccgtgcctcagctcttctcgatgcctgcggcttttactgggggccccttagcgttcacggagcacatgaacgtctgcgcgcagaaccggtgggtactttcctggtgcgggacagtaggcagaggaattgctttttcgcattgagcgtcaagatggcatcagggcccacaagcatacgtgtgcacttccaggcgggaaggttccaccttgacgggtccagggagtccttcgactgcttatttgagctacttgagcactacgtcgctgccccgcgccgcatgttgggtgctcccctccgacaacgtagagttcgaccactgcaggaactctgccgtcagcggatagttgctaccgtcggccgggagaatctagcgcggatccccctgaatcctgtcctcagagactacctctcttccttcccttttcagatctag

SEQ ID NO: 140531 - DNA, 636 bp, Artificial Sequence
  derived and/or modified sequence
atggtagctcataaccaggtggcggctgataacgccgtgagtaccgcagccgaacccaggaggagaccagagccttcctccagctcaagcagttctcctgccgctcctgcccgaccgcgtccatgccccgcagtgcccgctcccgctcccggagatactcattttagaacttttagaagtcatgcagattaccggagaattacaagagcttctgccttgcttgacgcttgcgggttctattgggggcctctaagcgtgcatggtgcacatgagaggcttcgtgccgaacccgttggtacattcttagtcagggactcccggcaaaggaattgcttctttgccctgtcggtgaagatggctagcgggcctacctccattagggtccatttccaagccggaaggttccacctggacgggagcagagagtccttcgattgcctcttcgaattattggaacactacgttgccgctcccagacgtatgctcggcgcaccactccggcaacgacgtgttcggcctcttcaggagctctgtagacagcgtatagtggccactgtcggacgagaaaacctggcaagaattccactgaaccccgtgctacgtgattacttgtccagttttccctttcagatttag

SEQ ID NO: 140532 - DNA, 1225 bp, Artificial Sequence
  derived and/or modified sequence
agctgcacggctcctggccccggagcatgcgcgagagccgccccggagcgccccggagccccccgccgtcccgcccgcggcgtcccgcgccccgccgccagcgcacccccggacgctatggcccacccctccggctggccccttctgtaggatggtagcacacaaccaggtggcagccgacaatgcagtctccacagcagcagagccccgacggcggccagaaccttcctcctcttcctcctcctcgcccgcggcccccgcgcgcccgcggccgtgccccgcggtcccggccccggcccccggcgacacgcacttccgcacattccgttcgcacgccgattaccggcgcatcacgcgcgccagcgcgctcctggacgcctgcggattctactgggggcccctgagcgtgcacggggcgcacgagcggctgcgcgccgagcccgtgggcaccttcctggtgcgcgacagccgccagcggaactgctttttcgcccttagcgtgaagatggcctcgggacccacgagcatccgcgtgcactttcaggccggccgctttcacctggatggcagccgcgagagcttcgactgcctcttcgagctgctggagcactacgtggcggcgccgcgccgcatgctgggggccccgctgcgccagcgccgcgtgcggccgctgcaggagctgtgccgccagcgcatcgtggccaccgtgggccgcgagaacctggctcgcatccccctcaaccccgtcctccgcgactacctgagctccttccccttccagatttgaccggcagcgcccgccgtgcacgcagcattaactgggatgccgtgttattttgttattacttgcctggaaccatgtgggtaccctccccggcctgggttggagggagcggatgggtgtaggggcgaggcgcctcccgccctcggctggagacgaggccgcagaccccttctcacctcttgagggggtcctccccctcctggtgctccctctgggtccccctggttgttgtagcagcttaactgtatctggagccaggacctgaactcgcacctcctacctcttcatgtttacatatacccagtatctttgcacaaaccaggggttgggggagggtctctggctttatttttctgctgtgcagaatcctattttatattttttaaagtcagtttaggtaataaactttattatgaaagttttttttttaaaaaaaaataa

SEQ ID NO: 140533 - DNA, 636 bp, Artificial Sequence
  derived and/or modified sequence
atggtagcacacaaccaggtggcagccgacaatgcagtctccacagcagcagagccccgacggcggccagaaccttcctcctcttcctcctcctcgcccgcggcccccgcgcgcccgcggccgtgccccgcggtcccggccccggcccccggcgacacgcacttccgcacattccgttcgcacgccgattaccggcgcatcacgcgcgccagcgcgctcctggacgcctgcggattctactgggggcccctgagcgtgcacggggcgcacgagcggctgcgcgccgagcccgtgggcaccttcctggtgcgcgacagccgccagcggaactgctttttcgcccttagcgtgaagatggcctcgggacccacgagcatccgcgtgcactttcaggccggccgctttcacctggatggcagccgcgagagcttcgactgcctcttcgagctgctggagcactacgtggcggcgccgcgccgcatgctgggggccccgctgcgccagcgccgcgtgcggccgctgcaggagctgtgccgccagcgcatcgtggccaccgtgggccgcgagaacctggctcgcatccccctcaaccccgtcctccgcgactacctgagctccttccccttccagatttga

SEQ ID NO: 140534 - DNA, 633 bp, Artificial Sequence
  derived and/or modified sequence
atggtcgcccacaatcaagtcgccgccgataacgccgtgtcaaccgctgcagaacctcgccgccgcccggagccgtcctcatcgagctcaagctcgcccgctgcgcctgcccggccacgcccgtgcccagctgtgccggcgccagcccctggggacacccacttcagaactttccgctctcatgctgactacagaaggatcactcgtgcatccgccctgctggacgcgtgcggcttctactggggtccgttgagcgtgcatggagcgcacgagcggcttcgcgccgaaccggtggggacgttccttgttcgggattccaggcagcgaaactgtttctttgcgttgtcagtcaagatggcctcgggacctacttcgatcagagtgcacttccaagcgggccggttccacctggacggatcgcgcgagtcctttgactgcctcttcgaactgctggaacattacgtggccgcacccagacggatgctgggagctccactccgccagcggcgcgtcagaccgctgcaagaactctgcagacagcggattgtggcaaccgtgggaagggagaacctggcacgcatccccctcaatccggtgctgcgggattacctctccagctttccattccagatc

SEQ ID NO: 140535 - DNA, 633 bp, Artificial Sequence
  derived and/or modified sequence
atggtcgcccacaatcaagtcgccgctgataacgctgtttccactgccgccgaaccacgccgccgtcctgaaccgtcatcgtcatcgagctcgagccccgcggcgcctgcccgccctagaccgtgccctgctgtgccagccccagcacccggtgacacccactttcgcacgttcagaagccatgccgattacaggcggatcactagagcatccgcgctcctggacgcctgcgggttctactggggaccactgtccgtgcatggagcacacgagcggcttcgcgctgagcccgtgggcaccttccttgtgcgcgacagcagacagcggaattgtttctttgcgctgtcagtgaagatggcttctggaccgacctcaatccgggtgcacttccaagccggacgcttccatttggacggctcccgcgaatcctttgattgcttgttcgagctgctggagcactacgtggcagccccgcgccggatgctgggagcaccgctgcgccagcggcgggtccggccgctccaagaactgtgcagacagaggattgtcgcgactgtggggcgagaaaacctcgcgaggatcccgctcaacccggtgctcagagactacctgtcgtcgttcccattccagatc

SEQ ID NO: 140536 - DNA, 822 bp, Artificial Sequence
  derived and/or modified sequence
taatacgactcactatagggaaataagagagaaaagaagagtaagaagaaatataagagccaccatggtcgcccacaatcaagtcgccgccgataacgccgtgtcaaccgctgcagaacctcgccgccgcccggagccgtcctcatcgagctcaagctcgcccgctgcgcctgcccggccacgcccgtgcccagctgtgccggcgccagcccctggggacacccacttcagaactttccgctctcatgctgactacagaaggatcactcgtgcatccgccctgctggacgcgtgcggcttctactggggtccgttgagcgtgcatggagcgcacgagcggcttcgcgccgaaccggtggggacgttccttgttcgggattccaggcagcgaaactgtttctttgcgttgtcagtcaagatggcctcgggacctacttcgatcagagtgcacttccaagcgggccggttccacctggacggatcgcgcgagtcctttgactgcctcttcgaactgctggaacattacgtggccgcacccagacggatgctgggagctccactccgccagcggcgcgtcagaccgctgcaagaactctgcagacagcggattgtggcaaccgtgggaagggagaacctggcacgcatccccctcaatccggtgctgcgggattacctctccagctttccattccagatctgataataggctggagcctcggtggccatgcttcttgccccttgggcctccccccagcccctcctccccttcctgcacccgtacccccgtggtctttgaataaagtctgagtgggcggctctaga

SEQ ID NO: 140537 - DNA, 844 bp, Artificial Sequence
  derived and/or modified sequence
taatacgactcactatagggaaataagagagaaaagaagagtaagaagaaatataagagccaccatggtcgcccacaatcaagtcgccgctgataacgctgtttccactgccgccgaaccacgccgccgtcctgaaccgtcatcgtcatcgagctcgagccccgcggcgcctgcccgccctagaccgtgccctgctgtgccagccccagcacccggtgacacccactttcgcacgttcagaagccatgccgattacaggcggatcactagagcatccgcgctcctggacgcctgcgggttctactggggaccactgtccgtgcatggagcacacgagcggcttcgcgctgagcccgtgggcaccttccttgtgcgcgacagcagacagcggaattgtttctttgcgctgtcagtgaagatggcttctggaccgacctcaatccgggtgcacttccaagccggacgcttccatttggacggctcccgcgaatcctttgattgcttgttcgagctgctggagcactacgtggcagccccgcgccggatgctgggagcaccgctgcgccagcggcgggtccggccgctccaagaactgtgcagacagaggattgtcgcgactgtggggcgagaaaacctcgcgaggatcccgctcaacccggtgctcagagactacctgtcgtcgttcccattccagatctgataataggctggagcctcggtggccatgcttcttgccccttgggcctccccccagcccctcctccccttcctgcacccgtaccccccaaacaccattgtcacactccagtggtctttgaataaagtctgagtgggcggctctaga

SEQ ID NO: 140538 - protein, 1327 aa, Artificial Sequence
  derived and/or modified sequence
MAASRRSQHHHHHHQQQLQPAPGASAPPPPPPPPLSPGLAPGTTPASPTASGLAPFASPRHGLALPEGDGSRDPPDRPRSPDPVDGTSCCSTTSTICTVAAAPVVPAVSTSSAAGVAPNPAGSGSNNSPSSSSSPTSSSSSSPSSPGSSLAESPEAAGVSSTAPLGPGAAGPGTGVPAVSGALRELLEACRNGDVSRVKRLVDAANVNAKDMAGRKSSPLHFAAGFGRKDVVEHLLQMGANVHARDDGGLIPLHNACSFGHAEVVSLLLCQGADPNARDNWNYTPLHEAAIKGKIDVCIVLLQHGADPNIRNTDGKSALDLADPSAKAVLTGEYKKDELLEAARSGNEEKLMALLTPLNVNCHASDGRKSTPLHLAAGYNRVRIVQLLLQHGADVHAKDKGGLVPLHNACSYGHYEVTELLLKHGACVNAMDLWQFTPLHEAASKNRVEVCSLLLSHGADPTLVNCHGKSAVDMAPTPELRERLTYEFKGHSLLQAAREADLAKVKKTLALEIINFKQPQSHETALHCAVASLHPKRKQVTELLLRKGANVNEKNKDFMTPLHVAAERAHNDVMEVLHKHGAKMNALDTLGQTALHRAALAGHLQTCRLLLSYGSDPSIISLQGFTAAQMGNEAVQQILSESTPIRTSDVDYRLLEASKAGDLETVKQLCSSQNVNCRDLEGRHSTPLHFAAGYNRVSVVEYLLHHGADVHAKDKGGLVPLHNACSYGHYEVAELLVRHGASVNVADLWKFTPLHEAAAKGKYEICKLLLKHGADPTKKNRDGNTPLDLVKEGDTDIQDLLRGDAALLDAAKKGCLARVQKLCTPENINCRDTQGRNSTPLHLAAGYNNLEVAEYLLEHGADVNAQDKGGLIPLHNAASYGHVDIAALLIKYNTCVNATDKWAFTPLHEAAQKGRTQLCALLLAHGADPTMKNQEGQTPLDLATADDIRALLIDAMPPEALPTCFKPQATVVSASLISPASTPSCLSAASSIDNLTGPLAELAVGGASNAGDGAAGTERKEGEVAGLDMNISQFLKSLGLEHLRDIFETEQITLDVLADMGHEELKEIGINAYGHRHKLIKGVERLLGGQQGTNPYLTFHCVNQGTILLDLAPEDKEYQSVEEEMQSTIREHRDGGNAGGIFNRYNVIRIQKVVNKKLRERFCHRQKEVSEENHNHHNERMLFHGSPFINAIIHKGFDERHAYIGGMFGAGIYFAENSSKSNQYVYGIGGGTGCPTHKDRSCYICHRQMLFCRVTLGKSFLQFSTMKMAHAPPGHHSVIGRPSVNGLAYAEYVIYRGEQAYPEYLITYQIMKPEAPSQTATAAEQKT

SEQ ID NO: 140539 - DNA, 3984 bp, Artificial Sequence
  derived and/or modified sequence
atggccgccagcagaagaagccagcaccaccaccaccaccaccagcagcagctgcagcccgcccccggcgccagcgccccccccccccccccccccccccccctgagccccggcctggcccccggcaccacccccgccagccccaccgccagcggcctggcccccttcgccagccccagacacggcctggccctgcccgagggcgacggcagcagagacccccccgacagacccagaagccccgaccccgtggacggcaccagctgctgcagcaccaccagcaccatctgcaccgtggccgccgcccccgtggtgcccgccgtgagcaccagcagcgccgccggcgtggcccccaaccccgccggcagcggcagcaacaacagccccagcagcagcagcagccccaccagcagcagcagcagcagccccagcagccccggcagcagcctggccgagagccccgaggccgccggcgtgagcagcaccgcccccctgggccccggcgccgccggccccggcaccggcgtgcccgccgtgagcggcgccctgagagagctgctggaggcctgcagaaacggcgacgtgagcagagtgaagagactggtggacgccgccaacgtgaacgccaaggacatggccggcagaaagagcagccccctgcacttcgccgccggcttcggcagaaaggacgtggtggagcacctgctgcagatgggcgccaacgtgcacgccagagacgacggcggcctgatccccctgcacaacgcctgcagcttcggccacgccgaggtggtgagcctgctgctgtgccagggcgccgaccccaacgccagagacaactggaactacacccccctgcacgaggccgccatcaagggcaagatcgacgtgtgcatcgtgctgctgcagcacggcgccgaccccaacatcagaaacaccgacggcaagagcgccctggacctggccgaccccagcgccaaggccgtgctgaccggcgagtacaagaaggacgagctgctggaggccgccagaagcggcaacgaggagaagctgatggccctgctgacccccctgaacgtgaactgccacgccagcgacggcagaaagagcacccccctgcacctggccgccggctacaacagagtgagaatcgtgcagctgctgctgcagcacggcgccgacgtgcacgccaaggacaagggcggcctggtgcccctgcacaacgcctgcagctacggccactacgaggtgaccgagctgctgctgaagcacggcgcctgcgtgaacgccatggacctgtggcagttcacccccctgcacgaggccgccagcaagaacagagtggaggtgtgcagcctgctgctgagccacggcgccgaccccaccctggtgaactgccacggcaagagcgccgtggacatggcccccacccccgagctgagagagagactgacctacgagttcaagggccacagcctgctgcaggccgccagagaggccgacctggccaaggtgaagaagaccctggccctggagatcatcaacttcaagcagccccagagccacgagaccgccctgcactgcgccgtggccagcctgcaccccaagagaaagcaggtgaccgagctgctgctgagaaagggcgccaacgtgaacgagaagaacaaggacttcatgacccccctgcacgtggccgccgagagagcccacaacgacgtgatggaggtgctgcacaagcacggcgccaagatgaacgccctggacaccctgggccagaccgccctgcacagagccgccctggccggccacctgcagacctgcagactgctgctgagctacggcagcgaccccagcatcatcagcctgcagggcttcaccgccgcccagatgggcaacgaggccgtgcagcagatcctgagcgagagcacccccatcagaaccagcgacgtggactacagactgctggaggccagcaaggccggcgacctggagaccgtgaagcagctgtgcagcagccagaacgtgaactgcagagacctggagggcagacacagcacccccctgcacttcgccgccggctacaacagagtgagcgtggtggagtacctgctgcaccacggcgccgacgtgcacgccaaggacaagggcggcctggtgcccctgcacaacgcctgcagctacggccactacgaggtggccgagctgctggtgagacacggcgccagcgtgaacgtggccgacctgtggaagttcacccccctgcacgaggccgccgccaagggcaagtacgagatctgcaagctgctgctgaagcacggcgccgaccccaccaagaagaacagagacggcaacacccccctggacctggtgaaggagggcgacaccgacatccaggacctgctgagaggcgacgccgccctgctggacgccgccaagaagggctgcctggccagagtgcagaagctgtgcacccccgagaacatcaactgcagagacacccagggcagaaacagcacccccctgcacctggccgccggctacaacaacctggaggtggccgagtacctgctggagcacggcgccgacgtgaacgcccaggacaagggcggcctgatccccctgcacaacgccgccagctacggccacgtggacatcgccgccctgctgatcaagtacaacacctgcgtgaacgccaccgacaagtgggccttcacccccctgcacgaggccgcccagaagggcagaacccagctgtgcgccctgctgctggcccacggcgccgaccccaccatgaagaaccaggagggccagacccccctggacctggccaccgccgacgacatcagagccctgctgatcgacgccatgccccccgaggccctgcccacctgcttcaagccccaggccaccgtggtgagcgccagcctgatcagccccgccagcacccccagctgcctgagcgccgccagcagcatcgacaacctgaccggccccctggccgagctggccgtgggcggcgccagcaacgccggcgacggcgccgccggcaccgagagaaaggagggcgaggtggccggcctggacatgaacatcagccagttcctgaagagcctgggcctggagcacctgagagacatcttcgagaccgagcagatcaccctggacgtgctggccgacatgggccacgaggagctgaaggagatcggcatcaacgcctacggccacagacacaagctgatcaagggcgtggagagactgctgggcggccagcagggcaccaacccctacctgaccttccactgcgtgaaccagggcaccatcctgctggacctggcccccgaggacaaggagtaccagagcgtggaggaggagatgcagagcaccatcagagagcacagagacggcggcaacgccggcggcatcttcaacagatacaacgtgatcagaatccagaaggtggtgaacaagaagctgagagagagattctgccacagacagaaggaggtgagcgaggagaaccacaaccaccacaacgagagaatgctgttccacggcagccccttcatcaacgccatcatccacaagggcttcgacgagagacacgcctacatcggcggcatgttcggcgccggcatctacttcgccgagaacagcagcaagagcaaccagtacgtgtacggcatcggcggcggcaccggctgccccacccacaaggacagaagctgctacatctgccacagacagatgctgttctgcagagtgaccctgggcaagagcttcctgcagttcagcaccatgaagatggcccacgccccccccggccaccacagcgtgatcggcagacccagcgtgaacggcctggcctacgccgagtacgtgatctacagaggcgagcaggcctaccccgagtacctgatcacctaccagatcatgaagcccgaggcccccagccagaccgccaccgccgccgagcagaagacctag

SEQ ID NO: 140540 - DNA, 3984 bp, Artificial Sequence
  derived and/or modified sequence
atggcggcctctagacggtcccagcatcaccatcaccaccatcagcagcagctccaacctgcccccggcgcttccgccccgccgccccctccaccaccgcccctctctcctggcctcgcccctggcaccacccccgcaagtccaacagcaagcggccttgcacccttcgcaagcccgcgccacggcctggctctaccagaaggcgatggaagccgcgacccacctgataggcccaggtcaccagatccggtggatggtacatcttgttgttctactacttcaacaatttgcacagtggccgccgctccagtggtacctgctgtctctacatcttcggcggccggggtggcgcctaaccccgccgggtccgggtccaataactcccctagcagctcatcatcaccgacatcttcatcttcaagtagccccagttccccgggctctagtctggccgagtctcccgaggccgcgggtgttagctctacggcccctctgggcccgggcgccgcagggcccggcacgggggttcccgcagtctcaggagccctacgggagcttttggaggcttgtaggaatggcgatgtgtcccgggtcaagcggctggttgatgccgccaatgtcaatgcgaaggatatggctgggcgcaaaagttcccccttgcacttcgcggctggttttggaagaaaggacgtggtggaacatctcctacagatgggggccaatgtgcacgccagggacgacggggggctcataccccttcacaatgcgtgcagctttgggcacgctgaggtcgtttccctgcttctgtgccaaggtgctgacccgaatgcccgagacaactggaattatacacccctccacgaagcggccattaaagggaaaatcgacgtgtgcatcgttttgctgcagcatggtgcggacccaaatattcggaatactgatggaaaatccgcactggatcttgcggatccatctgccaaggctgtgctgaccggcgagtataaaaaagatgaacttcttgaggccgcgaggagcgggaatgaggaaaagctgatggcactgcttacccctctcaatgtcaattgccacgcatccgacggccggaagagtacgcctcttcacctagccgctgggtataatcgggtccgtatcgtgcagctgcttctgcagcatggtgcggacgtgcacgccaaggacaaagggggcctcgtaccactgcataacgcttgtagctatggccattatgaggtgaccgagctcctgctgaaacatggtgcctgtgtcaatgcgatggacctctggcagtttaccccccttcacgaggctgcatctaagaatagggtggaggtttgttctcttcttctgagtcacggagcagacccaactctggtgaactgtcacggtaaatctgcagtcgatatggcccccacccctgaactgcgggaaagactaacttatgagtttaagggtcactcccttctccaagcagctcgggaggcggatctcgcgaaagtgaaaaagacactcgcgctagagattatcaatttcaaacaacctcaatcacatgaaacagctctgcattgcgcggtcgccagcctacatccaaaacgcaagcaggtgaccgaactcctgctgcgcaaaggagctaacgtcaatgaaaagaataaggacttcatgacacctcttcatgtggcggctgagagggcacataacgacgttatggaggtgttgcacaaacacggagccaagatgaacgctctagacaccctggggcagaccgctctgcaccgcgccgcactggcgggccaccttcagacatgccggctcctcctgagctacggctcagatccatcaatcatttcattgcaaggctttacagctgctcaaatggggaatgaggcagtacagcagatcctctccgaatcaacacccattagaacttctgacgtggattatagactcctcgaggcaagcaaagcgggtgacctggaaacagtgaaacaattgtgctctagtcagaatgtgaactgtagggatttggagggtcggcacagcacccctttacacttcgccgctggctacaatcgcgtgtctgtggtcgaatatctgctgcaccatggggccgacgtgcatgccaaggacaagggaggcctcgtccccttacacaatgcctgtagttacggccattacgaggttgcagagcttttagtgcgtcacggcgcctctgtcaacgttgcagatctgtggaaatttacccccttacatgaagctgccgcgaaggggaaatacgagatctgtaagctcttactcaagcacggagccgaccctactaaaaagaacagagacggtaataccccgctcgatctcgtcaaagagggtgatactgatatccaggacctgctgcgcggggacgcggcattgttggatgctgccaagaagggatgcctcgcacgcgtacagaaactatgcactcctgaaaatatcaactgcagagatacccagggccgcaattcaacgcccctccacttggccgcaggatacaacaaccttgaggtggcggaatacctccttgaacatggagccgacgtgaacgcacaagataaagggggactcatacctctacataacgcggcaagttatggtcatgtggatattgcggctctgctgataaaatataacacatgtgtgaatgccactgacaaatgggctttcaccccacttcacgaagccgcccagaagggaagaactcagctttgcgcgctgctgttggcccacggtgcagaccctacgatgaagaaccaggagggacaaaccccactcgacttggccacagccgatgacatccgagcacttctgatagacgccatgccgcctgaagcactgcctacctgcttcaaacctcaagcaaccgtggtgtcagcgtccctgatctcaccggctagtactccttcctgtctgagcgctgcttcctccatcgataatcttactggccctctggccgagctcgccgtcgggggagcgagcaacgcaggtgatggagccgcagggacagaaagaaaggaaggagaggtggccggtctcgatatgaacatctctcagtttctcaaatcattagggctggaacacctgcgtgatatatttgaaactgaacagattacactcgacgttctggctgacatgggtcatgaagagctgaaggaaatcgggataaatgcatatggacaccgccacaagctaatcaagggcgtcgaaagactgctcgggggccagcagggaacaaatccatacctgaccttccattgtgtgaaccaagggaccatacttctggatctggcccccgaggacaaggagtatcagtccgttgaggaggagatgcagtccacaattcgagagcatagggacggaggcaacgccgggggtatatttaatcgctacaacgtaatccgcatccaaaaggtagtgaacaagaagcttcgtgagcgtttttgtcatcggcagaaggaggttagtgaggaaaaccataaccaccataatgagcgcatgctattccacggaagtcccttcatcaacgccattatacacaaaggttttgatgagagacacgcttacattgggggcatgttcggggccggtatatattttgcagaaaactcatccaaaagtaaccagtacgtgtatggcatcgggggtggcacagggtgccctactcacaaggaccgcagctgttatatctgccatcggcagatgcttttttgtagggtgacactggggaaaagtttcctgcagtttagcaccatgaaaatggcccatgcccctcctggccaccacagtgtcatcggcaggcctagtgtgaatggtcttgcctatgctgagtatgtgatctacaggggagagcaggcctatcccgaatatctgatcacataccagatcatgaagccggaggcaccatcacaaactgcaacggcagccgagcagaaaacgtag

SEQ ID NO: 140541 - DNA, 3984 bp, Artificial Sequence
  derived and/or modified sequence
atggccgccagcagaagaagccagcaccaccaccaccaccaccagcagcagctgcagcctgcccctggggccagcgcccctcctcctcctcctcctccacccctgagccctggcctggcccctggcaccaccccagccagccccacagccagcggcctggccccctttgccagccccaggcatggcctggccctgcctgaaggagatggcagccgggaccccccagaccggcccaggagcccagaccctgtggatggcaccagctgctgcagcaccaccagcaccatctgcaccgtggccgccgcccctgtggtgcctgctgtgtccaccagcagcgctgctggggtggcccccaacccagctggcagcggcagcaacaacagccccagcagcagcagcagccccaccagcagcagcagcagcagccccagcagccctggcagcagcctggccgagagccctgaggccgccggcgtgagcagcacagcccccctgggccctggagctgctggccctggcaccggggtgcctgctgtgtctggggccctgcgggagctgctggaggcctgcagaaatggagatgtgtcccgggtgaagaggctggtggatgctgccaacgtgaatgccaaggacatggccggcaggaagagcagccccctgcactttgctgctggcttcggcaggaaggatgtggtggagcacctgctgcagatgggcgccaacgtgcacgccagagatgatggcggcctcatccccctgcacaatgcctgcagctttggacatgctgaggtggtgtccctgctgctgtgccagggcgctgaccccaatgcccgggacaactggaactacacccccctgcatgaagctgccatcaagggcaagattgatgtgtgcatcgtgctgctgcagcacggggctgaccccaacatccggaacacagatggcaagagcgccctggacctggccgaccccagcgccaaggctgtgctgactggagagtacaagaaggatgagctgctggaggccgcccggtctggaaatgaggagaagctgatggccctgctgacccccctgaatgtgaactgccacgccagtgatggcaggaagagcacccccctgcacctggccgccggctacaacagagtgcgcatcgtgcagctgctgctgcagcacggggctgatgtgcacgccaaggacaagggcggcctggtgcccctgcacaatgcctgcagctatggccactatgaggtgacagagctgctgctgaagcacggggcctgtgtgaatgccatggacctgtggcagttcacccccctgcacgaggccgccagcaagaacagagtggaggtgtgcagcctgctgctgagccatggagctgaccccaccctggtgaactgccacggcaagtctgctgtggacatggcccccaccccagagctgcgggagcggctgacctatgagttcaagggccacagcctgctgcaggccgcccgggaggccgacctggccaaggtgaagaagaccctggccctggagatcatcaacttcaagcagccccagagccatgaaacagccctgcactgtgctgtggccagcctgcaccccaagaggaagcaggtgacagagctgctgctgaggaaaggagccaacgtgaatgagaagaacaaggacttcatgacccccctgcacgtggccgctgagcgggcccacaatgatgtgatggaggtgctgcacaagcacggggccaagatgaatgccctggacaccctgggccagacagccctgcaccgggccgccctggccggccacctgcagacctgccgcctgctgctgtcctatggcagtgaccccagcatcatcagcctgcagggcttcaccgctgcccagatgggaaatgaggccgtgcagcagatcctgtctgagagcacccccatccgcaccagtgatgtggactaccgcctgctggaggccagcaaggccggggacctggagaccgtgaagcagctgtgcagcagccagaatgtgaactgccgggacctggagggccgccacagcacccccctgcactttgctgctggctacaacagagtgtctgtggtggagtacctgctgcaccacggggctgatgtgcacgccaaggacaagggcggcctggtgcccctgcacaatgcctgcagctatggccactatgaggtggccgagctgctggtgagacatggagcctctgtgaatgtggccgacctgtggaagttcacccccctgcatgaagctgctgccaagggcaagtatgagatctgcaagctgctgctgaagcacggggctgaccccaccaagaagaacagagatggcaacacccccctggacctggtgaaggagggggacacagacatccaggacctgctgcggggagatgctgccctgctggatgctgccaagaagggctgcctggcccgggtgcagaagctgtgcaccccagagaacatcaactgccgggacacccagggcaggaacagcacccccctgcacctggccgccggctacaacaacctggaggtggccgagtacctgctggagcacggggctgatgtgaatgcccaggacaagggcggcctcatccccctgcacaatgctgccagctatggccacgtggacattgctgccctgctgatcaagtacaacacctgtgtgaatgccacagacaagtgggccttcacccccctgcacgaggccgcccagaagggccgcacccagctgtgtgccctgctgctggcccatggagctgaccccaccatgaagaaccaggagggccagacccccctggacctggccacagcagatgacatccgggccctgctgattgatgccatgcctcctgaggccctgcccacctgcttcaagccccaggccaccgtggtgtctgccagcctcatcagccctgccagcacccccagctgcctgtctgctgccagcagcattgacaacctgaccggccccctggccgagctggccgtgggcggggccagcaatgctggagatggagctgctggaacagagaggaaggagggggaggtggccggcctggacatgaacatcagccagttcctgaagagcctgggcctggagcacctgcgggacatctttgaaacagagcagatcaccctggatgtgctggccgacatgggccacgaggagctgaaggagatcggcatcaatgcctacggccaccgccacaagctgatcaagggcgtggagcggctgctgggcggccagcagggcaccaacccctacctgaccttccactgtgtgaaccagggcaccatcctgctggacctggcccctgaggacaaggagtaccagagcgtggaggaggagatgcagagcaccatccgggagcacagagatggcggcaatgctgggggcatcttcaaccgctacaacgtcatccgcatccagaaggtggtgaacaagaagctgcgggagcgcttctgccaccggcagaaggaggtgtctgaggagaaccacaaccaccacaatgaaagaatgctgttccacggcagccccttcatcaatgccatcatccacaagggctttgatgaaagacatgcctacatcggcggcatgtttggagctggcatctactttgctgagaacagcagcaagagcaaccagtatgtgtatggcatcggcggcggcaccggctgccccacccacaaggacaggagctgctacatctgccaccggcagatgctgttctgccgggtgaccctgggcaagagcttcctgcagttcagcaccatgaagatggcccacgcccctcctggccaccacagcgtgattggccggcccagcgtgaatggcctggcctatgcagaatatgtgatctacagaggagagcaggcctacccagagtacctgatcacctaccagatcatgaagccagaggcccccagccagacagccacagctgctgagcagaagacctag

SEQ ID NO: 140542 - DNA, 3984 bp, Artificial Sequence
  derived and/or modified sequence
atggccgccagccggcggagccagcaccaccaccaccaccaccagcaacaactccaacccgccccgggagcatcggctccgccgccgcctcctcctccgcccctgagccctggcttagcacccggaacgacccctgctagtcccacagcaagcggccttgccccgtttgccagtccgcgacatggcttggctctacctgagggcgacggatctagggacccacctgacagaccaaggtcccctgaccctgtagatgggaccagttgctgtagcaccacctcgacaatatgcaccgtagccgccgccccggtggtgccagccgttagtacaagttccgcagcaggggtggctcccaaccctgccgggtccggaagcaataattctccctccagcagttctagccctacaagcagctcatcctccagtccgtcgtcgcccgggagttctctcgccgaatcgccagaagctgcgggcgtcagttccaccgccccgctggggccaggcgccgcaggaccagggacaggcgtgcccgcggtatccggggcactgagagagttgttggaagcttgtcgcaacggcgacgtgagccgggtgaagcggctggtagacgcagctaacgtgaacgcaaaagacatggcaggtcgtaaaagctctccccttcatttcgcagccggttttggacgaaaggatgtggtggaacaccttttacagatgggcgctaacgtacatgcacgggacgatgggggcctcatccccctccataacgcttgcagctttggccatgccgaggtagtgtcactccttctgtgtcagggagccgatcctaatgcaagagacaactggaattacaccccattgcacgaagctgcaattaaaggtaagatcgacgtttgcatagtgctgctgcagcacggcgccgatccaaacatacgtaatacagacggcaagtctgctttagatttagcagatcccagtgcaaaggccgtgttaaccggcgaatacaaaaaggacgaacttctggaggctgccaggagcggaaatgaggagaagctcatggcactgctgacccccctgaatgtcaattgccatgcctccgacggacgcaaatcaacaccactacatctggccgccggatacaacagggtcagaattgtgcaactactcctgcagcacggagctgatgtgcacgcaaaggacaaggggggccttgttccgcttcataatgcttgttcatacggtcactacgaggtgaccgagctgttgctaaagcacggagcctgcgtaaacgctatggatctgtggcaattcacacctctgcatgaagcggcgtctaagaatagagtcgaagtgtgctccttactgctgtcacatggggccgacccgactctcgttaactgtcacggaaaaagcgcagtcgacatggcaccaacgcccgaacttcgggaaaggctgacttacgagttcaaagggcactccctgttacaggccgctcgcgaagctgacctcgctaaagtaaaaaagacactggcacttgaaattatcaactttaaacagccacagagtcatgagaccgccctgcactgtgcagtcgcttccctccacccaaagcgcaagcaggtgacagaactcctgctccgaaaaggggcaaacgtgaacgaaaaaaataaagactttatgacgcctctgcacgtcgcagccgaaagggcccataacgatgtgatggaagtgctgcacaagcacggcgccaagatgaatgctttggacacccttggccagaccgctctgcatcgcgccgctctggccggacatttacagacttgcagattgttgctcagctacggttccgacccgtctatcatctcactccagggcttcaccgcagcccagatgggcaacgaggcggtacagcagattctgtccgagagcactccaatccgaacgtctgacgtggattacagactgctggaggccagcaaggccggagatcttgagacggttaagcagctatgtagctctcagaacgtgaattgccgcgatctggaagggcgtcactcaaccccactacacttcgcagcaggttataaccgcgtcagcgtggttgaatatcttctacaccacggtgcagacgtgcatgctaaggacaaggggggcctcgtgcctttgcataacgcgtgctcatatggtcactacgaggttgccgagctcctcgtgagacacggagcctctgtgaacgttgccgacctgtggaaatttacacctctgcatgaggcagccgccaaagggaaatatgagatatgcaagctgctcctcaaacacggcgcagatcccactaagaagaatcgggatggcaatacccctctggaccttgtgaaggagggagataccgacattcaggatctgctgcggggcgacgccgccttgctcgacgctgcaaaaaaagggtgtttggcccgtgtccagaagctgtgtacacccgagaacattaactgcagagatacacagggccgaaattccacacctttgcatctggcagccggctacaacaatctggaagtcgccgagtacttactggagcacggggccgacgtaaacgcccaggataagggcggacttataccactccataacgctgcttcttacggccacgtcgatattgccgcccttttgatcaagtataacacatgtgtgaatgctactgacaagtgggcattcacaccccttcacgaagctgcccagaagggtagaacccagctctgtgccttgcttctggcacacggagcagaccctacaatgaaaaaccaggaggggcagacaccactcgacttggccacagctgatgatataagagcactcctcatagacgcgatgccgcctgaagctctgcctacttgttttaagccgcaggctaccgtcgttagcgcctctctcatttcccccgcctcaactccctcctgcctgagtgcggcatcctctatcgacaaccttaccggaccactggcagagttagcggtgggtggggcctccaatgccggcgacggtgcagccgggactgaaagaaaggagggcgaagtcgccggcctggatatgaatattagccagtttctgaagtctctcggtttggaacatctgcgcgatatcttcgagaccgaacagattacactcgatgttctggctgacatgggtcatgaggaactgaaagagatcggcattaacgcctacggtcaccgccataaactaattaaaggcgttgaacggctcctgggaggtcagcaggggactaacccatatctgacttttcattgcgtgaaccaggggacaatcctgctcgacctcgccccagaggataaggagtatcagagtgttgaagaggaaatgcagtcgaccattagagaacaccgcgacgggggaaatgccggaggcatcttcaaccggtataacgtcattcgcattcagaaggtggtgaataagaaactgagagaacggttttgccaccgccaaaaggaggtgtccgaggagaaccataaccaccacaacgagcgcatgctgttccacggatcccctttcatcaacgcgattattcacaaggggttcgacgaacggcatgcatacataggtggtatgttcggtgcgggcatatattttgccgagaactccagcaagtctaatcagtatgtatatggaattggtggagggactgggtgcccgacccacaaggaccgctcctgttacatctgtcataggcagatgctcttctgccgggtcaccctgggcaagtcatttctgcagttcagcaccatgaagatggcacacgccccaccaggccatcactcggtgataggtcggccttcggttaatggcttggcctacgcagagtatgtgatatatcgaggcgaacaggcctatcctgaatatctgattacctatcagataatgaagcctgaggctcccagccagaccgccaccgccgcggaacagaagacttag

SEQ ID NO: 140543 - DNA, 3984 bp, Artificial Sequence
  derived and/or modified sequence
atggcggcttctaggcgctcccagcatcatcaccatcatcaccagcagcagctgcagccagcaccgggtgcttctgcgccaccaccgcctccccctccacctctttcacccggtttagcacctggtacgacacccgcttcgccgaccgcgagcggcctcgcccctttcgcatctcctagacatggactcgccctgccagagggagacgggtccagagaccctccagaccgccctaggagtccagaccctgtcgacgggaccagttgttgttcaaccacatctacaatctgcaccgtggccgcagctccagtggtcccggctgtgtccaccagttctgcagctggagtcgcgcctaaccccgcaggctccggatccaataattccccatcctcttcttcaagcccaacctccagttcctcctcttcaccaagttctcctggtagctcactcgctgagagtcccgaggctgccggtgtgtcaagtacggctccactgggccctggcgcagccggacccggaactggcgtacccgctgtaagtggagcactgagagagctgctcgaggcttgtcggaacggagatgtgtccagagtgaaacggctcgttgatgcggcaaatgtcaatgctaaagacatggccggacggaaaagtagtccactgcactttgcggctggctttggcagaaaggacgtggtggagcatctcctgcaaatgggagcgaacgtgcatgctcgagatgatgggggtctaatcccccttcacaacgcctgcagttttggccacgccgaggttgtgtccctgctgctttgtcagggggcagatcccaatgcgagggacaactggaactatactccactccatgaggccgcaatcaaagggaaaattgacgtttgcatcgtgctgttacagcatggtgccgaccctaatatccgaaatactgatggcaaaagtgctctggacctagccgatccatccgccaaagcagtactgacgggagaatataaaaaggatgaacttttagaggcagcacggtcagggaatgaggagaaattaatggccctgctcacacctttaaatgtcaattgccacgcctccgacggtagaaaatccactcctctgcacttggccgcaggatacaatcgcgttcgaatagtgcagctcttactgcagcacggcgcagacgtgcatgctaaagacaagggcggtctggtgcctctgcataacgcttgttcatatggccactatgaggttaccgagctgttgctgaagcacggtgcatgcgtgaacgctatggatctctggcagtttacacccctgcacgaggctgcctctaaaaaccgcgtcgaagtttgttccctattactctcccatggggcagaccccactctagtgaattgccatggcaaatctgcagtggatatggcacccacacccgaattgcgcgagaggctgacctatgaattcaaaggccatagcctgctccaggcagcaagggaagccgacctggccaaagttaagaagactctggcgcttgagatcattaatttcaaacagccgcagagtcatgaaactgcactgcactgtgccgtagcgagtctgcatccaaaacggaaacaggtcactgagctgttactcaggaagggagccaacgtcaatgagaaaaacaaggacttcatgacccccctgcacgtcgctgctgagcgcgcacacaacgatgtgatggaagtacttcataaacacggagcaaagatgaatgcactggatacactgggacaaacagctcttcaccgtgctgcgctagcaggtcacctgcagacttgccgcctgctgcttagctacgggtctgatccatctatcatctcccttcaaggctttaccgccgctcagatggggaacgaagccgtgcagcaaatcctaagtgagtctacccccatcagaacctctgatgtggattacaggctcttagaagctagtaaagcaggcgatctggagaccgtcaaacagctatgcagttcccagaacgtgaactgtagagacctggaagggagacacagcactcccctgcatttcgccgctggatataaccgcgtgtccgtggtggaatacttgctgcaccatggcgctgatgtacatgctaaggacaaaggtggcctcgtcccactgcataacgcgtgctcctatggtcactacgaagtcgccgagttgttagtgcggcacggagcctctgttaatgtagctgacctgtggaagtttaccccccttcatgaagcagctgctaaaggtaagtatgaaatatgcaagctactgctgaagcacggggctgacccaaccaagaagaaccgggatggtaacacgcctctagacctggtgaaggagggggacacagacatccaagacctcttacggggtgatgccgcacttctggacgccgctaaaaagggatgtcttgccagggtgcagaagctgtgcacacctgagaatatcaattgtcgggacacgcagggtagaaacagtactcccctacacctagcggctgggtacaacaacctggaggtagccgagtacctgctcgagcatggagctgacgtgaacgcccaagataaaggagggcttattcctctgcacaatgcggctagctatggacacgtggatattgccgctctgctgatcaaatataatacctgcgtgaatgcgacagacaagtgggcctttaccccactgcacgaagccgctcaaaagggcagaactcagctgtgcgcgctcctgctggctcacggagctgatcctaccatgaaaaatcaggagggtcaaacccccttggacctggccacagccgacgatattcgcgctctgctgattgatgccatgcccccagaggctctcccaacatgcttcaagccacaggccactgtagtctctgcctctctcatttccccagcctccacccctagctgtttgagtgccgcttcttccattgataatctcacaggaccactggcagagttggccgtcggaggggcttctaatgccggtgatggggctgctggtactgaacgcaaagaaggagaggtcgccggtctggatatgaatatatctcagttcctgaaaagcctgggcctcgaacatcttagagacattttcgaaactgaacagatcaccctcgatgtccttgctgacatgggacatgaggagctcaaagaaattggcatcaacgcctacgggcacaggcacaagctaatcaagggcgtggaaagactgctggggggacaacaggggactaatccgtatttaacctttcactgtgtgaaccagggaacaatccttcttgatttagcacccgaggacaaggagtatcaaagcgtagaagaggagatgcagtcaaccatccgggagcatcgggacgggggtaatgctggcggaatattcaacaggtataacgtgattcggattcaaaaagttgttaataaaaaactgcgcgaacggttttgtcaccgccagaaggaagtgagtgaagaaaaccacaatcatcataacgaaaggatgttattccacgggagtcccttcattaatgctattattcataagggttttgatgagagacacgcctatatcggtggcatgtttggagctggcatctactttgcagagaattcgtctaagagtaaccagtatgtgtatggcatcggagggggaaccggctgccctacacataaagatagaagctgctacatttgtcatcgacagatgctgttttgtcgtgtaaccctaggaaagagctttctgcaatttagtaccatgaaaatggcgcatgcaccgcctggccatcacagcgtcattggacggccaagcgtgaacgggctcgcttatgctgaatacgtaatttacagaggagaacaagcctatcccgaatacctgatcacgtaccaaattatgaagcctgaagcccctagccagacagccactgccgcagaacaaaaaacctag

SEQ ID NO: 140544 - DNA, 9620 bp, Artificial Sequence
  derived and/or modified sequence
agtgacagtgctaggggagtccgaagatggcggcgtcgcgtcgctctcagcatcatcaccaccatcatcaacaacagctccagcccgccccaggggcttcagcgccgccgccgccacctcctcccccactcagccctggcctggccccggggaccaccccagcctctcccacggccagcggcctggcccccttcgcctccccgcggcacggcctagcgctgccggagggggatggcagtcgggatccgcccgacaggccccgatccccggacccggttgacggtaccagctgttgcagtaccaccagcacaatctgtaccgtcgccgccgctcccgtggtcccagcggtttctacttcatctgccgctggggtcgctcccaacccagccggcagtggcagtaacaattcaccgtcgtcctcttcttccccgacttcttcctcatcttcctctccatcctcccctggatcgagcttggcggagagccccgaggcggccggagttagcagcacagcaccactggggcctggggcagcaggacctgggacaggggtcccagcagtgagcggggccctacgggaactgctggaggcctgtcgcaatggggacgtgtcccgggtaaagaggctggtggacgcggcaaacgtaaatgcaaaggacatggccggccggaagtcttctcccctgcacttcgctgcaggttttggaaggaaggatgttgtagaacacttactacagatgggtgctaatgtccacgctcgtgatgatggaggtctcatcccgcttcataatgcctgttcttttggccatgctgaggttgtgagtctgttattgtgccaaggagctgatccaaatgccagggataactggaactatacacctctgcatgaagctgctattaaagggaagatcgatgtgtgcattgtgctgctgcagcacggagctgacccaaacattcggaacactgatgggaaatcagccctggacctggcagatccttcagcaaaagctgtccttacaggtgaatacaagaaagacgaactcctagaagctgctaggagtggtaatgaagaaaaactaatggctttactgactcctctaaatgtgaattgccatgcaagtgatgggcgaaagtcgactcctttacatctagcagcgggctacaacagagttcgaatagttcagcttcttcttcagcatggtgctgatgttcatgcaaaagacaaaggtggacttgtgcctcttcataatgcatgttcatatggacattatgaagtcacagaactgctactaaagcatggagcttgtgttaatgccatggatctctggcagtttactccactgcacgaggctgcttccaagaaccgtgtagaagtctgctctttgttacttagccatggcgctgatcctacattagtcaactgccatggcaaaagtgctgtggatatggctccaactccggagcttagggagagattgacttatgaatttaaaggtcattctttactacaagcagccagagaagcagacttagctaaagttaaaaaaacactcgctctggaaatcattaatttcaaacaaccgcagtctcatgaaacagcactgcactgtgctgtggcctctctgcatcccaaacgtaaacaagtgacagaattgttacttagaaaaggagcaaatgttaatgaaaaaaataaagatttcatgactcccctgcatgttgcagccgaaagagcccataatgatgtcatggaagttctgcataagcatggcgccaagatgaatgcactggacacccttggtcagactgctttgcatagagccgccctagcaggtcacctgcagacctgccgcctcctgctgagttacggctctgacccctccatcatctccttacaaggcttcacagcagcacagatgggcaatgaagcagtgcagcagattctgagtgagagtacacctatacgtacttctgatgttgattatcgactcttagaggcatctaaagctggagacttggaaactgtgaagcaactttgcagctctcaaaatgtgaattgtagagacttagagggccggcattccacgcccttacacttcgcagcaggctacaaccgcgtgtctgttgtagagtacctgctacaccacggtgccgatgtccatgccaaagacaagggtggcttggtgccccttcataatgcctgttcatatggacactatgaggtggctgagcttttagtaaggcatggggcttctgtcaatgtggcggacttatggaaatttacccctctccatgaagcagcagctaaaggaaagtatgaaatctgcaagctccttttaaaacatggagcagatccaactaaaaagaacagagatggaaatacacctttggatttggtaaaggaaggagacacagatattcaggacttactgagaggggatgctgctttgttggatgctgccaagaagggctgcctggcaagagtgcagaagctctgtaccccagagaatatcaactgcagagacacccagggcagaaattcaacccctctgcacctggcagcaggctataataacctggaagtagctgaatatcttctagagcatggagctgatgttaatgcccaggacaagggtggtttaattcctcttcataatgcggcatcttatgggcatgttgacatagcggctttattgataaaatacaacacgtgtgtaaatgcaacagataagtgggcgtttactcccctccatgaagcagcccagaaaggaaggacgcagctgtgcgccctcctcctagcgcatggtgcagaccccaccatgaagaaccaggaaggccagacgcctctggatctggcaacagctgacgatatcagagctttgctgatagatgccatgcccccagaggccttacctacctgttttaaacctcaggctactgtagtgagtgcctctctgatctcaccagcatccaccccctcctgcctctcggctgccagcagcatagacaacctcactggccctttagcagagttggccgtaggaggagcctccaatgcaggggatggcgccgcgggaacagaaaggaaggaaggagaagttgctggtcttgacatgaatatcagccaatttctaaaaagccttggccttgaacaccttcgggatatctttgaaacagaacagattacactagatgtgttggctgatatgggtcatgaagagttgaaagaaataggcatcaatgcatatgggcaccgccacaaattaatcaaaggagtagaaagactcttaggtggacaacaaggcaccaatccttatttgacttttcactgtgttaatcagggaacgattttgctggatcttgctccagaagataaagaatatcagtcagtggaagaagagatgcaaagtactattcgagaacacagagatggtggtaatgctggcggcatcttcaacagatacaatgtcattcgaattcaaaaagttgtcaacaagaagttgagggagcggttctgccaccgacagaaggaagtgtctgaggagaatcacaaccatcacaatgagcgcatgttgtttcatggttctcctttcattaatgccattattcataaagggtttgatgagcgacatgcatacataggaggaatgtttggggccgggatttattttgctgaaaactcctcaaaaagcaaccaatatgtttatggaattggaggaggaacaggctgccctacacacaaggacaggtcatgctatatatgtcacagacaaatgctcttctgtagagtgacccttgggaaatcctttctgcagtttagcaccatgaaaatggcccacgcgcctccagggcaccactcagtcattggtagaccgagcgtcaatgggctggcatatgctgaatatgtcatctacagaggagaacaggcatacccagagtatcttatcacttaccagatcatgaagccagaagccccttcccagaccgcaacagccgcagagcagaagacctagtgaatgcctgctggtgaaggccagatcagatttcaacctgggactggattacagaggattgtttctaataacaacatcaatattctagaagtccctgacagcctagaaataagctgtttgtcttctataaagcattgctatagtgatgaatagtatgagtaactgatacatactcaactgctactgttccctttgaggaaatgtttacaggggcggccttttaacatatctcaggctcattttcattgcaattatccatttctaaaacaagattgcttcgatctagacttggaaatggaaaataagaaaaccaatgctttttcaaatgttcacaattcacacactacatttgttttgttatgcatgacgtgtctataacaaatatacacatacgacaggcaacaagcttgtttttgatttgccagacatgcatcattggctattgtttgtttgttttttgtttttttgtgttttttgggttactttgaaaatgagccagagccttcttgaggatattttgcacaaagtcacgctgacaaaatcattagcagtgcaacccaagcttctggctgagcaagattcagtttccactttttaaaatttttttattttgctctgtagctgcacttctcgttatcataaattgagatgaaaaggaaaaaacatcaagttttagtacctttttatgaattggcctatcttacaagagaagggcacaaacaccaacctgacttaggaacgcctaaattcagagaagtcaaagccggtgaaggccacttgctctttccaacacaagcctgccacagaggtcttcgggacagtactggagatgcaggttgacacgggcttgagttccaaggtgaaaaaactggggaggctgtgaaggaagagctgcattaaggagggtgaggagcgtgtggttctgtatcatggcagccccaatggatccaggggatgcctccaaaaaatacatgcttcccttcccttaatctgtactgttgggattgttacccctccaaattagctgccttatttcaaaagtcagtgaaattactgcacttgatgagggtcacaaaaataccacttgattgtttctttagttgagaatgctgggattcagactcgaatagtggatagatacacacaaatgcaaggacttttttgtttactccagatttggggtttattttgagtggcatgcttcaaatagttcataaagatccttgcattaaatttctgaaccatttcttcaaacttcttagtgtgtttagacaaggagaacaaaaattgaaaccaaagccctttctgttattttttcaatgaaggtgagaaagaaataccatacaattttctttgtgaaattactgtttattttcatcaacatttaccaagtgccattgacatttataaaaaaaaatgatcctttatagttcttacacttgcccttttcaccttaactgaatatgaattgagtgcactaacttatttacttgatatactgtgcatctactctgctttgaagcgaaagaaatataaacacgaggaggaataggaaagacagtgtgacacaaacttgccattgcaattcaaagccctgaaaacgatgggtttaatgcaaggtgattaagctgtgacctcctttaatctcctgaagcaaaataaaatggttacatgcaaaacttctagaaatagactcttaaaatatatacattttgctttgattttggcttcaacccagtgctggaactaggcatccagactagtttgaatgtttgtagctgaatttttatgggtcctcaaaattaaatcgagaattagcctcagttgttgcttcttttgaagtttcagtgacccaagctgggtgtttgtgtcttggctacttgtttaatagcactagaattccaggtgaagctttgagagttgatattcattaagagggctttttttccccttctttccttctcttttgctgtaacaaagggttgaagaaattgccatctgtgtagttttcagtagctgtcaagtgtgtcttacttaccttcccccagacgtagtttaaaatggtaaacacagctgtgatttttagttaagtaaaagagttaatatgatatagatatggaaagctttatggcttcattaaaaagataaaccactacctaactgtggttgtatgttgtttccatcatactaactagatgaatggatgcgccagttttcatcttggtccttacacttgagaagttaaactgtggttcagtatttaaactgccagtgttatacgtctcatgctctgtgtgccaggtgaaggtactgtgtaaggaagacatttgcggtgcttcttgtcctataatgattcaagtatatagtagttcttgaaagagtgtgcatatattactcatctgcttaagagagtgggttaatggatatatcagaggagccaaatacatttttttcagaacttgaaaaccaaaggtcatcatgagtgcactcaaaagttaggacaagtttattacatttgggattttcatctgtagccgtatgaagaaccctttccaatataaaagcatggcattaaattaggctgaagtcttttattttttgtatatgtactatatagaaatactagcaagttaggatcatccaatatggcctaccccgaaatggcccctctgtttccctaaccacatggaagaaagaatctgaacgtctccaccggctctacccgagttccaaaactaaagggcttctccagacctgatggttccagtttacctgctgttggcctgctggatacttgactcaggcataaattaagtgccctggtcccgaactttctccctgtatttgacctccttccctctttcctaaattactagtctggaattaaaattagctccagcaatgacctttgactccattcattttctcctcatcttgggtcttaaaaaaggagaccagatacctcctagcttttgtatcacaaccaggaatgggtattaggcctcatgcgctttgctcagaacactgccgctttgttaacaaatgacagcatggaacccagagttttgattcgatgcaaaataacagcagtgcaaccaggattcttgttttccttttccttcttggagtttggaatttctagcttttcaagcagcataagtagaatcaacattaggatgttttcatgaaatagcatccttatacttctttgagcttgatgttagtggctagactgatttccctttgctctcaaaatacaaagtgcattgaagtatacagagaaatgcctgaatatggcaagcaaataatgtagattaacattctattattgtatccgttttacaaaaaataaaattttgatatatgccggagaacggcattagaatgcaataagttgtctaggtttttctgtttcagtgtctctcccaatggcacgaagggttattgggcattgtccccacccccgcctttttaacatgtgcactatctggattcctgtaaatggccttgcaaacagaagtggtgtgtattttcaagcacctttcccccattgtatccgaatccctcttgtgtgatatctgtgacaaatagccttcttcttgtgttttctgttggactaattgtctcacgtaaagctatagaccttactaatttggcaggtattcaaaactgccattaagataggatttcatgtcagatacgtatttaaagagtaaagtcaaatttgtttaatgtcagatcagtgacagaagtgaaaagaaagtaattgtgaaagtgatgtttgagctattgtacacatctagcatatggaaagcaaatgcactcgaaaactactattctagaacatgaggcttcttcagcaacttgtgcactctgccattaataaattaaatttttcccctctagaaagccttaactatggcggaaactttttaaccttttatattttaataaataaaacattgtagtcccatttcttagtgtttgaaaggtgtgtcagtgagtcggccatgtctccatgtgtttcagacctgttcatcttattttatgatggtatatttcataagtaatattcccttacatgcaatggagctgattaaaattaatccatttcaatttctccatattggaacttcctcagctaccagatttctggtttggagaagtgctggaaagatttcaaagcctattcagttgtgtatgtggggatacgacagcaactgtgataccttgtagaatatgagtgatatgcaagctgtgttttttaattgttttaaaatgtaaattatggttatgctaaagtgaaaacctagaggaagctaatgattttatatactttgcacgaccaaatatggtcgtagtatgacgagttttatacattgccagagagttctgcctcctctgaaataacattcgcactgtagattgcatttcggcttttcctcctttcacattcttttttgctttacacttcacgtcttcgcacctgccctacctcccatcctttcaaagaggtttctttcacgttccagaattcagattgttctgtgatttcttttacatcagtctacccatttctgcaggcagccctgaaagcccttgtgttgattcagagtgtttgcagagaaatgcagttgaaccctggtagtggggtgtccctcacacacccgcgcacccctcccaaagttcaggatgaaaggctagaaaacccattcaaagttaggaaagaacacagatctttgaggccgatagcctagacctagaagatgaccttgagtatgtaaacattgtctccgtgacacaaaacactgaaactcttcatgtgcatataacacctgcttctgctcccattgtttcaagctcatcttatctttgtagtagtaatgtttgtctttgatacctacaaactaaaaaggtacttttatcaaggtttctcaaaacatttacaaaaccagctttgagaaaatgttatgttgcctggcaacagcactcggagtagtaattgtgttttctcattgtgatgttggtctgtgtgagcaaccagtgtagtgactctttggttcattattcgtgttgtttttatttttagtctctgtgtgacccaacagtggcaggggttacaaccccctctcctttcttttttgtatttatctatttgtaggattgtcagatcaagtacaagatgcccagttaagtttgaatttcagagaaacaatttcacgttaagaatgtttcatgcaatatttggcatatatttacagtaaaagcattcattatttgtctgaaattcaaatttaactgagcatgctggtttttctcattgtttggtttttctaaatctggcaatcctacagctgtggtcatgggaaatcacctacagcatgttaaagtcctctagtcatcatctcgtcacctgaaatggaagtcctttttccctcaccctccacttctttccaaaggagggcatcaaggaacttaacctgcctgcctggtgggtttctatttaagacatctttgtgattatatttaacctgcaattgtgctttggcttaatgtctagctcactgtacttgtaaatgattaatattcaataaaaccatttttaaagta

SEQ ID NO: 140545 - protein, 1338 aa, Artificial Sequence
  derived and/or modified sequence
MASPPRHGPPGPASGDGPNLNNNNNNNNHSVRKCGYLRKQKHGHKRFFVLRGPGAGGDEATAGGGSAPQPPRLEYYESEKKWRSKAGAPKRVIALDCCLNINKRADAKHKYLIALYTKDEYFAVAAENEQEQEGWYRALTDLVSEGRAAAGDAPPAAAPAASCSASLPGALGGSAGAAGAEDSYGLVAPATAAYREVWQVNLKPKGLGQSKNLTGVYRLCLSARTIGFVKLNCEQPSVTLQLMNIRRCGHSDSFFFIEVGRSAVTGPGELWMQADDSVVAQNIHETILEAMKALKELFEFRPRSKSQSSGSSATHPISVPGARRHHHLVNLPPSQTGLVRRSRTDSLAATPPAAKCSSCRVRTASEGDGGAAAGAAAAGARPVSVAGSPLSPGPVRAPLSRSHTLSGGCGGRGSKVALLPAGGALQHSRSMSMPVAHSPPAATSPGSLSSSSGHGSGSYPPPPGPHPPLPHPLHHGPGQRPSSGSASASGSPSDPGFMSLDEYGSSPGDLRAFCSHRSNTPESIAETPPARDGGGGGEFYGYMTMDRPLSHCGRSYRRVSGDAAQDLDRGLRKRTYSLTTPARQRPVPQPSSASLDEYTLMRATFSGSAGRLCPSCPASSPKVAYHPYPEDYGDIEIGSHRSSSSNLGADDGYMPMTPGAALAGSGSGSCRSDDYMPMSPASVSAPKQILQPRAAAAAAAAVPSAGPAGPAPTSAAGRTFPASGGGYKASSPAESSPEDSGYMRMWCGSKLSMEHADGKLLPNGDYLNVSPSDAVTTGTPPDFFSAALHPGGEPLRGVPGCCYSSLPRSYKAPYTCGGDSDQYVLMSSPVGRILEEERLEPQATPGPSQAASAFGAGPTQPPHPVVPSPVRPSGGRPEGFLGQRGRAVRPTRLSLEGLPSLPSMHEYPLPPEPKSPGEYINIDFGEPGARLSPPAPPLLASAASSSSLLSASSPASSLGSGTPGTSSDSRQRSPLSDYMNLDFSSPKSPKPGAPSGHPVGSLDGLLSPEASSPYPPLPPRPSASPSSSLQPPPPPPAPGELYRLPPASAVATAQGPGAASSLSSDTGDNGDYTEMAFGVAATPPQPIAAPPKPEAARVASPTSGVKRLSLMEQVSGVEAFLQASQPPDPHRGAKVIRADPQGGRRRHSSETFSSTTTVTPVSPSFAHNPKRHNSASVENVSLRKSSEGGVGVGPGGGDEPPTSPRQLQPAPPLAPQGRPWTPGQPGGLVGCPGSGGSPMRRETSAGFQNGLNYIAIDVREEPGLPPQPQPPPPPLPQPGDKSSWGRTRSLGGLISAVGVGSTGGGCGGPGPGALPPANTYASIDFLSHHLKEATIVKE

SEQ ID NO: 140546 - DNA, 414 bp, Artificial Sequence
  derived and/or modified sequence
atgagccagttccagggcaagggcccccggtggaccgtgctgatcatgtccaaggtggggttgcgagggggtctgtccgaccagatggcaatgaaagttctggaccccttgagacaagcactggacagtagcatgcagtcaaacaacctgtgccagcacccccaacctctcgcgctccacgtgtcagcagccgttgcgtctgcaggcgcccaggcgagttctctactggggccattgcctcatttgtcttcgtttgccttccagcctgcccattccctcctcagtctgctcggcagtcatggggctgaagtttcgaagaagatggctctgctggcgagagaacgctcgccagcccatctagtggcgtttcctgggcgcctcacggctaccccacctggcttgcccacgttttag

SEQ ID NO: 140547 - DNA, 4017 bp, Artificial Sequence
  derived and/or modified sequence
atggcctctccgccgaggcacggcccccccggccccgcctccggggacggcccaaacctgaacaataataataataacaataaccatagtgtcaggaaatgtggatacctgcgaaagcagaaacacgggcacaagcgattttttgtcctgaggggccctggcgcaggcggcgacgaagctaccgctggaggtggttctgctccacaaccaccaagactcgaatattacgagagcgagaaaaagtggcgcagcaaggcgggtgcacccaagcgcgtcatcgcccttgattgctgcttgaatataaacaagagggcagacgctaaacacaaatatctcatagccctgtacacgaaagacgagtattttgctgtcgcggcagaaaacgagcaggagcaggaggggtggtaccgggccttgacggatctagtctctgaaggccgggcggcggctggggatgcgcccccggctgctgcaccggcagcgagttgttcagccagtctgccaggcgcccttggtgggtcagccggtgctgctggggcagaagacagttatggtctcgtggctccagcaacagccgcttaccgcgaggtgtggcaagtgaacctcaagcccaagggcctgggacaatccaaaaacctcaccggagtgtatagactgtgtctttcagcccgcactattgggtttgtaaagttgaattgtgagcagccctccgtgactttgcagcttatgaatatccggagatgcggacactcagacagtttttttttcattgaggtgggacgaagcgcggtgacaggtccaggcgaactttggatgcaggctgatgacagcgttgtggcccagaatatccatgaaactattctggaggcaatgaaagctcttaaagaattattcgaatttcggccccgcagcaaatcccagagtagcggatcaagcgctactcacccgattagtgtcccaggcgcccgcaggcaccaccatctggtgaacctgcccccaagtcaaaccggtctagtgagaaggtctcgaaccgatagcctggccgctacgccccctgccgccaagtgctcctcctgtcgcgtgcgaactgccagtgaaggggatggcggggccgctgcaggcgcagcagccgcgggggccaggcctgtgtcagtggctggcagtcccctgtccccagggcccgtacgcgctccccttagccgcagtcacactttatcaggagggtgtggaggccgaggttctaaggtagctctgttgcctgcaggcggagcactccagcactcccggagcatgtctatgcccgtcgctcacagccctcccgccgccacctccccagggtcactgtctagttcctcaggacatgggagcgggagttaccccccccctcctggccctcaccctccattgccccatcctctgcaccacgggccagggcagcgccctagttctggttccgcgtcagcttcgggatcaccctccgaccctgggttcatgtctttggatgagtatggctcctctcccggagatttgcgtgcgttttgttcacatcgttcaaacacgccagaatcaatcgctgagacccctcccgctcgcgatggagggggagggggcgagttttatggttatatgacaatggataggccactttcccactgtggtagaagctacaggcgcgtgagcggagatgccgcacaggacctggatcgagggctgcgaaagaggacatattctctcacaactcccgccaggcaaagaccagtccctcagccatcgtccgcaagccttgacgagtacactctcatgcgagctacatttagcggctctgcaggtaggctctgccctagttgccctgcgtcatcccccaaggtggcttaccacccctatcccgaagactacggtgatatcgagataggaagccacagaagctcgtcttcaaatcttggagctgatgatggttacatgcccatgacacccggcgctgcgttggccgggagtggctccggaagttgcagatctgacgactacatgccaatgtctcctgcgtcagtgtcagctcccaaacaaatcctgcaacctcgagcagccgctgccgccgcagccgccgtcccgtctgccgggcccgcaggccctgctccaaccagtgcagccggcagaacattccccgcgagcggtggcgggtataaggcatcttcccctgcggaatcaagtcctgaggatagtgggtatatgagaatgtggtgtggctctaagctgtccatggagcacgccgacgggaaattgctgcccaacggtgattatctcaacgtctccccttcagacgccgtgactaccggcactcctcctgacttcttcagcgcagctctgcacccaggcggtgagccgctgcgaggtgtccctggttgctgttacagcagcctgccacgctcgtacaaagctccttacacctgtggaggtgactccgaccagtatgtgctgatgtcctcccccgtgggtcgcatcttggaggaagaacgcctcgaaccacaagccacccccggtccatctcaggccgcctctgcctttggggccgggcccacacagcccccacacccagtggtcccaagtcctgtacggccatccggggggaggcccgagggttttcttggccaaagggggagggcagtgaggcccactagactaagtctggaaggacttccctccctgcccagcatgcatgagtatccccttccacccgaacctaaaagcccaggcgagtacatcaatatagacttcggagaaccgggcgcccggctcagccccccagcccctcctctgctggcttctgctgcctctagttccagcctgttgtctgcttcttctccagccagtagcttgggttcgggtacgccaggaacgtctagcgattctcgccaaaggagtcctctctcagactacatgaatcttgattttagttcaccaaaaagtcctaagccgggagcaccctctggccatcccgtaggtagccttgatgggctgctttctcctgaggcctcctcaccctatcctcccttgccccctagacccagtgccagcccctccagcagtctgcagcctcctccaccacccccagcgcccggggaactgtaccgcctccctcccgcgtctgctgttgccacagcacagggtccgggggccgcttcctctttgtcaagcgatacgggcgacaacggagactacacagagatggcgtttggggtggccgccacacccccacagcccattgccgcccctccgaagcccgaggctgctcgtgttgcatctcccacttccggtgtgaagagactaagcttaatggagcaggtcagtggagttgaggcgtttctgcaggccagtcagccacccgatcctcaccgaggggccaaagtgattagagctgacccgcagggagggcgccggcggcactcctctgagacattctcatccacaactacggtgaccccggtcagtccgagtttcgcccacaacccaaagagacataactctgcctctgtggaaaatgtttctttgcggaagtcatctgaaggaggcgtgggtgtcggcccaggcggaggtgacgagcctccaacgtcaccacgccagctgcagccagcccctcctcttgccccacagggcaggccttggaccccgggtcaaccaggagggttggtgggctgtcctggctccgggggcagccccatgagacgcgagacatccgctggattccaaaatggcctcaactacattgctatagacgtccgcgaggagccgggcctccccccccagccccagccgccacctccaccgctgccccagcccggcgataagagctcctggggacgaacacggtctctgggaggattgatcagcgctgttggcgtgggatcgactggagggggatgtggcgggcccggcccaggagccttaccaccggctaacacctatgcgtctattgacttcctctcacatcatctaaaagaagctaccatcgtcaaggaatag

SEQ ID NO: 140548 - DNA, 6999 bp, Artificial Sequence
  derived and/or modified sequence
gcggggaccgcgacgagcccgggtcgccgttggcagcagcagcagcaacaccagcagcagcagcagccccggcggcggcgcggaccccgagcgcccgggcgcaccccggcttcccggagcgcgacgcggcggcagcagccccggtgcggccgcgcgcgccttaggctcggccccgcggctcggggaccccgactcccggcccagcgagcgcgtcccccggcgccgcccgagagcccgaggaggcagcggccgcaggcagccggggaggggggcggccaccgcccgcgccgggcatcctcaggagccccagagcgcggagggcgcggcgccgccgagcggtgctggcccccgcgggcctccccggaccttccccaccgcctgggcccgagggacgcgtgatcgggcgggcggccgggcgcaagggtgggagggagccgcccccgcccgcgccccctccgcccctcgccccaacccctgggcgccgggcccgggccgcgcggcctgaagcgcccgcgatggcgagcccgccgcggcacgggccgcccgggccggcgagcggagacggccccaacctcaacaacaacaacaacaacaacaaccacagcgtgcgcaagtgcggctacctgcgcaagcagaagcatggccacaagcgcttcttcgtgctgcgcggacccggcgcgggcggcgacgaggcgacggcgggcggggggtcggcgccgcaaccgccgcggctcgagtactacgagagcgagaaaaagtggcggagcaaggcaggcgcgccgaaacgggtgatcgctctcgactgctgcctgaacatcaacaagcgcgccgacgccaagcacaagtacctgatcgccctctacaccaaggacgagtacttcgccgtggccgccgagaacgagcaggagcaggagggctggtaccgcgcgctcaccgacctggtcagcgagggccgcgcggccgccggagacgcgccccccgccgccgcgcccgccgcgtcctgcagcgcctccctgcccggcgccctgggcggctctgccggcgccgccggggccgaggacagctacgggctggtggctcccgccacggccgcctaccgtgaggtgtggcaggtgaacctgaagcccaagggtctgggccagagcaagaacctgacgggggtgtaccgtctgtgcctgtctgcgcgcaccatcggcttcgtgaagctcaactgcgagcagccgtcggtgacgctgcagctcatgaacatccgccgctgcggccactcggacagcttcttcttcatcgaggtgggccgctcggccgtcacaggccccggcgagctgtggatgcaggcggacgactcggtggtggcgcagaacatccacgagaccatcctggaggccatgaaggcgctcaaggagctcttcgagttccggccgcgcagtaagagccaatcgtcggggtcgtcggccacgcaccccatcagcgtccccggcgcgcgccgccaccaccacctggtcaacctgccccccagccagacgggcctggtgcgccgctcgcgcaccgacagcctggccgccaccccgccggcggccaagtgcagctcgtgccgggtgcgcaccgccagcgagggcgacggcggcgcggcggcgggagcggcggccgcgggcgccaggccggtgtcggtggctgggagccccctgagccccgggccggtgcgcgcgcccctgagccgctcgcacaccctgagcggcggctgcggcggccgcgggagcaaggtggcgctgctgccggcagggggcgcgctgcaacacagccgctccatgtccatgcccgtggcgcactcgccgcccgccgccaccagccccggctccctgtcgtccagcagcggccacggctcgggctcctacccgccgccgcccggcccgcacccgcctctgccgcatccgctgcaccacggccccggccagcggccctccagcggcagcgcctccgcctcgggctcccccagcgaccccggcttcatgtccctggacgagtacggctccagcccaggcgacctgcgcgccttctgcagccaccgaagcaacacgcccgagtccatcgcggagacgcccccggcccgagacggcggcggcggcggtgagttctacgggtacatgaccatggacaggcccctgagccactgtggccgctcctaccgccgggtctcgggggacgcggcccaggacctggaccgagggctgcgcaagaggacctactccctgaccacgccagcccggcagcggccggtgccccagccctcctctgcctcgctggatgaatacaccctgatgcgggccaccttctcgggcagcgcgggccgcctctgcccgtcctgccccgcgtcctctcccaaggtggcctaccacccctacccagaggactacggagacatcgagatcggctcccacaggagctccagcagcaacctgggggcagacgacggctacatgcccatgacgcccggcgcggccctcgcgggcagtgggagcggcagctgcaggagcgacgactacatgcccatgagccccgccagcgtgtccgcccccaagcagatcttgcagcccagggccgccgccgccgccgccgccgccgtgccttctgcggggcctgcggggccagcacccacctctgcggcgggcaggacattcccggcgagcgggggcggctacaaggccagctcgcccgccgagagctcccccgaggacagtgggtacatgcgcatgtggtgcggttccaagctgtccatggagcatgcagatggcaagctgctgcccaacggggactacctcaacgtgtcccccagcgacgcggtcaccacgggcaccccgcccgacttcttctccgcagccctgcaccccggcggggagccgctcaggggcgttcccggctgctgctacagctccttgccccgctcctacaaggccccctacacctgtggcggggacagcgaccagtacgtgctcatgagctcccccgtggggcgcatcctggaggaggagcgtctggagcctcaggccacgccagggcccagccaggcggccagcgccttcggggccggccccacgcagccccctcaccctgtagtgccttcgcccgtgcggcctagcggcggccgcccggagggcttcttgggccagcgcggccgggcggtgaggcccacgcgcctgtccctggaggggctgcccagcctgcccagcatgcacgagtacccactgccaccggagcccaagagccccggcgagtacatcaacatcgactttggcgagcccggggcccgcctgtcgccgcccgcgcctcccctgctggcgtcggcggcctcgtcctcctcgctcttgtccgccagcagcccggcctcgtcgctgggctcaggcaccccgggcaccagcagcgacagccggcagcggtctccgctctccgactacatgaacctcgacttcagctcccccaagtctcctaagccgggcgccccgagcggccaccccgtgggctccttggacggcctcctgtcccccgaggcctcctccccgtatccgccgttgcccccgcgtccgtccgcgtccccgtcgtcgtctctgcagccgccgccaccgccgccggccccgggggagctgtaccgcctgccccccgcctcggccgttgccaccgcccagggcccgggcgccgcctcatcgttgtcctcggacaccggggacaatggtgactacaccgagatggcttttggtgtggccgccaccccgccgcaacctatcgcggcccccccgaagccagaagctgcccgcgtggccagcccgacgtcgggcgtgaagaggctgagcctcatggagcaggtgtcgggagtcgaggccttcctgcaggccagccagcccccggacccccaccgcggcgccaaggtcatccgcgcagacccgcaggggggccgccgccgccacagttccgagaccttctcctccaccacgacggtcacccccgtgtccccgtccttcgcccacaaccccaagcgccacaactcggcctccgtggaaaatgtctctctcaggaaaagcagcgagggcggcgtgggtgtcggccctggagggggcgacgagccgcccacctccccacgacagttgcagccggcgccccctttggcaccgcagggccggccgtggaccccgggtcagcccgggggcttggtcggttgtcctgggagcggtggatcgcccatgcgcagagagacctctgccggcttccagaatggtctcaactacatcgccatcgacgtgagggaggagcccgggctgccaccccagccgcagccgccgccgccgccgcttcctcagccgggagacaagagctcctggggccggacccgaagcctcgggggtctcatcagcgctgtgggcgtcggcagcaccggcggcgggtgcggggggccgggtcccggtgccctgccccctgccaacacctacgccagcattgacttcttgtcccaccacttgaaggaggccaccatcgtgaaagagtgaagatctgtctggctttatcaccaggatgtcacatgtcagagagtatcattaaaagaagacgctcagcactgtttcagcccgaagctgcttgcagttttcttttggatctgagcaatgactgtgtttggaaacatctgtggactctgttagatgaggcaccaacaaggcaaggtcacctgcctctttcccttgttcccggatggggcattcatcattgtgctgtttgcgttttgttttgttttgttttaacaaaattagctgaagaagttattctcaagaaaattggatgttttcattggccttcttaaattgtggccagtgtcttttaatttcttcttcttttccttttggcaaagcagatataaccctcagcatgctaggagagtgcacccgtacctatggaagtggtaaaatctggtatttactggcttacactcaaaacgaccacagtcctacctcagttcaaggtaaagccggatttccgtggcgggggtcccacaggacctcctgtagtagcccctgcgctgtgtgtctggagcgcggtcctcggccttattgaaatggtccaagtagacagctgcttgttggattccagtgcaggtacctgcgatgtttacgtccacaccgagcccagtgtgggactgacatttctcaatggaagtgaaatttgggattggactttgaagacggattactaaataataattattatatgtaactgaagcaacctacttttgaaaatcaactgtattgggtagtgggaggtgggagggaagggctttgggaaggggatgaatatctctttttacctttaacagacttgtttaatcttctcgatgtagatgtttatgtaggtacttcacattgcaaacgccttttattctatttacaagctcagatgtctctgctctcctgaatcttgggcatgcctttctgtaaccaaaaatccctgtaggcgtgctagcaattccagggtggtccgggtttggcagatttgatttttaaaaaacgtattatctttaataaaatgttattatgtcaaccagtgaggctgccctgaacaaaaaaaacaaaaagaaaaaaaaaaaaggaaagaaagaaactgataaaaagaggcattccagcccctatgttattgatggaaaaagaaaaagaagaaaagcaatctcgcagtacatgttacttgtcgaaaaaattccggacaagactacccttgttttatgttttcagtattctgaaaataccagtgtgtggcagttctcgcagatgttacctaaaactgctgaacttgaccggcagaatgttctgccgttttctgctccctcgacacttgattggagggctgtcgacctctcctcccgtgggggcttccccagtgcctatcttctctgatagtcatggagaggttacactaattcattggagatgtaagttgttggttttgttttgttttgtttttagaaaaatatatataaatatataatagatatctatcgctatagaataatgcattaataaaatgaggcttttttagaggaagaccaaaaaattcaatgtcttaaaaatatatttaatggcaatgcaaaagtcttcctgcttccgtgctgaactttagaacagaggattgtattgcaagacaaagttgaatgtaaagtgatctccctgaacatttttaaggttttacttttctgaaattatacatcacagcagtgcataggccatataatgttagctggaaggtcaatttcagtgtatgatatactttattaagatgtataaaaatcctgaagtttttatttagttttgggaataggcatcaatgggtggtatttgctttgtaactccccccaggtacgatagggactgaatatggaccctgctgaaagcagtgtattgacgcatatttaactcgccctctatccgtagagtagtcatgacactatacagatggttcgtgttcatactgcagcttaaaacaagcaaaatacacagatgataatatgctaaattttcctctatcctgtacatttcacaaaaaggcatatgcaatatttacatttttaatttagtttacagaatggaaccaaaatgtataaatgttatgtttgctaaaacttcacaatgtatattgggtctttgtacattttgcctgacttaccttaaatttaaaatattttttgctatataaactttaacagttattaaacagtgttttctttttgggtacgtattgtttctggatatcaagatgttaaatatatttcttgctattgtgatatgacaagagacttaacttatcttgctctgtcttccactgtacacgctgtatataggggtcaatgtgatgctgctggagacgagaataaactggactagaatagtgcattgtatttagtctgtattgatcatggatgccctccttaatagccatatgcaataaaataaagtacattatttatgaaatgaa

SEQ ID NO: 140549 - DNA, 4017 bp, Artificial Sequence
  derived and/or modified sequence
atggccagcccccccaggcatggccccccaggccctgccagcggagatggccccaacctgaacaacaacaacaacaacaacaaccacagcgtgaggaaatgtggctacctgaggaagcagaagcacggccacaagcgcttctttgtgctgcggggccctggagctggaggagatgaggccacagctgggggcggcagcgccccccagcccccccggctggagtactatgagagcgagaagaagtggaggagcaaggccggggcccccaagagggtgattgccctggactgctgcctgaacatcaacaagagagcagatgccaagcacaagtacctgattgccctgtacaccaaggatgagtactttgctgtggccgcagaaaatgagcaggagcaggagggctggtaccgggccctgacagacctggtgtctgagggccgggctgctgctggagatgcccccccagctgctgccccagctgccagctgcagcgccagcctgcccggggccctgggcggcagcgctggagctgctggagcagaagattcctatggcctggtggccccagccacagctgcctaccgggaggtgtggcaggtgaacctgaagcccaagggcctgggccagagcaagaacctgactggagtgtaccgcctgtgcctgagcgcccggaccatcggctttgtgaagctgaactgtgagcagcccagcgtgaccctgcagctgatgaacatccgccgctgtggccacagcgacagcttcttcttcatcgaggtgggccgctctgctgtgactggacctggagagctgtggatgcaggctgatgattctgtggtggcccagaacatccacgagaccatcctggaggccatgaaggccctgaaggagctgtttgagttccggcccaggagcaagagccagagcagcggcagcagcgccacccaccccatctctgtgcctggggcccggcggcaccaccacctggtgaacctgccccccagccagacaggcctggtgcggcgcagcaggacagacagcctggccgccaccccacctgctgccaagtgcagcagctgccgggtgaggacagcctctgaaggagatggaggagctgctgctggagctgctgctgctggggcccggcctgtgtctgtggccggcagccccctgagccctggccctgtgcgggcccccctgagccgcagccacaccctgagcggcggctgcggcggccggggcagcaaggtggccctgctgcctgctggaggagccctgcagcacagccgctccatgtccatgcctgtggcccacagccccccagctgccaccagccctggcagcctgagcagcagcagcggccacggcagcggcagctacccacctcctcctggcccccacccccccctgccccaccccctgcaccacggccctggccagaggcccagcagcggcagcgccagcgccagcggcagccccagcgaccccggcttcatgagcctggatgaatatggcagcagccctggggacctgcgggccttctgcagccacaggagcaacaccccagagagcattgctgagaccccaccagccagagatggcggcggcggcggggagttctacggctacatgaccatggaccggcccctgagccactgcggccgcagctacagaagagtgtctggagatgctgcccaggacctggaccggggcctgaggaagaggacctacagcctgaccaccccagcccggcagaggcctgtgccccagcccagcagcgccagcctggatgagtacaccctgatgagggccaccttcagcggcagcgctggccgcctgtgccccagctgcccagccagcagccccaaggtggcctaccacccctacccagaggactatggagacattgaaattggcagccacaggagcagcagcagcaacctgggcgcagatgatggctacatgcccatgacccctggggccgccctggccggcagcggcagcggcagctgccgcagtgatgactacatgcccatgagccctgcctctgtgtctgcccccaagcagatcctgcagcccagggctgctgctgctgctgctgctgctgtgcccagcgctggccctgctggccctgcccccaccagcgctgctggccgcaccttccctgccagcggcggcggctacaaggccagcagccctgctgagagcagccctgaggacagcggctacatgaggatgtggtgtggcagcaagctgtccatggagcacgcagatggcaagctgctgcccaatggagactacctgaatgtgagccccagtgatgctgtgaccaccggcaccccaccagacttcttctctgctgccctgcaccctggaggagagcccctgcggggcgtgcccggctgctgctacagcagcctgcccaggagctacaaggccccctacacctgtggcggggacagcgaccagtatgtgctgatgagcagccctgtgggccgcatcctggaggaggagcggctggagccccaggccaccccaggccccagccaggccgccagcgccttcggggccggccccacccagcccccccaccctgtggtgcccagccctgtgcggcccagcggcggccggcctgagggcttcctgggccagaggggccgggctgtgcggcccacccggctgagcctggagggcctgcccagcctgcccagcatgcatgagtaccccctgcccccagagcccaagagccctggagagtacatcaacatcgactttggagagcccggggcccggctgagccccccagccccacccctgctggccagcgctgccagcagcagcagcctgctgagcgccagcagccctgccagcagcctgggcagcggcaccccaggcaccagcagtgacagccggcagaggagccccctgagtgactacatgaacctggacttcagcagccccaagagccccaagccaggggcccccagcggccaccctgtgggcagcctggatggcctgctgagccctgaggccagcagcccctacccacccctgcccccccggcccagcgccagccccagcagcagcctgcagcccccacctcctcctccagcccctggagagctgtaccgcctgcccccagccagcgctgtggccacagcccagggccctggggccgccagcagcctgagcagtgacaccggggacaatggagactacacagagatggcctttggagtggccgccaccccaccccagcccatcgccgccccacccaagccagaggccgcccgggtggccagccccaccagcggcgtgaagaggctgagcctgatggagcaggtgtctggagtggaggccttcctgcaggccagccagcccccagacccccacagaggagccaaggtgatccgggctgacccccagggcggcagaagaagacacagcagcgagaccttcagcagcaccaccaccgtgacccctgtgagccccagctttgcccacaaccccaagaggcacaacagcgcctctgtggagaatgtgtccctgaggaagagcagcgagggcggcgtgggcgtgggccctggaggaggagatgagccccccaccagcccccggcagctgcagcctgccccacccctggccccccagggccggccctggaccccaggccagcccggcggcctggtgggctgccccggcagcggcggcagccccatgaggcgggagaccagcgctggcttccagaatggcctgaactacatcgccattgatgtgcgggaggagcccggcctgcccccccagccccagcccccacctccacccctgccccagcccggggacaagagctcctggggccgcaccaggagcctgggcggcctcatctctgctgtgggcgtgggcagcactggaggcggctgcggcggccctggccctggggccctgcccccagccaacacctacgccagcattgacttcctgagccaccacctgaaggaggccaccatcgtgaaggagtag

SEQ ID NO: 140550 - DNA, 4017 bp, Artificial Sequence
  derived and/or modified sequence
atggccagccccccccggcacggcccccccggccccgccagcggcgacggtcccaatctcaataacaataacaacaacaacaaccattcggtgcgcaaatgtggctatcttcggaagcaaaagcacggacacaaaaggttcttcgttcttagaggcccaggggccggtggtgatgaagcaaccgctgggggggggtctgcccctcagcccccccgcctcgaatactatgagagcgaaaagaaatggcgatcaaaagccggtgcccctaagcgcgtgatcgctttggactgttgtctgaacattaataagagagccgatgccaagcacaaatacctgatcgccctgtacacgaaggatgagtactttgcagtagccgctgagaatgaacaggaacaagaaggctggtatagagcactgactgatttggtttccgagggtcgcgccgcggcaggggacgccccgccggcagccgccccagccgcctcttgcagcgccagtctgccaggcgcattgggtggctcggcaggagctgcaggcgccgaggattcctacggtctcgtggcacccgcgactgcggcctacagggaagtgtggcaggtcaatctcaagccaaaggggctggggcagtccaagaacctgacaggtgtgtatcgtctttgcctgagtgcccgaaccatagggtttgtcaagctcaattgcgagcagccttctgtgactctgcaactgatgaatatccggcgttgtggacacagtgattcattcttcttcattgaggttggccgctctgcagtgacgggaccaggtgagttgtggatgcaggctgatgatagcgttgtggcgcagaatatacacgaaacgatccttgaagctatgaaggccctcaaggaactgttcgagttcaggcccagatctaagagtcagtcttctggatcatccgctactcatccaatttcagtgccgggcgctaggagacaccatcatttggtgaaccttcccccatcacaaactggcctggtgaggaggagccggaccgactcactggctgcgaccccccccgccgccaagtgttccagttgcagagtgcgaaccgccagcgaaggtgatggaggcgccgcggctggggctgctgctgctggggcaagacctgttagcgtagccggcagccctctgtctccgggtcccgtccgggcgcctttgagcaggtctcatactctgagcggcggctgtggcggacgcggatcaaaagtggccctcctgcccgctggcggtgctctgcagcactctaggtccatgagtatgcccgtggcccattcccctcccgctgccaccagtccgggtagcttaagcagttcctctggtcacgggtcaggtagttatccaccacctccgggcccacatccgccactgccccaccctttgcaccatgggccagggcagcgccctagctcgggatctgccagcgcctccggatccccctctgatcccggttttatgtcgcttgatgagtatgggagctcaccgggagacctgcgtgcattctgcagtcatcgaagtaatactcctgaatccatagcagaaacacctcccgcaagggatggtggggggggaggcgagttctatgggtacatgacaatggatcgcccattatcccactgtggcagaagttaccggagagtgtcaggggatgcagcacaggacctagatcggggcttgcgaaagcggacatattcattgactacccccgctcgtcagaggcccgtgccacagccatcaagtgcgtccttggatgagtatacattaatgcgggcaactttttctggcagtgccggcagattgtgccccagctgtcccgccagcagccccaaggtagcttaccacccttatccggaagattacggggatatagagatcggctcgcaccggtcttcttcctcgaatctgggagccgacgacggttatatgccgatgaccccgggcgccgcccttgccggttccggatcgggaagctgtcgctccgacgattacatgccaatgagtccagcttctgtctccgccccaaaacagattctgcaacccagggccgccgcagcagccgcagccgccgtaccgtcagccggaccagctggaccagcccccacatcagccgctgggaggacctttcctgctagcggggggggatacaaggcttcttcccctgccgagagttccccagaagatagcggttacatgaggatgtggtgcggaagtaaactgtcaatggagcacgccgacggtaagcttttgccgaatggcgattacctaaatgtcagtccgtccgacgccgtgaccacgggcacaccccctgattttttctcagcagccctccatcccggcggcgagcccttaaggggagtgcctgggtgttgctattctagcctgccacgatcgtacaaagctccatacacttgcgggggggactccgaccagtacgtcttgatgagctccccggtgggtaggatcctggaggaagagaggctcgaaccacaggccactcccgggccttcacaggcggcgtcagcctttggcgccggcccgactcagcccccgcatccagttgtgccctccccagtgcggccgtctgggggacgacccgagggttttcttgggcagagaggacgggctgtgagaccaacacgcttgagtctagaggggctgccttctttgccttctatgcacgagtacccactgccccccgagccaaaatctcccggcgaatacatcaacattgactttggggaacctggagcccgactctctcctcctgctcctccactcctcgcaagtgcggctagttcaagttctctgttatctgctagctccccagccagctctctcgggagcgggacaccaggcacgtctagtgactccaggcagaggtcccctttgagcgattatatgaatctggatttcagctcgcccaagtcacccaaacccggcgctccttcgggtcatccagtcgggagcctggacggcctgctttccccagaagcttcatctccttatccccccttgcctcctcgcccttctgccagcccctcatccagcctgcagccaccaccccctcctccggctccgggtgagctgtacagactgccccctgcaagcgctgtggctactgcccaaggaccaggcgccgcgtcaagtttaagttctgacaccggcgataatggggactatactgaaatggccttcggagtcgctgctacaccgccgcagcctattgcggcccctccgaagcccgaagccgccagggtggcctcacccacatcgggcgttaaaaggctgagtctgatggaacaggtgagtggcgtggaggccttcctccaagcctcccagcctccggatcctcaccggggcgcaaaagtgattagagccgatccccagggcggacggaggcgccactcctcggaaaccttttcttccacaaccacagtgactcccgtctcacctagcttcgcccacaacccaaagagacataatagcgcctcagtggaaaatgtgagtctgaggaagtcaagtgaggggggggtgggtgtgggtcccggcggcggcgacgaaccacccacatcccctcgccaattgcaaccggctccccccttagcaccccaaggcagaccatggactccaggacagcctggcgggctcgtaggatgtccaggctctggaggttccccaatgcggagagagacgtccgcgggctttcagaatgggctcaactatatcgctatcgacgtgcgtgaggaaccaggcctgcctccacagcctcagcctccccctccccctctgccacagcctggtgacaaaagttcttggggcagaactagatctttggggggactgatctcggccgtgggcgtgggaagcactgggggcgggtgtggcggtcccggaccaggcgcactcccccctgcgaatacctacgcttcaattgactttctctcacaccacctgaaagaggcaaccattgtcaaagagtag

SEQ ID NO: 140551 - DNA, 4017 bp, Artificial Sequence
  derived and/or modified sequence
atggccagcccgccacgccacggaccaccaggcccagcatcaggcgacgggcctaatctcaataataataacaacaataataaccacagcgtccgcaaatgcggatacctgagaaaacagaaacacggtcataaaagattttttgttctccgtggccctggcgctggcggagatgaggccacggccggaggtgggagtgctcctcaaccccctcgattagaatactatgagagtgagaagaagtggcggtctaaggcgggagcacctaaaagagtgatcgcattagattgttgccttaatatcaacaaacgagcggatgcaaaacacaaatacctgattgccctgtatacaaaagatgaatactttgctgtcgcggctgagaatgagcaggagcaagaaggctggtatcgagcgcttacagatttagtgagcgaagggagggcagccgctggggacgccccacccgcagctgcccctgccgctagttgttcagcatcgttgcccggagcgctgggtgggtctgcgggagctgccggagccgaggacagctatggactagtggctccagccaccgctgcatatagagaggtctggcaagtcaatctgaaacctaaggggctgggacagtctaagaatctgacaggggtctaccggctgtgcctgtccgccaggaccatcggttttgtgaagctgaattgtgaacagcctagcgtgaccctccagctcatgaatattcgtcgatgcggacattccgattcattcttcttcattgaagtcggaaggagtgctgtcacgggtcccggagaactctggatgcaagcggatgactccgtggtggcccagaacatccatgaaacgatcttggaggcaatgaaagctctaaaggagctgttcgagttccgacccaggagtaaatctcagtcatctgggtcctctgctacacacccaatctccgtccccggagctaggcgacaccatcatttggttaacttacccccaagccaaacgggcttggttcgacgatcccgtactgactctttagccgcaaccccccctgcagcaaagtgctccagttgcagagtgaggactgcctccgaaggagatgggggagccgctgccggtgccgcagctgctggggcacgccctgtgtccgtggccggatcaccactgagtcccggaccggtgcgggcacctctgtcacgatcacacaccttgtcaggcggatgtggagggaggggttccaaagtggccttgttgcctgccggtggggcactccagcattctcgctcaatgtctatgccagttgcccactcacccccagcagctacaagcccgggatcactcagctcgagcagcgggcatgggtcaggtagctacccgccaccacctgggccacaccccccactgcctcacccattacaccacggtcctggccagcgcccttctagcggcagcgcttctgccagcggttcaccttccgacccaggattcatgtctctggatgagtatgggagctccccaggagacctgcgcgcattttgcagtcatcgatcgaatactcctgaaagtattgcagaaacccctcctgctcgcgatgggggtggcggaggagaattctatggatacatgaccatggatcgaccgcttagtcattgtggcaggtcttatcggagggttagcggagacgccgctcaagacctggacagaggcctgcgcaagaggacttactctcttactacccccgctagacaaaggccggtcccccagccatcatcggcctccctggacgagtataccttgatgagagctacctttagcggcagtgctggtcgcctgtgcccttcatgccccgcaagcagtccaaaagtagcctaccatccttatcctgaagactatggagatatcgaaattggtagccacaggtcctcttcatcgaaccttggagcggatgatggctacatgccaatgacccccggtgcggcactggccggatcgggctcaggcagctgtcgctccgacgactatatgcctatgagtccagcaagcgtgagcgcaccaaaacaaattctgcagccacgcgcagctgctgctgcggctgccgctgtgccatccgcgggaccagctggacctgcccctacgagtgcagcgggtagaaccttcccggcatccggcggaggatacaaagccagcagcccagcagagagcagccccgaggattctggatatatgcgcatgtggtgtggctctaagctttcgatggagcacgccgatggaaagctgctacccaacggggactatctaaatgtttctcctagtgacgctgtgacaacagggactccacccgattttttctctgccgctttgcatcccggaggggaaccactgcggggagtgcctggctgctgttactctagtttaccaaggtcctacaaggctccttatacatgtggcggtgacagcgaccagtatgttttgatgagctcccctgtcggcagaatcctggaagaagaacggctcgaaccccaggcgacccctggaccttcccaggctgccagtgcattcggtgccggaccaacccagccccctcacccagtcgttccatccccggtgagaccctctggcggacggccagagggcttcctcggtcagagggggagggcagtaagacctactaggttgtcccttgaaggcctgccaagcctcccctccatgcacgaatacccgcttcctcccgaacctaagagccccggtgagtatatcaatattgatttcggggaacccggagctcggttgagccccccagcaccaccgttgctggcaagtgctgcctcatcttcgagcctgctctctgcaagctcccctgcttcctcgctgggatccggaaccccgggtactagctctgactcacgccagcgctctccattgagtgactatatgaacctggacttcagcagccccaaaagccccaagccaggtgcgccatctggacaccctgtgggatcgctggatggcttactgagccccgaggccagctcaccctacccccctctgcctccaagaccttcagcctccccctcctcttcactccagccccctcccccacctcctgctcccggtgaactctatcggctcccgcctgcttccgctgtggccactgcccaagggcctggggcagcaagctcgttgtcaagcgacactggggataacggcgattacactgaaatggcctttggggtggcagcaactcctccacagcctattgctgcaccaccgaaaccagaggccgctagggtcgcctctcctactagcggggtgaaacggctctctctcatggagcaggtttcgggtgtagaagccttcctccaagcaagccaaccaccagacccccatagaggggctaaggtcattagggctgacccccagggcggacggagacggcatagctctgagacgtttagctcaacgaccactgtgactccagtgtcaccttctttcgcccataatcccaagcgccataacagtgccagtgtggaaaacgttagcctgcgtaagtccagcgagggcggagtgggcgtggggccaggcggtggagacgagccccctacttcgcctagacagctgcagcctgctccgcctttagctccgcagggccgtccctggacacctggacagccaggtggcctggtaggctgccctggaagcggcggatcgcctatgaggcgggagacttctgccggatttcagaatgggctgaactatattgctatagacgtgagggaggaacctggtctaccccctcaaccccaaccccctcccccacccttgccccagcccggtgacaagagttcgtggggtaggaccagatccttgggcggactgatctccgctgtgggggtgggttctacagggggagggtgcggcggtcccggtccaggagctttgccaccagcaaacacctatgcctccattgacttcttgagccaccatctcaaagaagcaacaatcgtcaaggaatag

SEQ ID NO: 140552 - DNA, 4017 bp, Artificial Sequence
  derived and/or modified sequence
atggccagcccccccagacacggcccccccggccccgccagcggcgacggccccaacctgaacaacaacaacaacaacaacaaccacagcgtgagaaagtgcggctacctgagaaagcagaagcacggccacaagagattcttcgtgctgagaggccccggcgccggcggcgacgaggccaccgccggcggcggcagcgccccccagccccccagactggagtactacgagagcgagaagaagtggagaagcaaggccggcgcccccaagagagtgatcgccctggactgctgcctgaacatcaacaagagagccgacgccaagcacaagtacctgatcgccctgtacaccaaggacgagtacttcgccgtggccgccgagaacgagcaggagcaggagggctggtacagagccctgaccgacctggtgagcgagggcagagccgccgccggcgacgccccccccgccgccgcccccgccgccagctgcagcgccagcctgcccggcgccctgggcggcagcgccggcgccgccggcgccgaggacagctacggcctggtggcccccgccaccgccgcctacagagaggtgtggcaggtgaacctgaagcccaagggcctgggccagagcaagaacctgaccggcgtgtacagactgtgcctgagcgccagaaccatcggcttcgtgaagctgaactgcgagcagcccagcgtgaccctgcagctgatgaacatcagaagatgcggccacagcgacagcttcttcttcatcgaggtgggcagaagcgccgtgaccggccccggcgagctgtggatgcaggccgacgacagcgtggtggcccagaacatccacgagaccatcctggaggccatgaaggccctgaaggagctgttcgagttcagacccagaagcaagagccagagcagcggcagcagcgccacccaccccatcagcgtgcccggcgccagaagacaccaccacctggtgaacctgccccccagccagaccggcctggtgagaagaagcagaaccgacagcctggccgccaccccccccgccgccaagtgcagcagctgcagagtgagaaccgccagcgagggcgacggcggcgccgccgccggcgccgccgccgccggcgccagacccgtgagcgtggccggcagccccctgagccccggccccgtgagagcccccctgagcagaagccacaccctgagcggcggctgcggcggcagaggcagcaaggtggccctgctgcccgccggcggcgccctgcagcacagcagaagcatgagcatgcccgtggcccacagcccccccgccgccaccagccccggcagcctgagcagcagcagcggccacggcagcggcagctacccccccccccccggcccccacccccccctgccccaccccctgcaccacggccccggccagagacccagcagcggcagcgccagcgccagcggcagccccagcgaccccggcttcatgagcctggacgagtacggcagcagccccggcgacctgagagccttctgcagccacagaagcaacacccccgagagcatcgccgagaccccccccgccagagacggcggcggcggcggcgagttctacggctacatgaccatggacagacccctgagccactgcggcagaagctacagaagagtgagcggcgacgccgcccaggacctggacagaggcctgagaaagagaacctacagcctgaccacccccgccagacagagacccgtgccccagcccagcagcgccagcctggacgagtacaccctgatgagagccaccttcagcggcagcgccggcagactgtgccccagctgccccgccagcagccccaaggtggcctaccacccctaccccgaggactacggcgacatcgagatcggcagccacagaagcagcagcagcaacctgggcgccgacgacggctacatgcccatgacccccggcgccgccctggccggcagcggcagcggcagctgcagaagcgacgactacatgcccatgagccccgccagcgtgagcgcccccaagcagatcctgcagcccagagccgccgccgccgccgccgccgccgtgcccagcgccggccccgccggccccgcccccaccagcgccgccggcagaaccttccccgccagcggcggcggctacaaggccagcagccccgccgagagcagccccgaggacagcggctacatgagaatgtggtgcggcagcaagctgagcatggagcacgccgacggcaagctgctgcccaacggcgactacctgaacgtgagccccagcgacgccgtgaccaccggcaccccccccgacttcttcagcgccgccctgcaccccggcggcgagcccctgagaggcgtgcccggctgctgctacagcagcctgcccagaagctacaaggccccctacacctgcggcggcgacagcgaccagtacgtgctgatgagcagccccgtgggcagaatcctggaggaggagagactggagccccaggccacccccggccccagccaggccgccagcgccttcggcgccggccccacccagcccccccaccccgtggtgcccagccccgtgagacccagcggcggcagacccgagggcttcctgggccagagaggcagagccgtgagacccaccagactgagcctggagggcctgcccagcctgcccagcatgcacgagtaccccctgccccccgagcccaagagccccggcgagtacatcaacatcgacttcggcgagcccggcgccagactgagcccccccgccccccccctgctggccagcgccgccagcagcagcagcctgctgagcgccagcagccccgccagcagcctgggcagcggcacccccggcaccagcagcgacagcagacagagaagccccctgagcgactacatgaacctggacttcagcagccccaagagccccaagcccggcgcccccagcggccaccccgtgggcagcctggacggcctgctgagccccgaggccagcagcccctacccccccctgccccccagacccagcgccagccccagcagcagcctgcagccccccccccccccccccgcccccggcgagctgtacagactgccccccgccagcgccgtggccaccgcccagggccccggcgccgccagcagcctgagcagcgacaccggcgacaacggcgactacaccgagatggccttcggcgtggccgccacccccccccagcccatcgccgccccccccaagcccgaggccgccagagtggccagccccaccagcggcgtgaagagactgagcctgatggagcaggtgagcggcgtggaggccttcctgcaggccagccagccccccgacccccacagaggcgccaaggtgatcagagccgacccccagggcggcagaagaagacacagcagcgagaccttcagcagcaccaccaccgtgacccccgtgagccccagcttcgcccacaaccccaagagacacaacagcgccagcgtggagaacgtgagcctgagaaagagcagcgagggcggcgtgggcgtgggccccggcggcggcgacgagccccccaccagccccagacagctgcagcccgccccccccctggccccccagggcagaccctggacccccggccagcccggcggcctggtgggctgccccggcagcggcggcagccccatgagaagagagaccagcgccggcttccagaacggcctgaactacatcgccatcgacgtgagagaggagcccggcctgcccccccagccccagcccccccccccccccctgccccagcccggcgacaagagcagctggggcagaaccagaagcctgggcggcctgatcagcgccgtgggcgtgggcagcaccggcggcggctgcggcggccccggccccggcgccctgccccccgccaacacctacgccagcatcgacttcctgagccaccacctgaaggaggccaccatcgtgaaggagtag

SEQ ID NO: 140553 - protein, 1382 aa, Artificial Sequence
  derived and/or modified sequence
MPAYFQRPENALKRANEFLEVGKKQPALDVLYDVMKSKKHRTWQKIHEPIMLKYLELCVDLRKSHLAKEGLYQYKNICQQVNIKSLEDVVRAYLKMAEEKTEAAKEESQQMVLDIEDLDNIQTPESVLLSAVSGEDTQDRTDRLLLTPWVKFLWESYRQCLDLLRNNSRVERLYHDIAQQAFKFCLQYTRKAEFRKLCDNLRMHLSQIQRHHNQSTAINLNNPESQSMHLETRLVQLDSAISMELWQEAFKAVEDIHGLFSLSKKPPKPQLMANYYNKVSTVFWKSGNALFHASTLHRLYHLSREMRKNLTQDEMQRMSTRVLLATLSIPITPERTDIARLLDMDGIIVEKQRRLATLLGLQAPPTRIGLINDMVRFNVLQYVVPEVKDLYNWLEVEFNPLKLCERVTKVLNWVREQPEKEPELQQYVPQLQNNTILRLLQQVSQIYQSIEFSRLTSLVPFVDAFQLERAIVDAARHCDLQVRIDHTSRTLSFGSDLNYATREDAPIGPHLQSMPSEQIRNQLTAMSSVLAKALEVIKPAHILQEKEEQHQLAVTAYLKNSRKEHQRILARRQTIEERKERLESLNIQREKEELEQREAELQKVRKAEEERLRQEAKEREKERILQEHEQIKKKTVRERLEQIKKTELGAKAFKDIDIEDLEELDPDFIMAKQVEQLEKEKKELQERLKNQEKKIDYFERAKRLEEIPLIKSAYEEQRIKDMDLWEQQEEERITTMQLEREKALEHKNRMSRMLEDRDLFVMRLKAARQSVYEEKLKQFEERLAEERHNRLEERKRQRKEERRITYYREKEEEEQRRAEEQMLKEREERERAERAKREEELREYQERVKKLEEVERKKRQRELEIEERERRREEERRLGDSSLSRKDSRWGDRDSEGTWRKGPEADSEWRRGPPEKEWRRGEGRDEDRSHRRDEERPRRLGDDEDREPSLRPDDDRVPRRGMDDDRGPRRGPEEDRFSRRGADDDRPSWRNTDDDRPPRRIADEDRGNWRHADDDRPPRRGLDEDRGSWRTADEDRGPRRGMDDDRGPRRGGADDERSSWRNADDDRGPRRGLDDDRGPRRGMDDDRGPRRGMDDDRGPRRGMDDDRGPRRGLDDDRGPWRNADDDRIPRRGAEDDRGPWRNMDDDRLSRRADDDRFPRRGDDSRPGPWRPLVKPGGWREKEKAREESWGPPRESRPSEEREWDREKERDRDNQDREENDKDPERERDRERDVDREDRFRRPRDEGGWRRGPAEESSSWRDSSRRDDRDRDDRRRERDDRRDLRERRDLRDDRDRRGPPLRSEREEVSSWRRADDRKDDRVEERDPPRRVPPPALSRDRERDRDREREGEKEKASWRAEKDRESLRRTKNETDEDGWTTVRR

SEQ ID NO: 140554 - protein, 1348 aa, Artificial Sequence
  derived and/or modified sequence
MKSKKHRTWQKIHEPIMLKYLELCVDLRKSHLAKEGLYQYKNICQQVNIKSLEDVVRAYLKMAEEKTEAAKEESQQMVLDIEDLDNIQTPESVLLSAVSGEDTQDRTDRLLLTPWVKFLWESYRQCLDLLRNNSRVERLYHDIAQQAFKFCLQYTRKAEFRKLCDNLRMHLSQIQRHHNQSTAINLNNPESQSMHLETRLVQLDSAISMELWQEAFKAVEDIHGLFSLSKKPPKPQLMANYYNKVSTVFWKSGNALFHASTLHRLYHLSREMRKNLTQDEMQRMSTRVLLATLSIPITPERTDIARLLDMDGIIVEKQRRLATLLGLQAPPTRIGLINDMVRFNVLQYVVPEVKDLYNWLEVEFNPLKLCERVTKVLNWVREQPEKEPELQQYVPQLQNNTILRLLQQVSQIYQSIEFSRLTSLVPFVDAFQLERAIVDAARHCDLQVRIDHTSRTLSFGSDLNYATREDAPIGPHLQSMPSEQIRNQLTAMSSVLAKALEVIKPAHILQEKEEQHQLAVTAYLKNSRKEHQRILARRQTIEERKERLESLNIQREKEELEQREAELQKVRKAEEERLRQEAKEREKERILQEHEQIKKKTVRERLEQIKKTELGAKAFKDIDIEDLEELDPDFIMAKQVEQLEKEKKELQERLKNQEKKIDYFERAKRLEEIPLIKSAYEEQRIKDMDLWEQQEEERITTMQLEREKALEHKNRMSRMLEDRDLFVMRLKAARQSVYEEKLKQFEERLAEERHNRLEERKRQRKEERRITYYREKEEEEQRRAEEQMLKEREERERAERAKREEELREYQERVKKLEEVERKKRQRELEIEERERRREEERRLGDSSLSRKDSRWGDRDSEGTWRKGPEADSEWRRGPPEKEWRRGEGRDEDRSHRRDEERPRRLGDDEDREPSLRPDDDRVPRRGMDDDRGPRRGPEEDRFSRRGADDDRPSWRNTDDDRPPRRIADEDRGNWRHADDDRPPRRGLDEDRGSWRTADEDRGPRRGMDDDRGPRRGGADDERSSWRNADDDRGPRRGLDDDRGPRRGMDDDRGPRRGMDDDRGPRRGMDDDRGPRRGLDDDRGPWRNADDDRIPRRGAEDDRGPWRNMDDDRLSRRADDDRFPRRGDDSRPGPWRPLVKPGGWREKEKAREESWGPPRESRPSEEREWDREKERDRDNQDREENDKDPERERDRERDVDREDRFRRPRDEGGWRRGPAEESSSWRDSSRRDDRDRDDRRRERDDRRDLRERRDLRDDRDRRGPPLRSEREEVSSWRRADDRKDDRVEERDPPRRVPPPALSRDRERDRDREREGEKEKASWRAEKDRESLRRTKNETDEDGWTTVRR

SEQ ID NO: 140555 - DNA, 5472 bp, Artificial Sequence
  derived and/or modified sequence
ggccggctgggcgcgggcgactgctggcgaggcgcgtgggaccttacgctggttccccttcgtctcctctcccggcccgggccactagagagttcgctgacgccgggtgagctgagcctgccgccaagatgccggcctattttcagaggccggaaaatgccctcaaacgcgccaacgaatttcttgaggttggcaaaaagcagcctgctctggatgttctttatgatgttatgaaaagtaaaaaacatagaacatggcaaaagatacacgaaccaattatgttgaaatacttggaactttgcgtggatcttcgcaagagccacttggcaaaggaggggttataccagtataagaacatttgtcaacaggtgaacataaaatctctggaggatgttgttagggcatatttgaaaatggcagaggaaaaaactgaagctgctaaagaagaatctcagcagatggtcttagatatagaggatctagataatattcaaactcctgagagtgttctcctaagtgctgtaagtggtgaagacactcaggatcgtactgacagattacttttaactccatgggttaaattcctgtgggagtcttacaggcagtgtttggaccttcttagaaacaattctagagtagagcgcctgtaccatgatattgcccagcaagctttcaaattctgcctccaatacacgcgtaaggctgaattccgtaaactgtgtgacaatttgagaatgcacttatcgcagattcagcgccaccataaccaaagtacggcaatcaatcttaataatccagagagccagtccatgcatttggaaaccagacttgttcagctggacagtgctatcagcatggaattgtggcaggaagcattcaaagctgtggaagatattcacgggctattctccttgtctaaaaaaccacctaaacctcagttgatggcaaattactataacaaagtctcaactgtgttttggaaatctggaaatgctctttttcatgcatctacactccatcgtctttaccatctctctagagaaatgagaaagaatctcacacaagatgagatgcaaagaatgtctactagagtccttttagccactctttccatccctattactcctgagcgtacggatattgctcgacttctggatatggatggcattatagttgaaaaacagcgtcgccttgcaacactactaggtcttcaagccccaccgacacgaattggccttattaatgatatggtcagatttaatgtactacaatatgttgtcccagaagtgaaagacctttacaattggcttgaagtagaatttaacccattaaaactctgtgagcgagtcacaaaggttctaaattgggttagggaacaacctgaaaaggaaccggaattgcagcagtatgtgccacaactgcaaaacaacaccatcctccgccttctgcagcaggtgtcacagatttatcagagcattgagttttctcgtttgacttctttggttccttttgttgatgctttccaactggaacgggccatagtagatgcagccaggcattgcgacttgcaggttcgtattgatcacacttctcggaccctgagttttggatctgatttgaattatgctactcgagaagatgctccgattggtcctcatttgcaaagcatgccttcagagcagataagaaaccagctgacagccatgtcctcagtacttgcaaaagcacttgaagtcattaaaccagctcatatactgcaagagaaagaagaacagcatcagttggctgtcactgcataccttaaaaattcacgaaaagagcaccagcggatcctggctcgccgccagacaattgaggagagaaaagagcgccttgagagtctgaatattcagcgtgagaaagaagaattggaacagagggaagctgaactccagaaagtgcggaaggctgaggaagagaggctgcgccaggaagcaaaggagagagagaaggagcgtatcttacaggaacatgaacaaatcaaaaagaaaactgtccgagagcgtttggagcagatcaagaaaacagaactgggtgccaaagcattcaaagatattgatattgaagaccttgaggaattggatccagattttatcatggctaaacaggttgaacaactggagaaagaaaagaaagaacttcaagaacgcctaaagaatcaagaaaagaagattgactattttgaaagagccaaacgtttggaagaaattcctttgataaagagcgcttacgaggaacagagaattaaagacatggatctgtgggagcaacaagaggaagaaagaattactacaatgcagctagaacgtgaaaaggctcttgaacataagaatcgaatgtcacgaatgcttgaagacagagatttattcgtaatgcgactcaaagctgcacggcagtctgtttatgaggaaaaacttaaacagtttgaagagcgattagcagaagaaaggcataatcgattggaagaacggaaaaggcagcgtaaagaagaacgcaggataacatactatagagaaaaagaagaggaggagcagagaagggcagaagaacaaatgctaaaagagcgggaagagagagagcgcgccgaacgagcaaaacgcgaggaagagctacgagagtatcaggagcgggtgaagaaattagaagaagtggaaaggaaaaaacgccaaagggagttggaaattgaagaacgagaacggcgtagagaggaagagagaagacttggcgatagttccctttctagaaaggactctcgttggggagatagagattcagaaggcacctggagaaaaggacctgaagcagattctgagtggagaagaggcccgccagagaaggagtggagacgtggagaagggcgagatgaggacaggtctcatagaagagatgaagagcggccccggcgtctgggggatgatgaagatagagagccctctcttagaccagacgatgatcgggttccccggcgtggcatggatgatgacagaggccctagacgtggtcctgaggaagataggttctctcgtcgtggggcagacgatgaccggccttcctggcgtaacacagatgatgacaggcctcccagacgaattgccgatgaagacaggggaaactggcgtcatgcggatgatgacagaccacctagacgaggactggatgaggacagaggaagctggcgaacagctgatgaggacagaggaccaagacgtgggatggatgatgaccgggggccgaggcgaggaggcgctgatgatgagcgatcatcctggcgtaatgctgatgatgaccggggtcccaggcgagggttggatgatgatcggggtcccaggcgaggcatggatgatgaccggggtcccaggcgaggcatggatgatgaccggggtcccaggcgaggcatggatgatgaccggggtcccaggcgagggttggatgatgatcgaggaccttggaggaacgccgatgatgacagaattcccaggcgtggtgcagaggatgacaggggcccttggagaaacatggatgatgatcgcctttcaagacgtgctgatgatgatcggtttcccagacggggtgatgactcaagacctggtccttggagaccattagtcaagccaggtggatggagagagaaagaaaaagccagagaggagagctggggtccacctcgagaatcaaggccatcagaagaacgtgaatgggacagagaaaaagaaagggacagagataatcaagatcgggaggagaatgacaaggaccctgagagagaaagggacagagagagagatgtggatcgagaggatcgcttcagaagacctagggatgaaggtggctggagaagaggaccagctgaggaatcttcaagctggagagactcaagtcgccgggacgatagggatagggatgaccgtcgccgtgagagggatgaccggcgtgatctaagagaaagacgagatctaagagacgacagggaccgaagaggacctccactcagatcagaacgtgaagaagtaagttcttggagacgtgctgatgacaggaaagatgaccgggtggaagagcgggaccctcctcgtcgagttcctcccccagctctttcaagagaccgagaaagagaccgagaccgagaaagagaaggtgaaaaagagaaggcctcatggagagctgagaaagatagggaatctctccgtcgtactaaaaatgagactgatgaagatggatggaccacagtacgacgttaagtctcaagataatggatttaaactggtgtcttaaataggtttgatcacattcaaggattattatacttgtgcttcaaccaatctaaattggattctttaatgttgtttcaccataacacaaaaagcatgaacttgtattaatcctatataatagattgatcatgcaccatatccacaggaggttggaaaaaccatgccattttctggaatttaagggtgttgcattatttcatcaatcatttgttgacaaaaaagaaaaactaaaaaataaatttaaaatgtgacccttcaggtattgagtaacacctttatcttggtatagaactgatactttttttttgattttgaaatatctgataataatttggaatgaagtaaggttctgttaaaatatatttgaagaccctttaaagcagtgaatctgaaacaattttcacacccttaagtggttgatacgtacctattttaggtattttgaggtatttaccataaactaaatttagaaattttttagattcacttgaagtaaacattacaaacattggatacggtggggttttctttagattttacttgagagaaggtgagtacaaagcaatttgcagttgttgtaatgacaagattactgcgcaagtgtgaatccaaacagtatagcttttaaattttaaagcatttggtaaattatcgctgagtttttttctgttgccaatagcaaactgcttttccattaatggagaattcatgcctttcaagcattttaaatatgacaatatttataaatgtatggtttggaggaatcgtttaaattctctttcctaattttctttcttttgaagatagattctttcaacaagtaatttgtagtaatgactgtgttgacttcaattttggagcgcagtagctatgttaaagatgaactatttggtctcattgaagccaacacagaacttgctgctgtgttttttcttcagtgataaataaaatacttacagaatttgttttagtgttgatttgtggttatagtattttgtttataatggtaagtttgcatattcagttgagttttttttacttgaatttttatcagtgccattaaatgtctgtgtttagtatcaatgaaaatgaacctaaatataacaaagaaagcatatgtggctaggatgtccccctaacatgtcttcctttgttaatgcag

SEQ ID NO: 140556 - DNA, 4486 bp, Artificial Sequence
  derived and/or modified sequence
agaccgatgcggcctgcccgccgctgtcccagccggtggttgggcatgggtttccttctcactctatcgactggggtctgggaggcgcgtagcccggaaccgtcgccccaggggcctttccttccccctgccgcctccggaatttcttgaggttggcaaaaagcagcctgctctggatgttctttatgatgttatgaaaagtaaaaaacatagaacatggcaaaagatacacgaaccaattatgttgaaatacttggaactttgcgtggatcttcgcaagagccacttggcaaaggaggggttataccagtataagaacatttgtcaacaggtgaacataaaatctctggaggatgttgttagggcatatttgaaaatggcagaggaaaaaactgaagctgctaaagaagaatctcagcagatggtcttagatatagaggatctagataatattcaaactcctgagagtgttctcctaagtgctgtaagtggtgaagacactcaggatcgtactgacagattacttttaactccatgggttaaattcctgtgggagtcttacaggcagtgtttggaccttcttagaaacaattctagagtagagcgcctgtaccatgatattgcccagcaagctttcaaattctgcctccaatacacgcgtaaggctgaattccgtaaactgtgtgacaatttgagaatgcacttatcgcagattcagcgccaccataaccaaagtacggcaatcaatcttaataatccagagagccagtccatgcatttggaaaccagacttgttcagctggacagtgctatcagcatggaattgtggcaggaagcattcaaagctgtggaagatattcacgggctattctccttgtctaaaaaaccacctaaacctcagttgatggcaaattactataacaaagtctcaactgtgttttggaaatctggaaatgctctttttcatgcatctacactccatcgtctttaccatctctctagagaaatgagaaagaatctcacacaagatgagatgcaaagaatgtctactagagtccttttagccactctttccatccctattactcctgagcgtacggatattgctcgacttctggatatggatggcattatagttgaaaaacagcgtcgccttgcaacactactaggtcttcaagccccaccgacacgaattggccttattaatgatatggtcagatttaatgtactacaatatgttgtcccagaagtgaaagacctttacaattggcttgaagtagaatttaacccattaaaactctgtgagcgagtcacaaaggttctaaattgggttagggaacaacctgaaaaggaaccggaattgcagcagtatgtgccacaactgcaaaacaacaccatcctccgccttctgcagcaggtgtcacagatttatcagagcattgagttttctcgtttgacttctttggttccttttgttgatgctttccaactggaacgggccatagtagatgcagccaggcattgcgacttgcaggttcgtattgatcacacttctcggaccctgagttttggatctgatttgaattatgctactcgagaagatgctccgattggtcctcatttgcaaagcatgccttcagagcagataagaaaccagctgacagccatgtcctcagtacttgcaaaagcacttgaagtcattaaaccagctcatatactgcaagagaaagaagaacagcatcagttggctgtcactgcataccttaaaaattcacgaaaagagcaccagcggatcctggctcgccgccagacaattgaggagagaaaagagcgccttgagagtctgaatattcagcgtgagaaagaagaattggaacagagggaagctgaactccagaaagtgcggaaggctgaggaagagaggctgcgccaggaagcaaaggagagagagaaggagcgtatcttacaggaacatgaacaaatcaaaaagaaaactgtccgagagcgtttggagcagatcaagaaaacagaactgggtgccaaagcattcaaagatattgatattgaagaccttgaggaattggatccagattttatcatggctaaacaggttgaacaactggagaaagaaaagaaagaacttcaagaacgcctaaagaatcaagaaaagaagattgactattttgaaagagccaaacgtttggaagaaattcctttgataaagagcgcttacgaggaacagagaattaaagacatggatctgtgggagcaacaagaggaagaaagaattactacaatgcagctagaacgtgaaaaggctcttgaacataagaatcgaatgtcacgaatgcttgaagacagagatttattcgtaatgcgactcaaagctgcacggcagtctgtttatgaggaaaaacttaaacagtttgaagagcgattagcagaagaaaggcataatcgattggaagaacggaaaaggcagcgtaaagaagaacgcaggataacatactatagagaaaaagaagaggaggagcagagaagggcagaagaacaaatgctaaaagagcgggaagagagagagcgcgccgaacgagcaaaacgcgaggaagagctacgagagtatcaggagcgggtgaagaaattagaagaagtggaaaggaaaaaacgccaaagggagttggaaattgaagaacgagaacggcgtagagaggaagagagaagacttggcgatagttccctttctagaaaggactctcgttggggagatagagattcagaaggcacctggagaaaaggacctgaagcagattctgagtggagaagaggcccgccagagaaggagtggagacgtggagaagggcgagatgaggacaggtctcatagaagagatgaagagcggccccggcgtctgggggatgatgaagatagagagccctctcttagaccagacgatgatcgggttccccggcgtggcatggatgatgacagaggccctagacgtggtcctgaggaagataggttctctcgtcgtggggcagacgatgaccggccttcctggcgtaacacagatgatgacaggcctcccagacgaattgccgatgaagacaggggaaactggcgtcatgcggatgatgacagaccacctagacgaggactggatgaggacagaggaagctggcgaacagctgatgaggacagaggaccaagacgtgggatggatgatgaccgggggccgaggcgaggaggcgctgatgatgagcgatcatcctggcgtaatgctgatgatgaccggggtcccaggcgagggttggatgatgatcggggtcccaggcgaggcatggatgatgaccggggtcccaggcgaggcatggatgatgaccggggtcccaggcgaggcatggatgatgaccggggtcccaggcgagggttggatgatgatcgaggaccttggaggaacgccgatgatgacagaattcccaggcgtggtgcagaggatgacaggggcccttggagaaacatggatgatgatcgcctttcaagacgtgctgatgatgatcggtttcccagacggggtgatgactcaagacctggtccttggagaccattagtcaagccaggtggatggagagagaaagaaaaagccagagaggagagctggggtccacctcgagaatcaaggccatcagaagaacgtgaatgggacagagaaaaagaaagggacagagataatcaagatcgggaggagaatgacaaggaccctgagagagaaagggacagagagagagatgtggatcgagaggatcgcttcagaagacctagggatgaaggtggctggagaagaggaccagctgaggaatcttcaagctggagagactcaagtcgccgggacgatagggatagggatgaccgtcgccgtgagagggatgaccggcgtgatctaagagaaagacgagatctaagagacgacagggaccgaagaggacctccactcagatcagaacgtgaagaagtaagttcttggagacgtgctgatgacaggaaagatgaccgggtggaagagcgggaccctcctcgtcgagttcctcccccagctctttcaagagaccgagaaagagaccgagaccgagaaagagaaggtgaaaaagagaaggcctcatggagagctgagaaagatagggaatctctccgtcgtactaaaaatgagactgatgaagatggatggaccacagtacgacgttaagtctcaagataatggatttaaactggtgtcttaaataggtttgatcacattcaaggattattatacttgtgcttcaaccaatctaaattggattctttaatgttgtttcaccataacacaaaaagcatgaacttgtattaatcctatataatagattgatcatgcaccatatccacaggaggttggaaaaaccatgccattttctggaatttaagggtgttgcattatttcatcaatcatttgttg

SEQ ID NO: 140557 - DNA, 4149 bp, Artificial Sequence
  derived and/or modified sequence
atgccagcttactttcagcggcccgagaacgcacttaaaagggcaaacgaattcctggaagtaggaaaaaaacagccagctctggatgttctttatgatgttatgaaaagcaaaaagcacaggacctggcaaaaaattcatgagccaattatgttgaaatatctggagctttgcgtggatctgcggaaaagccacctggccaaagagggcttataccagtataagaacatatgtcagcaagtaaacattaagagcttggaggacgtcgttcgggcttatctgaagatggccgaagagaagaccgaggcggctaaggaagagtcacagcagatggtgcttgatatcgaagatctcgacaacatccagacaccagagtctgtcctcctgtcagccgtgtctggtgaggacacacaggaccgcactgataggctcctgctgacgccgtgggtgaaattcctgtgggagtcttatcgccaatgccttgatctattgaggaacaattctagggtcgagcgactgtatcacgacatcgcacagcaggctttcaagttttgcctccagtacaccaggaaagcggagtttcgcaaactgtgtgacaacctcaggatgcatctgtcccagattcagaggcaccacaaccaatccaccgcaatcaacctgaacaacccagaaagtcagtcaatgcatctagagacaagactcgtccaactggactcagcaattagtatggagctgtggcaggaggcatttaaggctgtcgaggatattcatgggctgttttccttgtccaaaaagcctccaaagccacagctcatggccaactactataataaagtttccaccgttttctggaaaagtgggaatgcactgtttcacgcatctaccctgcaccgactgtatcatctgtcgagagaaatgaggaaaaacctaacccaagacgagatgcaacgcatgtctactcgggtcctcctggcaacattgtccattccaattaccccagagaggaccgacattgcaagattgcttgatatggacggcatcattgtcgagaaacaacgccgcctcgctaccctgctaggactgcaggcacccccaacccgaatcggcttgatcaatgatatggtgaggtttaatgtcttgcagtatgttgtcccagaagtaaaagatctgtacaactggctggaggtggaattcaacccgcttaagctatgtgagcgggtgacaaaagttttaaattgggtgcgggagcagcccgaaaaggaacctgagctccaacagtatgtgccacaactccaaaacaataccatcttgagactgttgcagcaagtgtctcagatctatcagagtatcgaattctcacgcctaacctctctcgtgcctttcgtagatgccttccagctggagagggctatcgtggatgccgctcgccactgtgacctgcaggtgaggatcgatcacaccagtagaactctatccttcggcagtgatctcaattacgccacccgcgaagatgcacctattggcccacacctgcagtcaatgcctagcgaacagattcgaaatcagctgacagcaatgagcagcgtgctggcaaaagcactggaggtgattaagcccgctcatatcctgcaggagaaggaggaacagcaccagctcgctgttactgcatacttgaagaattcacgcaaggaacatcaaaggatcttagcccgcagacaaacgattgaggagcggaaggaaaggcttgagtccctaaatatccagagagagaaggaggagcttgaacagagggaagctgagttgcagaaggtgcggaaggctgaggaagagcgcctcagacaagaagctaaggagagagaaaaggaacgcattctgcaggagcatgaacagatcaaaaagaaaacggtgcgcgaaagactcgagcagataaagaagactgagctgggagccaaagcgttcaaggatattgatattgaggacctggaggagcttgaccccgacttcattatggcaaaacaggttgagcaactcgaaaaggagaagaaggagctacaagaaaggctgaagaaccaggagaagaagattgattatttcgaaagggctaaaaggctggaagagataccgctcattaagagcgcttatgaagaacaacggatcaaagacatggatctctgggagcagcaagaagaggaacgcataaccacaatgcagttggagcgcgagaaggccctggagcataaaaatcgcatgagccgaatgctggaagatagagacttgtttgtgatgaggctcaaggccgcccgtcaaagcgtttatgaagaaaagttgaagcagtttgaggagcgtctggccgaggaacggcataaccggttagaagaacgaaagaggcaacgcaaggaagagcgtaggatcacatactacagggagaaggaggaggaggagcagaggcgagcagaggaacagatgctgaaagagcgcgaggagagggagcgcgccgaacgtgccaagagagaggaggaactgcgagagtaccaggagagagtcaaaaagcttgaagaggtggagaggaagaagcggcagagggaactggaaattgaagagagagaacgccgcagagaagaggagaggagactgggggatagttccctctctaggaaagacagccggtggggcgatcgtgactctgagggaacctggagaaaggggccagaagcagactctgaatggcggagagggcctcccgagaaggaatggagacggggcgagggtcgcgatgaggatagatctcacagacgggatgaggagaggccccggcggcttggcgacgacgaagatcgtgagccctcattacggcccgatgatgatcgcgttccacgcagaggcatggacgacgacaggggaccccgccgcggtcccgaggaagatagattttcccgcagaggggccgacgacgataggcccagttggcgcaacacggacgacgacaggccaccaaggaggatagcagacgaagacaggggcaactggagacacgcagatgacgaccgccctccacgcagaggcttggacgaagatcgcggttcgtggagaaccgcagacgaagatcggggaccacggcgagggatggatgacgatcgtgggccccgcagaggcggcgccgacgatgagcgcagctcatggaggaacgccgatgacgatcgaggcccaagaaggggactcgatgatgacagggggcctcgaaggggcatggacgatgatcggggtcccaggcgaggcatggatgacgataggggccccaggaggggaatggatgatgaccgtggtccgaggaggggccttgatgacgataggggaccatggcgtaacgctgacgatgaccgcataccccgcaggggggctgaggacgatagagggccttggaggaacatggatgacgataggctcagccgtcgcgcagatgatgaccgattccctaggcggggggacgatagccgaccgggcccatggcgaccgctggtgaagccaggaggctggagagagaaggagaaggctcgagaggagagttggggccctccacgggaatctagaccttccgaagagcgtgagtgggatcgtgagaaagagcgcgaccgcgacaatcaagatcgggaggagaacgataaggaccctgaacgggagagggacagagaacgagacgttgacagggaagatcgatttaggcggcctagggacgaaggaggctggaggcgcggccccgccgaagaatcaagctcctggagggactcttcccggcgggatgaccgcgacagggatgacagacgcagagagcgggatgaccgaagggatcttagggagcggcgggatctgagggacgatagagacagaagaggacctccactccggagtgagagagaggaggtaagttcttggcgaagagctgatgacaggaaggatgaccgggtcgaagagagggacccccctagacgggtaccccctcctgcactttcacgtgatcgtgaaagagatagagatagggaacgggagggtgaaaaagaaaaagcttcttggagagctgaaaaggaccgtgagtcactcagacggaccaaaaacgagaccgatgaggacggatggacaactgtgaggagatag

SEQ ID NO: 140558 - DNA, 4047 bp, Artificial Sequence
  derived and/or modified sequence
atgaaatccaagaagcacaggacctggcagaagattcatgagcccatcatgctgaaataccttgaattatgtgtggacttgcgcaagagtcacctcgcaaaggaaggcctttaccagtataaaaacatatgtcaacaggtaaatatcaaatccttagaagacgtggtgcgcgcctacctgaagatggccgaagaaaagaccgaggccgcaaaagaagaatcccagcagatggtgctagacatcgaagatttagacaacatccagaccccagaaagcgtcctgctgtccgccgtgtccggagaggacacacaggacagaaccgaccgtcttctcctgacaccctgggtgaagttcctgtgggaaagctacagacagtgtctggacctgctcaggaataatagtagggtcgagagactttatcatgacatcgcacagcaggccttcaagttttgcctgcagtatacaagaaaggctgagtttagaaaactgtgtgataaccttaggatgcacctctcccagatccagcggcaccacaaccagagcacagcgataaatttgaacaaccctgaatcacagtcgatgcacctggagacaagactagtgcagcttgattcagccatctctatggagctctggcaggaagcttttaaagcagtcgaagacattcatggacttttctcgctgagcaagaagccccctaagcctcagttaatggcaaattattataataaagtgtcgacggttttctggaagtccggtaatgctttatttcatgcatccacccttcaccgcctgtaccacctgagcagggaaatgagaaagaatctaacacaggatgagatgcagagaatgagtacaagggtactcctggctactctgtccataccgattactcccgagagaacagatatcgcacgcctgcttgatatggatgggataattgtcgagaagcagagacgtctcgctactctgctcgggctgcaggcaccccccacaagaatcggtctgattaacgatatggtccgattcaacgtcctccagtatgttgttcctgaagtaaaggatttgtataactggctagaagttgaattcaacccccttaaactgtgcgagagggtgacaaaagtgcttaattgggtgcgcgagcagcctgagaaagaaccagaactccaacaatacgtgccgcagctacagaacaacacaatactgcggctactgcagcaggtcagccagatttaccagtctatagagttttcccggctgacatccctggtgcccttcgtggacgcgttccaattggaacgcgctattgttgacgcagcccgccattgtgacctgcaggtgcggatcgaccataccagccgcaccctgtctttcgggtccgatctcaactatgctactcgagaagacgcacctatcggcccccacctccagtcaatgcccagcgagcagattcggaaccagctgacagccatgagcagcgttctggcgaaggccctcgaggttataaaacctgcacacattcttcaggaaaaagaggaacagcatcagctggccgtaaccgcttatttgaagaattctaggaaggagcaccagcgaatcctggccaggaggcagacaattgaagagaggaaagaaaggcttgaatctctgaacatccaaagggaaaaagaggagctggagcaacgcgaagccgagctgcagaaagtcaggaaggctgaggaggaaagattgcgacaagaggccaaggagagggagaaggagcggatccttcaggagcatgaacagattaagaaaaagacagtgagagagaggctcgaacagatcaagaagaccgagcttggggccaaggcttttaaagatatcgacatcgaggaccttgaagaattggatccagactttataatggccaaacaggtcgaacagctggaaaaagagaaaaaggagctgcaggaaagactaaaaaatcaggagaaaaagatcgattatttcgaacgcgcaaagcgtctggaggagatcccccttattaaatctgcctacgaggagcagaggataaaggacatggacctgtgggagcaacaggaagaagaacggataactactatgcagttggaacgggagaaagcactcgagcataagaaccgaatgtccaggatgcttgaggaccgcgatctcttcgtcatgaggttaaaagcagccagacagagtgtctatgaggagaaactgaaacagttcgaggagaggcttgccgaggaacgccacaatagactggaggaaaggaagcgccagcggaaggaggagagacgaataacgtattaccgtgagaaagaggaggaggaacagcggcgggccgaagaacagatgctgaaggagagagaggagagggaacgcgccgaacgcgcaaaacgagaagaagagttaagagaataccaagaaagagtcaaaaaactcgaggaagtggaacgcaagaagaggcaacgcgagctggagatcgaggagcgcgaacggaggcgcgaagaggagcgaagactcggcgatagctcactatctcggaaagattcgagatggggtgacagggacagcgaggggacttggagaaaaggtccagaggcggacagtgagtggcggaggggcccgccagagaaggaatggcgacgaggagaaggaagagacgaagaccgctcacaccgcagggacgaggaaaggccaaggagactgggagatgacgaggatcgtgaaccctcactgaggcccgacgacgaccgcgtgcctcggagaggaatggacgatgaccggggccctagacgaggcccagaggaggacagattctccagaagaggcgcagatgatgacagaccatcctggagaaataccgatgatgaccgccctccgaggcggatcgccgacgaagataggggtaattggagacatgctgatgacgacagacctccccggcgcggtttggatgaggatcgaggatcttggaggaccgccgacgaggacaggggtccacgcagggggatggacgacgatcgcgggcctaggagaggaggtgccgacgacgagcgttcatcctggcgaaatgccgacgacgacaggggcccgcggagaggtctcgatgatgaccggggacccaggcgcgggatggacgatgatagggggccgcggagagggatggatgacgacagaggtccacggcgtggaatggatgatgaccgtggcccccgccgaggcctagatgacgatcggggcccttggcgaaacgccgatgacgataggattcctcggagaggcgccgaagatgaccgggggccatggaggaacatggacgatgaccgcctgtcccgcagggccgacgacgaccgcttccctcggcggggcgatgattccagacctggtccttggcgccccttggttaagccaggagggtggagagaaaaagagaaagccagggaggagagctggggaccccctcgggaatcaaggccgtctgaggagcgggagtgggatcgcgagaaggaacgcgaccgagacaaccaggatcgagaggagaatgataaggaccctgaacgagagagagatagagaaagggacgtggatagagaagatcgcttcaggcggccaagggatgaaggtggttggagaagaggaccggccgaagagtcctcttcctggcgcgactccagccgaagagatgatcgggatcgagacgaccggcggcgagaacgagacgataggcgcgatttgagagaacggagggatcttcgtgacgaccgggataggcgtggaccacccctgaggtccgagagggaggaggttagttcatggcggagggcagacgaccgcaaggacgaccgggtcgaggagcgggaccccccccggcgggtcccccccccggcgctatctcgtgatagagagagagatagagatcgcgagagggagggagaaaaggaaaaggcttcctggagggccgagaaagaccgagagtccttgaggcggaccaaaaacgagaccgatgaggatgggtggacaacagtccgcagatag

SEQ ID NO: 140559 - DNA, 4149 bp, Artificial Sequence
  derived and/or modified sequence
atgcctgcctacttccagaggccagaaaatgccctgaagagggccaatgagttcctggaggtgggcaagaagcagcctgccctggatgtgctgtatgatgtgatgaagagcaagaagcacaggacctggcagaagatccacgagcccatcatgctgaagtacctggagctgtgtgtggacctgaggaagagccacctggccaaggagggcctgtaccagtacaagaacatctgccagcaggtgaacatcaagagcctggaggatgtggtgcgggcctacctgaagatggccgaggagaagacagaagctgccaaggaggagagccagcagatggtgctggacatcgaggacctggacaacatccagaccccagagagcgtgctgctgtctgctgtgtctggagaggacacccaggacagaacagaccggctgctgctgaccccctgggtgaagttcctgtgggagagctaccggcagtgcctggacctgctgaggaacaacagccgggtggagcggctgtaccatgacatcgcccagcaggccttcaagttctgcctgcagtacaccaggaaggccgagttcaggaagctgtgtgacaacctgaggatgcacctgagccagatccagaggcaccacaaccagagcacagccatcaacctgaacaaccctgagagccagagcatgcacctggagacccggctggtgcagctggacagcgccatctccatggagctgtggcaggaggccttcaaggctgtggaggacatccacggcctcttcagcctgagcaagaagccacccaagccccagctgatggccaactactacaacaaggtgtccacagtgttctggaagtctggaaatgccctcttccacgccagcaccctgcaccggctgtaccacctgagccgggagatgaggaagaacctgacccaggatgagatgcagaggatgagcaccagggtgctgctggccaccctgagcatccccatcaccccagagaggacagacatcgcccggctgctggacatggatggcatcatcgtggagaagcagaggcggctggccaccctgctgggcctgcaggccccacccacccgcatcggcctcatcaatgacatggtgcgcttcaacgtgctgcagtatgtggtgcctgaggtgaaggacctgtacaactggctggaggtggagttcaaccccctgaagctgtgtgagcgggtgaccaaggtgctgaactgggtgcgggagcagcctgagaaggagcctgagctgcagcagtatgtgccccagctgcagaacaacaccatcctgcggctgctgcagcaggtgtcccagatctaccagagcattgagttcagccggctgaccagcctggtgccctttgtggatgccttccagctggagcgggccatcgtggatgctgcccggcactgtgacctgcaggtgagaattgaccacaccagcaggaccctgagctttggaagtgacctgaactatgccaccagagaagatgcccccatcggcccccacctgcagagcatgcccagcgagcagatccggaaccagctgacagccatgagctctgtgctggccaaggccctggaggtgatcaagccagcccacatcctgcaggagaaggaggagcagcaccagctggccgtgacagcctacctgaagaacagcaggaaggagcaccagaggatcctggcccggcggcagaccatcgaggagaggaaggagcggctggagagcctgaacatccagcgggagaaggaggagctggagcagcgggaggccgagctgcagaaggtgaggaaggccgaggaggagcggctgcggcaggaggccaaggagcgggagaaggagcgcatcctgcaggagcacgagcagatcaagaagaagacagtgcgggagcggctggagcagatcaagaagacagagctgggcgccaaggccttcaaggacatcgacatcgaggacctggaggagctggaccctgacttcatcatggccaagcaggtggagcagctggagaaggagaagaaggagctgcaggagcggctgaagaaccaggagaagaagattgactactttgagcgggccaagaggctggaggagatccccctcatcaagagcgcctatgaggagcagaggatcaaggacatggacctgtgggagcagcaggaggaggagcgcatcaccaccatgcagctggagcgggagaaggccctggagcacaagaacaggatgagcaggatgctggaggaccgggacctgtttgtgatgaggctgaaggccgcccggcagagcgtgtatgaggagaagctgaagcagtttgaggagcggctggccgaggagcggcacaaccggctggaggagaggaagaggcagaggaaggaggagcggcgcatcacctactaccgggagaaggaggaggaggagcagaggagagctgaggagcagatgctgaaggagcgggaggagcgggagcgggcagagcgggccaagcgggaggaggagctgcgggagtaccaggagcgggtgaagaagctggaggaggtggagaggaagaagaggcagcgggagctggagattgaggagcgggagaggagaagagaggaggagcggcggctgggggacagcagcctgagcaggaaggacagccgctggggagaccgggacagcgagggcacctggaggaaaggacctgaggccgacagcgagtggaggcggggccccccagagaaggagtggaggagaggagagggcagagatgaggacaggagccacagaagagatgaggagcggccccggcggctgggagatgatgaggaccgggagcccagcctgcggccagatgatgacagagtgccccggcggggcatggatgatgaccggggcccccggcggggccctgaggaggaccgcttcagcagaagaggagcagatgatgaccggcccagctggaggaacacagatgatgaccggcccccaagaagaattgctgatgaggaccggggcaactggaggcatgctgatgatgaccggcccccaagaagaggcctggatgaggaccggggctcctggaggacagcagatgaggaccggggcccccggcggggcatggatgatgaccggggccccaggagaggaggagcagatgatgagaggagctcctggagaaatgctgatgatgaccggggcccccggcggggcctggatgatgaccggggcccccggcggggcatggatgatgaccggggcccccggcggggcatggatgatgaccggggcccccggcggggcatggatgatgaccggggcccccggcggggcctggatgatgaccggggcccctggagaaatgctgatgatgaccgcatccccaggagaggagcagaagatgaccggggcccctggaggaacatggatgatgaccggctgagccggcgggcagatgatgaccgcttccccaggagaggagatgacagccggcccggcccctggaggcccctggtgaagccaggcggctggagggagaaggagaaggcccgggaggagagctggggccccccccgggagagccggcccagcgaggagcgggagtgggaccgggagaaggagcgggaccgggacaaccaggaccgggaggagaatgacaaggaccctgagcgggagcgggaccgggagagagatgtggaccgggaggaccgcttccggcggcccagagatgagggcggctggaggcggggccctgctgaggagagcagctcctggagggacagcagcagaagagatgaccgggacagagatgacagaagaagagaaagagatgaccggcgggacctgcgggagcggcgggacctgagagatgaccgggacagaagaggcccccccctgcggtctgagcgggaggaggtgtcctcctggaggagagcagatgacaggaaggatgacagagtggaggagcgggaccccccccggcgggtgcccccaccagccctgagccgggaccgggagcgggaccgggaccgggagcgggagggggagaaggagaaggcctcctggagggctgagaaggaccgggagagcctgcggaggaccaagaatgaaacagatgaagatggctggaccaccgtgagaagatag

SEQ ID NO: 140560 - DNA, 4047 bp, Artificial Sequence
  derived and/or modified sequence
atgaagagcaagaagcacaggacctggcagaagatccacgagcccatcatgctgaagtacctggagctgtgtgtggacctgaggaagagccacctggccaaggagggcctgtaccagtacaagaacatctgccagcaggtgaacatcaagagcctggaggatgtggtgcgggcctacctgaagatggccgaggagaagacagaagctgccaaggaggagagccagcagatggtgctggacatcgaggacctggacaacatccagaccccagagagcgtgctgctgtctgctgtgtctggagaggacacccaggacagaacagaccggctgctgctgaccccctgggtgaagttcctgtgggagagctaccggcagtgcctggacctgctgaggaacaacagccgggtggagcggctgtaccatgacatcgcccagcaggccttcaagttctgcctgcagtacaccaggaaggccgagttcaggaagctgtgtgacaacctgaggatgcacctgagccagatccagaggcaccacaaccagagcacagccatcaacctgaacaaccctgagagccagagcatgcacctggagacccggctggtgcagctggacagcgccatctccatggagctgtggcaggaggccttcaaggctgtggaggacatccacggcctcttcagcctgagcaagaagccacccaagccccagctgatggccaactactacaacaaggtgtccacagtgttctggaagtctggaaatgccctcttccacgccagcaccctgcaccggctgtaccacctgagccgggagatgaggaagaacctgacccaggatgagatgcagaggatgagcaccagggtgctgctggccaccctgagcatccccatcaccccagagaggacagacatcgcccggctgctggacatggatggcatcatcgtggagaagcagaggcggctggccaccctgctgggcctgcaggccccacccacccgcatcggcctcatcaatgacatggtgcgcttcaacgtgctgcagtatgtggtgcctgaggtgaaggacctgtacaactggctggaggtggagttcaaccccctgaagctgtgtgagcgggtgaccaaggtgctgaactgggtgcgggagcagcctgagaaggagcctgagctgcagcagtatgtgccccagctgcagaacaacaccatcctgcggctgctgcagcaggtgtcccagatctaccagagcattgagttcagccggctgaccagcctggtgccctttgtggatgccttccagctggagcgggccatcgtggatgctgcccggcactgtgacctgcaggtgagaattgaccacaccagcaggaccctgagctttggaagtgacctgaactatgccaccagagaagatgcccccatcggcccccacctgcagagcatgcccagcgagcagatccggaaccagctgacagccatgagctctgtgctggccaaggccctggaggtgatcaagccagcccacatcctgcaggagaaggaggagcagcaccagctggccgtgacagcctacctgaagaacagcaggaaggagcaccagaggatcctggcccggcggcagaccatcgaggagaggaaggagcggctggagagcctgaacatccagcgggagaaggaggagctggagcagcgggaggccgagctgcagaaggtgaggaaggccgaggaggagcggctgcggcaggaggccaaggagcgggagaaggagcgcatcctgcaggagcacgagcagatcaagaagaagacagtgcgggagcggctggagcagatcaagaagacagagctgggcgccaaggccttcaaggacatcgacatcgaggacctggaggagctggaccctgacttcatcatggccaagcaggtggagcagctggagaaggagaagaaggagctgcaggagcggctgaagaaccaggagaagaagattgactactttgagcgggccaagaggctggaggagatccccctcatcaagagcgcctatgaggagcagaggatcaaggacatggacctgtgggagcagcaggaggaggagcgcatcaccaccatgcagctggagcgggagaaggccctggagcacaagaacaggatgagcaggatgctggaggaccgggacctgtttgtgatgaggctgaaggccgcccggcagagcgtgtatgaggagaagctgaagcagtttgaggagcggctggccgaggagcggcacaaccggctggaggagaggaagaggcagaggaaggaggagcggcgcatcacctactaccgggagaaggaggaggaggagcagaggagagctgaggagcagatgctgaaggagcgggaggagcgggagcgggcagagcgggccaagcgggaggaggagctgcgggagtaccaggagcgggtgaagaagctggaggaggtggagaggaagaagaggcagcgggagctggagattgaggagcgggagaggagaagagaggaggagcggcggctgggggacagcagcctgagcaggaaggacagccgctggggagaccgggacagcgagggcacctggaggaaaggacctgaggccgacagcgagtggaggcggggccccccagagaaggagtggaggagaggagagggcagagatgaggacaggagccacagaagagatgaggagcggccccggcggctgggagatgatgaggaccgggagcccagcctgcggccagatgatgacagagtgccccggcggggcatggatgatgaccggggcccccggcggggccctgaggaggaccgcttcagcagaagaggagcagatgatgaccggcccagctggaggaacacagatgatgaccggcccccaagaagaattgctgatgaggaccggggcaactggaggcatgctgatgatgaccggcccccaagaagaggcctggatgaggaccggggctcctggaggacagcagatgaggaccggggcccccggcggggcatggatgatgaccggggccccaggagaggaggagcagatgatgagaggagctcctggagaaatgctgatgatgaccggggcccccggcggggcctggatgatgaccggggcccccggcggggcatggatgatgaccggggcccccggcggggcatggatgatgaccggggcccccggcggggcatggatgatgaccggggcccccggcggggcctggatgatgaccggggcccctggagaaatgctgatgatgaccgcatccccaggagaggagcagaagatgaccggggcccctggaggaacatggatgatgaccggctgagccggcgggcagatgatgaccgcttccccaggagaggagatgacagccggcccggcccctggaggcccctggtgaagccaggcggctggagggagaaggagaaggcccgggaggagagctggggccccccccgggagagccggcccagcgaggagcgggagtgggaccgggagaaggagcgggaccgggacaaccaggaccgggaggagaatgacaaggaccctgagcgggagcgggaccgggagagagatgtggaccgggaggaccgcttccggcggcccagagatgagggcggctggaggcggggccctgctgaggagagcagctcctggagggacagcagcagaagagatgaccgggacagagatgacagaagaagagaaagagatgaccggcgggacctgcgggagcggcgggacctgagagatgaccgggacagaagaggcccccccctgcggtctgagcgggaggaggtgtcctcctggaggagagcagatgacaggaaggatgacagagtggaggagcgggaccccccccggcgggtgcccccaccagccctgagccgggaccgggagcgggaccgggaccgggagcgggagggggagaaggagaaggcctcctggagggctgagaaggaccgggagagcctgcggaggaccaagaatgaaacagatgaagatggctggaccaccgtgagaagatag

SEQ ID NO: 140561 - DNA, 4149 bp, Artificial Sequence
  derived and/or modified sequence
atgcccgcctacttccagcggcccgagaacgccctgaagcgggccaatgaattcttggaggtaggtaaaaaacagccggccctggatgtcctctatgacgtcatgaaatcaaaaaagcatcgtacctggcagaagatccacgagcctatcatgcttaagtatctggagctgtgcgtcgaccttcggaagagccatctcgccaaggaaggcttgtatcaatataagaatatatgccagcaggttaatattaaatccctggaggatgttgttcgtgcatacctgaagatggcggaggagaagaccgaagccgcgaaggaggaaagccagcagatggtcctggatatcgaagacctagacaacattcagacacctgagtcagtattgcttagcgctgtcagtggggaagacactcaagatagaaccgacagactgctgctgactccatgggtgaaatttctgtgggagagctaccggcaatgcctcgaccttttgaggaacaatagccgagtggagaggctttatcacgacatcgcacagcaggctttcaaattctgtctgcagtatacgcggaaggccgagttcagaaaattgtgcgataacctgagaatgcatctgagccagatacaacgacatcacaaccagtccacggccattaatctcaataaccccgagagccaatccatgcacctagagacccgccttgtgcagctcgacagcgcaatctcaatggagctgtggcaggaggcttttaaagccgttgaggatattcatggacttttcagcttgtctaaaaagccccccaagccccagctgatggccaactattataacaaagtctcaaccgtcttctggaagtcaggaaacgctctgttccacgcctccaccctgcatagactctaccatctgagcagggaaatgcgaaagaatctcacccaagatgaaatgcagagaatgtccacccgcgtgctgctggcgacactctccatcccaatcaccccggagcggacggacattgccagactgctggacatggatggcattattgtggagaaacagaggaggctggcaactctcctgggcctccaagctccgcctactcggattggcctcatcaatgacatggtgcgctttaatgtacttcagtatgtggtccccgaagtgaaagacctttacaactggttggaggtggaatttaatccactaaagctgtgtgagagggtgaccaaggttctgaactgggtcagagaacagccagagaaggaacccgagttacagcagtacgtgccacaacttcagaataataccatccttcgcttactccagcaagtttcccaaatctaccagtccatcgaattcagccggcttacttctctggtcccattcgtagacgccttccagctggaacgcgccatcgtcgacgccgcgcggcattgtgacttgcaggttcggatagaccacacttcccgcactttgagctttggctctgacctgaactatgcgacccgagaggacgctccaataggcccccacctgcagtccatgccttcagaacagatacgaaaccaactgaccgcgatgagttccgtgctggccaaagctctggaggtgataaaaccagcccacatactgcaggagaaagaagagcagcaccagcttgcagtgaccgcctacctgaaaaacagtaggaaagagcatcagaggatcttagctcggcgacagacaatcgaggagcggaaggaaaggctcgaatccctcaatatccagcgagagaaagaagagttggagcagagagaagccgagttgcaaaaagttcgaaaggcagaggaggagcgtttgcgccaagaggccaaggagagagagaaagagcgtatactccaggagcacgagcagatcaagaaaaaaaccgtgcgagagcgcctggagcaaatcaagaaaactgagctcggggctaaggccttcaaggatattgatattgaagatctggaggaacttgatcctgatttcataatggcaaagcaggtggagcagttggagaaagagaaaaaagaactgcaggaacgactgaaaaatcaggagaagaaaatcgactacttcgaacgtgcaaagaggcttgaagaaatacccctgatcaagtcagcctatgaagagcagcgtataaaagacatggatctgtgggaacagcaggaggaggaacgcattactacaatgcaactcgaaagagagaaggccctggaacacaaaaaccgtatgagcaggatgctggaggaccgcgatctcttcgtcatgagactgaaggctgctaggcagagcgtgtacgaagagaaactgaagcagtttgaggagcgcctggccgaggagaggcataacaggctggaggagaggaagagacagcgcaaagaagagcgccgcatcacatattaccgcgagaaagaggaggaggaacagaggcgggccgaagagcagatgttgaaagaacgcgaagaacgggagagagccgagagggccaagagggaggaagagctacgggagtaccaggagcgagtcaagaaacttgaggaagtggagcgcaagaagagacagagagagctggagattgaagagcgcgagcgcagaagggaggaagagagacgcttgggagactcaagcctgtcccgaaaggatagtagatggggcgaccgagacagcgaagggacctggcgaaagggtcccgaggctgatagtgaatggcgaagaggaccgcccgagaaggaatggcgtcgtggcgagggtcgggatgaggaccgaagccaccgacgcgacgaggagcgtccccgtcggctgggtgatgacgaggatcgggagccctccctgcgccccgacgacgatcgcgtgccgcggcgtggtatggatgacgacagaggcccgcgtcgtggccctgaggaggatcgcttcagcagaaggggcgccgacgatgatcgcccatcatggaggaatacagatgatgacaggcctccacgaaggattgcagacgaagatagggggaattggagacacgccgatgatgataggcctcccagaaggggcctggatgaggatcggggcagctggaggaccgcggacgaggacagaggccccagacgcggaatggatgacgaccgcggaccaaggcggggtggcgccgacgatgagcgctcctcttggagaaacgccgacgacgacagaggtccgagacgcggacttgatgacgatcgcgggcccaggaggggaatggacgacgataggggtcctagaaggggcatggacgacgaccggggcccccgaaggggaatggacgacgatagggggcctcggcggggtctcgacgatgatagaggcccttggagaaacgccgacgacgataggatacccagaagaggagccgaggacgaccggggtccttggagaaacatggacgatgatcggctcagccggcgggcagatgacgatcggtttccgcggcggggcgatgactcccgccccgggccatggcggcccctggtcaagcctggagggtggcgcgaaaaagagaaagcccgcgaggagtcttggggaccacctagggagtcacgccccagtgaggagagggagtgggatagggagaaggagagagacagggacaaccaggacagagaggagaatgataaagatcccgagcgcgaacgagaccgcgaaagagacgtcgacagagaggaccggttcagaaggccgcgcgatgagggtggatggcggcgcggcccagccgaagagagttctagctggcgtgattcctcgcgccgggacgaccgggaccgagatgatcgccgcagggaacgagacgaccgtcgagaccttcgtgaaagacgagacctgcgcgatgacagggataggaggggcccaccactcagatccgagagagaagaagttagcagttggcgaagagctgacgataggaaagacgatcgggtggaggaacgcgatccccctcggcgtgtgcctccaccagctttgtcccgcgatagggaacgcgaccgcgacagagaaagggagggagagaaagaaaaagcgtcatggcgggccgagaaagaccgggagtctcttcgccggactaagaacgaaacggacgaagacggatggacaacagtgcgccgctag

SEQ ID NO: 140562 - DNA, 4047 bp, Artificial Sequence
  derived and/or modified sequence
atgaagagcaagaagcaccggacctggcagaagatccacgagcccattatgctgaagtatctggaactctgcgtagatctccggaagtctcatttggccaaagaggggctatatcagtacaagaatatttgtcagcaggtcaatatcaagtctctggaggacgtcgttcgggcatacctgaagatggctgaggaaaagacggaagcggccaaagaggaatcacagcagatggtcttagatatcgaagatttagacaacattcaaactcctgagagcgtgttgctgagtgctgtgagtggggaagatactcaagacagaacggatagactgctgctcactccatgggtcaagtttctgtgggaaagttaccgacagtgcctggacttgctgcgcaacaactcgcgggtggaacgcctgtaccatgacatcgcccagcaggcttttaagttttgtctgcagtataccaggaaggctgagttcagaaaactgtgtgataacctgagaatgcacttatcacagatccaacggcaccataaccaaagtacagcaatcaatctgaataatccagagagtcaatcgatgcacctcgagactagattggtacagcttgatagtgctatttcaatggagctgtggcaggaggcatttaaggccgtcgaggatatacatggccttttttcactcagcaaaaaaccacctaagccacaattaatggccaactactacaacaaggtgtctactgttttttggaaatccggaaacgccctctttcacgctagcacactgcaccgactctatcatttgtcccgagagatgcgcaagaacttgacccaggacgaaatgcagagaatgagcacaagagtgctgctggctacactaagtattcctatcacacccgagcgcactgatattgccagacttttggacatggatgggatcattgtggaaaaacaacgaagactcgccaccctccttgggctccaggccccaccgactcgcatcggcctaataaatgacatggtgagatttaacgtcctgcagtacgtggtccccgaggtgaaggatctatataattggctcgaggtggagttcaacccactgaagctttgtgagcgagtgactaaggtcctcaattgggtgagagagcagcccgagaaggaacccgagctgcagcagtatgtgccccagctgcaaaacaatacaattctcagacttctacaacaggtcagccagatctaccaatccatcgaattcagccgtctcacctcactggtgccattcgtcgatgcttttcagctggagcgcgcaatagtggatgctgcgagacattgcgaccttcaggtaagaattgaccatactagcagaacactgagcttcggctctgatttgaattatgccaccagagaggatgcaccaatcggaccacatttgcagagcatgccctcagagcagattagaaaccagcttactgcgatgtccagcgtgctcgccaaggcattagaggtgatcaaacccgcccatattctacaggagaaagaggagcagcaccagttagcggtaaccgcttatttaaaaaactcaagaaaagaacatcagaggatcctcgccagacgacagaccatagaagagcgcaaagaaaggttggagagcctcaacatacagagagagaaggaggagctcgagcagcgtgaagctgaactgcagaaggtgaggaaggccgaggaggaaagactccggcaagaggccaaggagcgcgagaaagagcgaatccttcaggaacacgagcagatcaagaagaagactgtgagggaacggttagagcaaattaaaaagacagaacttggtgctaaagctttcaaagatattgacatcgaagacttggaggaactcgacccggactttatcatggccaagcaggtggaacaacttgagaaggagaaaaaggagctgcaggaacgcctgaaaaaccaggaaaaaaaaattgattattttgagcgggcaaaaaggttggaagagatacctctgattaaatcagcctatgaagagcaaaggatcaaggacatggatctttgggaacagcaagaagaggagaggatcacaactatgcagcttgaacgtgagaaggcactggaacacaagaatcgcatgtctaggatgctggaagaccgagaccttttcgtcatgaggctgaaagcggcgcggcaatccgtttatgaggagaaactgaaacagttcgaagaacgtctggctgaggagaggcacaatcggctcgaggagcggaagcgtcagagaaaagaggagcggcgcattacttattatagagagaaggaagaggaagaacagagaagggcagaggagcagatgttgaaggaaagagaagagagagagcgtgcagaacgggcaaagagggaagaggaactccgagagtaccaagaacgagtcaagaaactggaagaggtggaaagaaaaaagcgccaaagagagctggagattgaagaaagagagcggcgacgcgaggaagaacggcgactcggagactccagcctgtcaaggaaggacagtcggtggggcgatcgtgattctgaagggacttggcgcaagggcccagaagccgactcagaatggaggcgtggtccacctgaaaaggaatggcggcggggggagggaagagatgaagatcggtcacaccggagagatgaggagcggcccagacgcctaggagacgatgaagaccgcgaaccctctcttcggccagacgatgatcgggttccgcgtaggggaatggacgacgacagaggcccgcggcggggcccagaagaagaccgattttctcgacggggggcggatgatgatcggccgagctggaggaatacagacgacgatcgacccccccggagaattgcagacgaagatcgcggtaattggcggcatgccgatgatgatcgtcctccccgcaggggactagatgaagatcgaggctcttggaggaccgcagatgaggaccgcggccctagacgcgggatggatgacgatagaggaccgcgcagggggggggcagatgacgagcgctcctcctggcgcaatgcagatgatgatagaggtcctcggagaggtctcgatgacgataggggcccccggcgtgggatggacgacgaccgggggccccggcggggtatggacgatgatcggggtccacggaggggaatggacgatgaccggggacctagacgaggactcgacgacgatcgaggcccttggaggaatgccgatgatgataggatcccccgtcgaggtgccgaagacgaccgaggaccttggaggaatatggacgacgacagactctctcgaagggccgatgacgacagattcccacgccggggagacgattcacggcccggcccctggagaccactagttaaacccggcggctggcgggagaaagagaaggcccgcgaggagagttggggccctccccgcgagtctcgtccttccgaagagagggagtgggacagagaaaaggaaagggacagagataaccaggatcgcgaggagaatgataaggaccccgaaagggagagggacagggagcgagatgtagaccgtgaggatcgcttccgcagaccaagggacgaaggaggctggcgcaggggacccgccgaagagagctcttcttggagggattcgagccgtagggatgatagggacagagatgatcggcgaagagagcgcgacgacagacgggacctcagggagcggcgggacctgagggacgatcgtgatcgaagagggccacccctacggtccgaacgcgaggaggtgagctcctggcggcgcgccgacgatcgaaaagacgatcgggtagaggagagagaccctccaaggagagtcccaccaccagcgttgtcccgtgatagggagcgggatagggaccgggagagagaaggggagaaggagaaggcttcttggcgagccgagaaagaccgggagtctctgcggagaactaagaatgagactgacgaggatggctggactaccgtgcgccgatag

SEQ ID NO: 140563 - DNA, 4149 bp, Artificial Sequence
  derived and/or modified sequence
atgccggcttacttccaacggccagagaatgccctcaaaagggctaacgagttcctcgaggtcggcaagaagcagccagccctcgacgttctatatgatgtaatgaaatctaagaagcatcgtacatggcagaagattcacgagccaattatgctgaaatacctggaactgtgtgtggatctccggaaatcacacctcgcaaaggagggtctgtatcagtataaaaatatatgccagcaggtgaacatcaagagtctggaggatgttgtgagagcttacctgaaaatggcggaggagaagaccgaggctgccaaggaggaatcacaacagatggtactggacatcgaagatttggacaatatccaaactccagagagcgttctcctgtctgccgttagcggtgaggatacacaggatcgcaccgatcgcctactcctcaccccctgggttaaattcctgtgggaatcctacaggcagtgtctagatctgcttcgcaacaactctcgcgtcgagcgcctgtaccacgacatagcccagcaagcgttcaagttttgcctccagtatacacgcaaggccgagttcagaaagttgtgtgacaacctgcgcatgcacttaagccagatccagcgacaccacaaccagagcaccgctatcaacctcaacaacccagagtcacagtctatgcatcttgagacgcgtctggtgcaactggattccgctatctccatggaattgtggcaggaagcctttaaggcagtcgaagacattcacggcttgttttccctgtcgaagaagcccccaaagccgcagctcatggctaactactacaacaaagtgagtactgtattttggaaatccggaaatgccctcttccacgcatccactctgcaccggttataccacctgagcagggaaatgcggaagaatctgacgcaagacgaaatgcagaggatgagtacacgggttctgctcgccacgttaagcatcccaatcaccccagaaagaaccgacatcgctaggctgctggacatggacggcataatcgtcgagaagcagcgtaggctggcaactttgcttggcttacaggcccctcccacccgcatcggcctcatcaatgatatggttaggttcaacgttctgcagtacgtcgtgccagaggttaaggatctctataactggctagaagtagagtttaatcctctgaaactgtgtgagagggtcactaaggtgctcaactgggtgagagagcagcccgagaaagagcccgagctgcagcagtacgtcccgcaattgcagaataatactatcctccgcctgctgcaacaggtgtcccagatataccagagcatcgagtttagccgactaacatccctggtgccattcgtagacgctttccagctggagcgcgctatcgtcgatgcggcaagacattgtgacctacaggttcggatcgatcatacgtcacggactctgtcttttggaagtgacctgaactatgctacgcgggaggacgcgcctatcggacctcacctgcaatctatgccgtcagagcagattaggaatcagctgaccgccatgagcagcgttctggccaaggctctcgaggtgatcaagcccgctcacattctgcaggaaaaggaagaacaacaccagctggctgtgaccgcatatcttaagaattctcggaaggagcaccagaggatcctcgcaaggcgtcagaccattgaagaacggaaagaaagactcgaatctctgaatattcagcgagagaaggaagagttggagcagcgtgaggctgaactgcagaaggtgcgaaaagccgaggaggagagactaagacaggaagctaaagaaagagaaaaggaacgtattctgcaggagcatgaacagattaaaaaaaagaccgtgcgagagcgcctggagcagattaagaaaacagagttgggagctaaggctttcaaagatatcgatatcgaggatctcgaggaactggatcctgatttcataatggctaagcaggtggaacagctggagaaggaaaaaaaagagctccaggaacgccttaagaatcaagaaaagaaaattgactattttgagagggcgaaacggctagaggagatccccctgattaaaagtgcctatgaggagcagcgcattaaggatatggacctatgggagcagcaggaagaagagagaataactacaatgcagttggagcgcgaaaaggcccttgagcacaaaaatagaatgtcgagaatgctggaggaccgggatctgtttgtgatgcggttgaaagccgctcggcagtcagtgtacgaagagaagctgaaacaattcgaagaaagacttgcggaggaaagacataaccgcctcgaagagagaaaaagacagcgcaaggaggaaaggcggatcacttactaccgggagaaggaagaggaagagcagaggcgggcagaagaacagatgctcaaggagcgggaggagagggagagggctgaaagagccaagcgcgaggaggagttgcgtgagtaccaggaacgcgttaagaagttggaagaggtggaacgcaagaagcgacagcgcgagctagagatcgaagaaagagagcgaagaagggaggaggagaggaggctgggggattcttctctctcccgtaaggatagccggtggggggaccgtgattccgagggtacgtggcggaagggcccagaagccgacagcgagtggaggagggggcctccagaaaaagaatggcgcagaggggaagggagagatgaggatcgctctcacagacgcgacgaagagaggcccaggcgtctgggcgacgatgaggatagagagccctcccttcggccagacgatgatcgcgtgccacggagaggcatggacgacgaccgagggcctcggagaggcccagaggaggacagattctctcgacggggagctgacgatgatcgaccaagttggagaaatactgatgacgacagacctccacgacggattgcagacgaggatagaggcaattggcgccacgcagacgacgaccgtccaccacgaagaggcctggatgaggacagaggttcatggcgaaccgcagacgaggatcgagggcctcgcaggggcatggacgatgatcgcggtccaagacgaggtggggcagatgatgaacggagttcctggagaaacgctgacgatgacagaggccctcggcgaggtctggatgacgatcggggaccgcgaagaggcatggacgatgaccgagggcctcgcagaggaatggacgatgatcgaggcccacggcgaggcatggatgacgatcggggaccgagaagaggcctggatgatgatcgcggaccttggaggaacgccgacgacgacaggatccctagacgaggagcagaggacgaccgaggcccatggagaaacatggacgatgacagactcagtagacgagccgatgatgaccgctttccaagaaggggtgatgattctagacccggaccatggaggcccctggtcaagcccggaggctggcgtgaaaaagagaaggcaagggaggagtcttggggccctcccagggaatcccgcccttctgaggagcgtgagtgggaccgcgaaaaggaaagagatcgcgataaccaggaccgagaagagaacgataaagatcctgaacgtgaacgggacagagaaagggacgtggacagagaggataggttccgtcgcccacgtgacgaaggtggttggcgaagagggcctgccgaagagagctcaagctggcgagattcgtcgcgccgtgacgaccgggatagagacgatcgcaggcgggaacgtgacgaccggagagacttgcgtgagagacgggatctgagggacgatcgggacagacgcggaccccctcttcggtcggagcgtgaagaggtttcctcatggaggcgcgctgacgaccggaaagatgaccgcgtggaagagagagacccaccacggcgtgtgccacccccagccctatccagagaccgcgagagggatcgtgatagggaacgcgaaggggagaaggaaaaggcgtcatggagggccgaaaaggaccgagagtccctgcgaaggaccaagaacgagaccgatgaagatggctggaccacagtgagacgttag

SEQ ID NO: 140564 - DNA, 4047 bp, Artificial Sequence
  derived and/or modified sequence
atgaaatcgaaaaagcacagaacatggcaaaaaatccatgaacccatcatgctaaagtacctcgagttgtgtgtggacttgcggaagagccacctcgccaaggaaggtctctaccagtacaagaacatatgtcagcaggttaatatcaagtcactagaagatgttgtgcgagcttacctgaaaatggcggaagagaaaactgaagcggctaaagaagagagccagcagatggtgctagatatcgaggaccttgataacatccagacccctgaatcagtacttctttccgctgtgagcggtgaggacacccaggacagaactgatagactgctactcacaccatgggttaagttcctgtgggagtcatatcggcagtgcctggatctgctgagaaacaattctagggttgaacgcctgtaccatgacattgctcagcaggccttcaagttttgcctgcagtatacccgaaaggccgaattcaggaaactctgcgataatctgagaatgcatctgtcgcaaattcaaagacatcataaccagagcaccgctattaacctgaataaccctgaaagccagtccatgcaccttgaaacacgtttggtccaactcgactccgcaatttctatggagctttggcaggaggcattcaaagcagtggaggacattcacggcctgttttcattgtccaaaaagcctcccaaaccacagcttatggccaactactacaataaggtctctaccgtgttttggaaaagcggcaacgctttatttcatgcaagtactctgcaccgcctctatcacctgagtagagagatgcgtaagaatctgactcaggacgaaatgcaacgtatgagcacgcgggtgcttctggcgacccttagcattcctatcaccccagagagaaccgacatagcgcgactgctagatatggacggaattatcgtagagaaacagcgtcgactggccaccttgctgggactgcaagccccaccgactcggatcggccttatcaatgatatggtgcgatttaacgttcttcagtatgtggtgcccgaagttaaagatctctacaactggctcgaagttgaattcaaccctctgaaattatgcgagagggttaccaaagtcctgaattgggtgcgcgagcagcccgagaaggagcccgagttgcagcagtatgttccccagctacagaacaatacaatcctcagactcctgcagcaggttagtcagatataccaaagtatcgagtttagtcggctgacaagtctggtccccttcgtggatgcttttcagctggagcgcgcaattgtcgatgccgcacgtcattgcgatctccaggtccgtatcgaccacacatcgaggacactgtctttcggcagcgatctgaattatgcaacacgtgaagacgccccaatcggcccacatcttcagagtatgccttccgaacagatccgtaaccagcttacagcgatgtcttccgtgctcgcaaaggccctggaagtgataaaaccggctcacattcttcaggaaaaggaggagcaacaccaattggccgtgaccgcttacctgaaaaatagtcggaaggaacaccaaaggatactcgccaggaggcagaccatagaagagcgtaaagaacgactggagagcctcaacatacagcgagaaaaggaagaacttgaacagcgcgaggctgaattacagaaagttaggaaagcagaggaagagcgactgcgtcaggaggccaaagaacgggagaaggaaagaattctccaggaacatgaacagatcaaaaagaaaactgtgcgggagagactggaacagataaaaaagactgaacttggggcaaaggcctttaaggatattgacattgaggatctcgaagaactagatcccgatttcattatggctaagcaagtggagcagttggaaaaggagaagaaggagttacaggagcgactgaagaaccaagaaaagaagatagattacttcgaaagggcaaagcgactagaagagatccccctgattaaatcggcttacgaagagcaaagaattaaggatatggatctatgggaacagcaagaggaggagaggataacgacaatgcagctggagagagagaaggcattggaacataaaaatagaatgtctcggatgcttgaagaccgcgatctgtttgtgatgcggctcaaggctgctagacaaagcgtttacgaagaaaaacttaaacagtttgaggagcgcctggccgaggagcgccataaccgtctggaagagcgcaaacggcagaggaaggaggaaagaagaatcacttattaccgagagaaggaagaagaagaacagagacgcgcagaggagcaaatgctcaaggaaagggaggagcgggaacgagcagagcgcgctaaaagagaggaggaactgagagagtaccaagaacgcgtaaagaagctggaggaagttgagcgtaaaaagcggcagcgtgagctagaaattgaggagcgcgagaggcgcagggaggaggaaaggcgcctgggagacagctccctgagccgaaaggactcaagatggggtgaccgggattctgaaggaacgtggcgaaagggccctgaagcagatagcgagtggcggaggggcccacccgagaaagagtggcgacgcggtgagggcagagatgaagacaggagccatcggagagatgaggagcggccacggcgtctcggcgacgatgaagatcgggagccctcattgagacccgacgacgatcgggtaccacggagaggaatggacgatgaccgcggtccaaggagaggccctgaagaggatcggttctctcggaggggagcagacgacgatcgtccctcttggcgtaatactgacgatgacaggcctccacggaggatcgccgatgaagatagagggaattggaggcacgccgacgatgaccgacccccaagacgcggactggatgaagatagaggctcctggagaacagccgacgaagatcgtggtcctcgacgtggcatggatgacgatagaggacccaggcgcggtggtgctgacgacgaacgatcctcatggaggaatgccgacgacgataggggacctcggagaggtctggatgatgataggggccctcgtcgtggaatggatgatgatcgaggacccaggaggggaatggacgatgaccgcggtcccagacgtggcatggacgacgaccggggaccgcgacggggattagatgatgacaggggcccatggcgaaatgccgacgatgacagaattcctagacgaggcgctgaggacgaccgtgggccttggcgtaacatggacgatgaccgcttatccagacgcgctgacgacgatcggtttccaagaaggggcgatgactcccgacctggaccgtggcggccactggtgaaacccggtgggtggcgagaaaaagagaaggccagggaggagtcctgggggccacctcgggagtcgcggccaagtgaggagcgcgagtgggatagagaaaaggagcgcgatagggacaatcaagaccgtgaagagaacgataaagaccctgagagagagagggatcgtgaaagggatgtcgacagagaggataggtttcggcgtcctcgcgacgagggagggtggcggcgagggcctgctgaagagagcagttcatggcgcgactctagccgcagagacgaccgggaccgcgacgatagacggcgtgaaagggacgatcggagagatctgcgcgaaaggagggatcttagagatgacagggacaggcgcggaccccctttacgcagcgaacgggaagaagtgagttcatggcgccgtgcagacgatcgcaaagacgacagagtcgaagagagagaccccccacggagggttccacctcccgcactcagccgtgaccgtgagagggatagggacagggaaagagaaggcgagaaagagaaggcttcctggagagccgaaaaggaccgagagagcctgagaagaaccaagaacgaaaccgatgaagatggctggaccacggtgaggcggtag

SEQ ID NO: 140565 - DNA, 361 bp, Artificial Sequence
  derived and/or modified sequence
gaagcgagaggaggaggagaagaaagcggagttcgagcggcagcgaaaaattcgacagcaagaaatagaagaaaaactcatcgaggaagaaacagcacgaagagtagaagaattggtagcaaaaagggtggaggaagaactggagaaaaggaaggatgaaattgaacgagaagttctccgaagggtggaggaagccaaacgcatcatggaaaagcagttgctcgaagaactcgagcgacagagacaagctgagcttgccgcacaaaaagctagagagaggaagctggcgcgtatggcagccgaggagcacactctgcaggacactggacaagacagaggaagaacgtgcaaaacgtgagga

SEQ ID NO: 140566 - DNA, 207 bp, Artificial Sequence
  derived and/or modified sequence
atgaagctgaacgagaagttcagcgagggctggagaaagcccaacgccagctggaagagcagctgcagcaagaacagcagcgacagagacaagctgagcctgccccacaagaagctggagagaggcagctggagagtgtggcagcccagaagcaccctgtgcagaaccctggacaagaccgaggaggagagagccaagagagagtag

SEQ ID NO: 140567 - DNA, 4149 bp, Artificial Sequence
  derived and/or modified sequence
atgcccgcctacttccagagacccgagaacgccctgaagagagccaacgagttcctggaggtgggcaagaagcagcccgccctggacgtgctgtacgacgtgatgaagagcaagaagcacagaacctggcagaagatccacgagcccatcatgctgaagtacctggagctgtgcgtggacctgagaaagagccacctggccaaggagggcctgtaccagtacaagaacatctgccagcaggtgaacatcaagagcctggaggacgtggtgagagcctacctgaagatggccgaggagaagaccgaggccgccaaggaggagagccagcagatggtgctggacatcgaggacctggacaacatccagacccccgagagcgtgctgctgagcgccgtgagcggcgaggacacccaggacagaaccgacagactgctgctgaccccctgggtgaagttcctgtgggagagctacagacagtgcctggacctgctgagaaacaacagcagagtggagagactgtaccacgacatcgcccagcaggccttcaagttctgcctgcagtacaccagaaaggccgagttcagaaagctgtgcgacaacctgagaatgcacctgagccagatccagagacaccacaaccagagcaccgccatcaacctgaacaaccccgagagccagagcatgcacctggagaccagactggtgcagctggacagcgccatcagcatggagctgtggcaggaggccttcaaggccgtggaggacatccacggcctgttcagcctgagcaagaagccccccaagccccagctgatggccaactactacaacaaggtgagcaccgtgttctggaagagcggcaacgccctgttccacgccagcaccctgcacagactgtaccacctgagcagagagatgagaaagaacctgacccaggacgagatgcagagaatgagcaccagagtgctgctggccaccctgagcatccccatcacccccgagagaaccgacatcgccagactgctggacatggacggcatcatcgtggagaagcagagaagactggccaccctgctgggcctgcaggccccccccaccagaatcggcctgatcaacgacatggtgagattcaacgtgctgcagtacgtggtgcccgaggtgaaggacctgtacaactggctggaggtggagttcaaccccctgaagctgtgcgagagagtgaccaaggtgctgaactgggtgagagagcagcccgagaaggagcccgagctgcagcagtacgtgccccagctgcagaacaacaccatcctgagactgctgcagcaggtgagccagatctaccagagcatcgagttcagcagactgaccagcctggtgcccttcgtggacgccttccagctggagagagccatcgtggacgccgccagacactgcgacctgcaggtgagaatcgaccacaccagcagaaccctgagcttcggcagcgacctgaactacgccaccagagaggacgcccccatcggcccccacctgcagagcatgcccagcgagcagatcagaaaccagctgaccgccatgagcagcgtgctggccaaggccctggaggtgatcaagcccgcccacatcctgcaggagaaggaggagcagcaccagctggccgtgaccgcctacctgaagaacagcagaaaggagcaccagagaatcctggccagaagacagaccatcgaggagagaaaggagagactggagagcctgaacatccagagagagaaggaggagctggagcagagagaggccgagctgcagaaggtgagaaaggccgaggaggagagactgagacaggaggccaaggagagagagaaggagagaatcctgcaggagcacgagcagatcaagaagaagaccgtgagagagagactggagcagatcaagaagaccgagctgggcgccaaggccttcaaggacatcgacatcgaggacctggaggagctggaccccgacttcatcatggccaagcaggtggagcagctggagaaggagaagaaggagctgcaggagagactgaagaaccaggagaagaagatcgactacttcgagagagccaagagactggaggagatccccctgatcaagagcgcctacgaggagcagagaatcaaggacatggacctgtgggagcagcaggaggaggagagaatcaccaccatgcagctggagagagagaaggccctggagcacaagaacagaatgagcagaatgctggaggacagagacctgttcgtgatgagactgaaggccgccagacagagcgtgtacgaggagaagctgaagcagttcgaggagagactggccgaggagagacacaacagactggaggagagaaagagacagagaaaggaggagagaagaatcacctactacagagagaaggaggaggaggagcagagaagagccgaggagcagatgctgaaggagagagaggagagagagagagccgagagagccaagagagaggaggagctgagagagtaccaggagagagtgaagaagctggaggaggtggagagaaagaagagacagagagagctggagatcgaggagagagagagaagaagagaggaggagagaagactgggcgacagcagcctgagcagaaaggacagcagatggggcgacagagacagcgagggcacctggagaaagggccccgaggccgacagcgagtggagaagaggcccccccgagaaggagtggagaagaggcgagggcagagacgaggacagaagccacagaagagacgaggagagacccagaagactgggcgacgacgaggacagagagcccagcctgagacccgacgacgacagagtgcccagaagaggcatggacgacgacagaggccccagaagaggccccgaggaggacagattcagcagaagaggcgccgacgacgacagacccagctggagaaacaccgacgacgacagaccccccagaagaatcgccgacgaggacagaggcaactggagacacgccgacgacgacagaccccccagaagaggcctggacgaggacagaggcagctggagaaccgccgacgaggacagaggccccagaagaggcatggacgacgacagaggccccagaagaggcggcgccgacgacgagagaagcagctggagaaacgccgacgacgacagaggccccagaagaggcctggacgacgacagaggccccagaagaggcatggacgacgacagaggccccagaagaggcatggacgacgacagaggccccagaagaggcatggacgacgacagaggccccagaagaggcctggacgacgacagaggcccctggagaaacgccgacgacgacagaatccccagaagaggcgccgaggacgacagaggcccctggagaaacatggacgacgacagactgagcagaagagccgacgacgacagattccccagaagaggcgacgacagcagacccggcccctggagacccctggtgaagcccggcggctggagagagaaggagaaggccagagaggagagctggggcccccccagagagagcagacccagcgaggagagagagtgggacagagagaaggagagagacagagacaaccaggacagagaggagaacgacaaggaccccgagagagagagagacagagagagagacgtggacagagaggacagattcagaagacccagagacgagggcggctggagaagaggccccgccgaggagagcagcagctggagagacagcagcagaagagacgacagagacagagacgacagaagaagagagagagacgacagaagagacctgagagagagaagagacctgagagacgacagagacagaagaggcccccccctgagaagcgagagagaggaggtgagcagctggagaagagccgacgacagaaaggacgacagagtggaggagagagacccccccagaagagtgcccccccccgccctgagcagagacagagagagagacagagacagagagagagagggcgagaaggagaaggccagctggagagccgagaaggacagagagagcctgagaagaaccaagaacgagaccgacgaggacggctggaccaccgtgagaagatag

SEQ ID NO: 140568 - DNA, 4047 bp, Artificial Sequence
  derived and/or modified sequence
atgaagagcaagaagcacagaacctggcagaagatccacgagcccatcatgctgaagtacctggagctgtgcgtggacctgagaaagagccacctggccaaggagggcctgtaccagtacaagaacatctgccagcaggtgaacatcaagagcctggaggacgtggtgagagcctacctgaagatggccgaggagaagaccgaggccgccaaggaggagagccagcagatggtgctggacatcgaggacctggacaacatccagacccccgagagcgtgctgctgagcgccgtgagcggcgaggacacccaggacagaaccgacagactgctgctgaccccctgggtgaagttcctgtgggagagctacagacagtgcctggacctgctgagaaacaacagcagagtggagagactgtaccacgacatcgcccagcaggccttcaagttctgcctgcagtacaccagaaaggccgagttcagaaagctgtgcgacaacctgagaatgcacctgagccagatccagagacaccacaaccagagcaccgccatcaacctgaacaaccccgagagccagagcatgcacctggagaccagactggtgcagctggacagcgccatcagcatggagctgtggcaggaggccttcaaggccgtggaggacatccacggcctgttcagcctgagcaagaagccccccaagccccagctgatggccaactactacaacaaggtgagcaccgtgttctggaagagcggcaacgccctgttccacgccagcaccctgcacagactgtaccacctgagcagagagatgagaaagaacctgacccaggacgagatgcagagaatgagcaccagagtgctgctggccaccctgagcatccccatcacccccgagagaaccgacatcgccagactgctggacatggacggcatcatcgtggagaagcagagaagactggccaccctgctgggcctgcaggccccccccaccagaatcggcctgatcaacgacatggtgagattcaacgtgctgcagtacgtggtgcccgaggtgaaggacctgtacaactggctggaggtggagttcaaccccctgaagctgtgcgagagagtgaccaaggtgctgaactgggtgagagagcagcccgagaaggagcccgagctgcagcagtacgtgccccagctgcagaacaacaccatcctgagactgctgcagcaggtgagccagatctaccagagcatcgagttcagcagactgaccagcctggtgcccttcgtggacgccttccagctggagagagccatcgtggacgccgccagacactgcgacctgcaggtgagaatcgaccacaccagcagaaccctgagcttcggcagcgacctgaactacgccaccagagaggacgcccccatcggcccccacctgcagagcatgcccagcgagcagatcagaaaccagctgaccgccatgagcagcgtgctggccaaggccctggaggtgatcaagcccgcccacatcctgcaggagaaggaggagcagcaccagctggccgtgaccgcctacctgaagaacagcagaaaggagcaccagagaatcctggccagaagacagaccatcgaggagagaaaggagagactggagagcctgaacatccagagagagaaggaggagctggagcagagagaggccgagctgcagaaggtgagaaaggccgaggaggagagactgagacaggaggccaaggagagagagaaggagagaatcctgcaggagcacgagcagatcaagaagaagaccgtgagagagagactggagcagatcaagaagaccgagctgggcgccaaggccttcaaggacatcgacatcgaggacctggaggagctggaccccgacttcatcatggccaagcaggtggagcagctggagaaggagaagaaggagctgcaggagagactgaagaaccaggagaagaagatcgactacttcgagagagccaagagactggaggagatccccctgatcaagagcgcctacgaggagcagagaatcaaggacatggacctgtgggagcagcaggaggaggagagaatcaccaccatgcagctggagagagagaaggccctggagcacaagaacagaatgagcagaatgctggaggacagagacctgttcgtgatgagactgaaggccgccagacagagcgtgtacgaggagaagctgaagcagttcgaggagagactggccgaggagagacacaacagactggaggagagaaagagacagagaaaggaggagagaagaatcacctactacagagagaaggaggaggaggagcagagaagagccgaggagcagatgctgaaggagagagaggagagagagagagccgagagagccaagagagaggaggagctgagagagtaccaggagagagtgaagaagctggaggaggtggagagaaagaagagacagagagagctggagatcgaggagagagagagaagaagagaggaggagagaagactgggcgacagcagcctgagcagaaaggacagcagatggggcgacagagacagcgagggcacctggagaaagggccccgaggccgacagcgagtggagaagaggcccccccgagaaggagtggagaagaggcgagggcagagacgaggacagaagccacagaagagacgaggagagacccagaagactgggcgacgacgaggacagagagcccagcctgagacccgacgacgacagagtgcccagaagaggcatggacgacgacagaggccccagaagaggccccgaggaggacagattcagcagaagaggcgccgacgacgacagacccagctggagaaacaccgacgacgacagaccccccagaagaatcgccgacgaggacagaggcaactggagacacgccgacgacgacagaccccccagaagaggcctggacgaggacagaggcagctggagaaccgccgacgaggacagaggccccagaagaggcatggacgacgacagaggccccagaagaggcggcgccgacgacgagagaagcagctggagaaacgccgacgacgacagaggccccagaagaggcctggacgacgacagaggccccagaagaggcatggacgacgacagaggccccagaagaggcatggacgacgacagaggccccagaagaggcatggacgacgacagaggccccagaagaggcctggacgacgacagaggcccctggagaaacgccgacgacgacagaatccccagaagaggcgccgaggacgacagaggcccctggagaaacatggacgacgacagactgagcagaagagccgacgacgacagattccccagaagaggcgacgacagcagacccggcccctggagacccctggtgaagcccggcggctggagagagaaggagaaggccagagaggagagctggggcccccccagagagagcagacccagcgaggagagagagtgggacagagagaaggagagagacagagacaaccaggacagagaggagaacgacaaggaccccgagagagagagagacagagagagagacgtggacagagaggacagattcagaagacccagagacgagggcggctggagaagaggccccgccgaggagagcagcagctggagagacagcagcagaagagacgacagagacagagacgacagaagaagagagagagacgacagaagagacctgagagagagaagagacctgagagacgacagagacagaagaggcccccccctgagaagcgagagagaggaggtgagcagctggagaagagccgacgacagaaaggacgacagagtggaggagagagacccccccagaagagtgcccccccccgccctgagcagagacagagagagagacagagacagagagagagagggcgagaaggagaaggccagctggagagccgagaaggacagagagagcctgagaagaaccaagaacgagaccgacgaggacggctggaccaccgtgagaagatag

SEQ ID NO: 140569 - protein, 357 aa, Artificial Sequence
  derived and/or modified sequence
MATPAVPVSAPPATPTPVPAAAPASVPAPTPAPAAAPVPAAAPASSSDPAAAAAATAAPGQTPASAQAPAQTPAPALPGPALPGPFPGGRVVRLHPVILASIVDSYERRNEGAARVIGTLLGTVDKHSVEVTNCFSVPHNESEDEVAVDMEFAKNMYELHKKVSPNELILGWYATGHDITEHSVLIHEYYSREAPNPIHLTVDTSLQNGRMSIKAYVSTLMGVPGRTMGVMFTPLTVKYAYYDTERIGVDLIMKTCFSPNRVIGLSSDLQQVGGASARIQDALSTVLQYAEDVLSGKVSADNTVGRFLMSLVNQVPKIVPDDFETMLNSNINDLLMVTYLANLTQSQIALNEKLVNL

SEQ ID NO: 140570 - protein, 208 aa, Artificial Sequence
  derived and/or modified sequence
MEFAKNMYELHKKVSPNELILGWYATGHDITEHSVLIHEYYSREAPNPIHLTVDTSLQNGRMSIKAYVSTLMGVPGRTMGVMFTPLTVKYAYYDTERIGVDLIMKTCFSPNRVIGLSSDLQQVGGASARIQDALSTVLQYAEDVLSGKVSADNTVGRFLMSLVNQVPKIVPDDFETMLNSNINDLLMVTYLANLTQSQIALNEKLVNL

SEQ ID NO: 140571 - protein, 372 aa, Artificial Sequence
  derived and/or modified sequence
MNAVISASASFFLDKMATPAVPVSAPPATPTPVPAAAPASVPAPTPAPAAAPVPAAAPASSSDPAAAAAATAAPGQTPASAQAPAQTPAPALPGPALPGPFPGGRVVRLHPVILASIVDSYERRNEGAARVIGTLLGTVDKHSVEVTNCFSVPHNESEDEVAVDMEFAKNMYELHKKVSPNELILGWYATGHDITEHSVLIHEYYSREAPNPIHLTVDTSLQNGRMSIKAYVSTLMGVPGRTMGVMFTPLTVKYAYYDTERIGVDLIMKTCFSPNRVIGLSSDLQQVGGASARIQDALSTVLQYAEDVLSGKVSADNTVGRFLMSLVNQVPKIVPDDFETMLNSNINDLLMVTYLANLTQSQIALNEKLVNL

SEQ ID NO: 140572 - protein, 307 aa, Artificial Sequence
  derived and/or modified sequence
MATPAVPVSAPPATPTPVPAAAPAPALPGPALPGPFPGGRVVRLHPVILASIVDSYERRNEGAARVIGTLLGTVDKHSVEVTNCFSVPHNESEDEVAVDMEFAKNMYELHKKVSPNELILGWYATGHDITEHSVLIHEYYSREAPNPIHLTVDTSLQNGRMSIKAYVSTLMGVPGRTMGVMFTPLTVKYAYYDTERIGVDLIMKTCFSPNRVIGLSSDLQQVGGASARIQDALSTVLQYAEDVLSGKVSADNTVGRFLMSLVNQVPKIVPDDFETMLNSNINDLLMVTYLANLTQSQIALNEKLVNL

SEQ ID NO: 140573 - DNA, 477 bp, Artificial Sequence
  derived and/or modified sequence
atgctggatggcggcagaaatggccgcctgctggagctgagcagcctgctgcctgagcggggcggcggccccagcctgtgccgcagccctgccagcacagagaaggaggtgggcgcctgtggcaccctggccagcctgcggcggggcctgtggaagtgcagcctgtgccccggccctgccctgctgctgggcggcagctgctgcctgatctgcagcctgagcctgctgctgctgagcacccccaccttcttcagcaggaactttgagcccagcttcagccccagccccatcgagaagcccagcgcccccagcagcggccagagcagccagctgcagacccaggtgcagcccccagctgagagaggagctgcctccatgcctggccctgccagcctgcccctgagcacaggccccagccagcccctgcgctgcagcccccgggtgctgtgcagccgggtgctggccctgcggaggtag

SEQ ID NO: 140574 - DNA, 1254 bp, Artificial Sequence
  derived and/or modified sequence
atttccgcttccgcctccttctttctcgacaagatggccacaccggcggtaccagtaagtgctcctccggccacgccaaccccagtcccggcggcggccccagcctcagttccagcgccaacgccagcaccggctgcggctccggttcccgctgcggctccagcctcatcctcagaccctgcggcagcagcggctgcaactgcggctcctggccagaccccggcctcagcgcaagctccagcgcagaccccagcgcccgctctgcctggtcctgctcttccagggcccttccccggcggccgcgtggtcaggctgcacccagtcattttggcctccattgtggacagctacgagagacgcaacgagggtgctgcccgagttatcgggaccctgttgggaactgtcgacaaacactcagtggaggtcaccaattgcttttcagtgccgcacaatgagtcagaagatgaagtggctgttgacatggaatttgctaagaatatgtatgaactgcataaaaaagtttctccaaatgagctcatcctgggctggtacgctacgggccatgacatcacagagcactctgtgctgatccacgagtactacagccgagaggcccccaaccccatccacctcactgtggacacaagtctccagaacggccgcatgagcatcaaagcctacgtcagcactttaatgggagtccctgggaggaccatgggagtgatgttcacgcctctgacagtgaaatacgcgtactacgacactgaacgcatcggagttgacctgatcatgaagacctgctttagccccaacagagtgattggactctcaagtgacttgcagcaagtaggaggggcatcagctcgcatccaggatgccctgagtacagtgttgcaatatgcagaggatgtactgtctggaaaggtgtcagctgacaatactgtgggccgcttcctgatgagcctggttaaccaagtaccgaaaatagttcccgatgactttgagaccatgctcaacagcaacatcaatgaccttttgatggtgacctacctggccaacctcacacagtcacagattgcactcaatgaaaaacttgtaaacctgtgaatggaccccaagcagtacacttgctggtctaggtattaaccccaggactcagaagtgaaggagaaatgggttttttgtggtcttgagtcacactgagatagtcagttgtgtgtgactctaataaacggagcctaccttttgtaaatt

SEQ ID NO: 140575 - DNA, 1068 bp, Artificial Sequence
  derived and/or modified sequence
tttctcgacaagatggccacaccggcggtaccagtaagtgctcctccggccacgccaaccccagtcccggcggcggccccagcctcagttccagcgccaacgccagcaccggctgcggctccggttcccgctgcggctccagcctcatcctcagaccctgcggcagcagcggctgcaactgcggctcctggccagaccccggcctcagcgcaagctccagcgcagaccccagcgcccgctctgcctggtcctgctcttccagggcccttccccggcggccgcgtggtcaggctgcacccagtcattttggcctccattgtggacagctacgagagacgcaacgagggtgctgcccgagttatcgggaccctgttgggtggctgttgacatggaatttgctaagaatatgtatgaactgcataaaaaagtttctccaaatgagctcatcctgggctggtacgctacgggccatgacatcacagagcactctgtgctgatccacgagtactacagccgagaggcccccaaccccatccacctcactgtggacacaagtctccagaacggccgcatgagcatcaaagcctacgtcagcactttaatgggagtccctgggaggaccatgggagtgatgttcacgcctctgacagtgaaatacgcgtactacgacactgaacgcatcggagttgacctgatcatgaagacctgctttagccccaacagagtgattggactctcaagtgacttgcagcaagtaggaggggcatcagctcgcatccaggatgccctgagtacagtgttgcaatatgcagaggatgtactgtctggaaaggtgtcagctgacaatactgtgggccgcttcctgatgagcctggttaaccaagtaccgaaaatagttcccgatgactttgagaccatgctcaacagcaacatcaatgaccttttgatggtgacctacctggccaacctcacacagtcacagattgcactcaatgaaaaacttgtaaacctgtgaatggaccccaagcagtacacttgctggtctaggtattaaccccaggactcaga

SEQ ID NO: 140576 - DNA, 7540 bp, Artificial Sequence
  derived and/or modified sequence
aaatcgcttctgggtgcagccacaggagtggggttgttggtccaggtggagccatggttgagggaaaaactaaaacatgacagagtttattcatcaatgggaacttttatatactgttagaaggcatgtaaattggaacagcctctttggaaaacaagtctgcattatcttcctcgagcttctgggctcaaacgatccttccgcctcggtctcccgaagtgctgagattacaggcgtgagccaccgcgcctggccttaaaatcctttttaaaggcactttgacatccattatctcatttaagtctaaaacacgaatttcgacctccgcgctgctttctggttccacctggcggcagctgcacaaagtgtttctcttcgaacgccgtcccaagttttacccggaactacttagcccagggtttcctgagtgctcctcgggccaaaagcagagcgcacaaattccagaagaaattaccaacggcgggactatttcagtgctccgagaagtatcaccagtaaccaatcagcaaaaagctctagctcacgtggtgtatattcagcctatcaagctcctgatattcatgaatgctgtcatttccgcttccgcctccttctttctcgacaagatggccacaccggcggtaccagtaagtgctcctccggccacgccaaccccagtcccggcggcggccccagcctcagttccagcgccaacgccagcaccggctgcggctccggttcccgctgcggctccagcctcatcctcagaccctgcggcagcagcggctgcaactgcggctcctggccagaccccggcctcagcgcaagctccagcgcagaccccagcgcccgctctgcctggtcctgctcttccagggcccttccccggcggccgcgtggtcaggctgcacccagtcattttggcctccattgtggacagctacgagagacgcaacgagggtgctgcccgagttatcgggaccctgttgggaactgtcgacaaacactcagtggaggtcaccaattgcttttcagtgccgcacaatgagtcagaagatgaagtggctgttgacatggaatttgctaagaatatgtatgaactgcataaaaaagtttctccaaatgagctcatcctgggctggtacgctacgggccatgacatcacagagcactctgtgctgatccacgagtactacagccgagaggcccccaaccccatccacctcactgtggacacaagtctccagaacggccgcatgagcatcaaagcctacgtcagcactttaatgggagtccctgggaggaccatgggagtgatgttcacgcctctgacagtgaaatacgcgtactacgacactgaacgcatcggagttgacctgatcatgaagacctgctttagccccaacagagtgattggactctcaagtgacttgcagcaagtaggaggggcatcagctcgcatccaggatgccctgagtacagtgttgcaatatgcagaggatgtactgtctggaaaggtgtcagctgacaatactgtgggccgcttcctgatgagcctggttaaccaagtaccgaaaatagttcccgatgactttgagaccatgctcaacagcaacatcaatgaccttttgatggtgacctacctggccaacctcacacagtcacagattgcactcaatgaaaaacttgtaaacctgtgaatggaccccaagcagtacacttgctggtctaggtattaaccccaggactcagaagtgaaggagaaatgggttttttgtggtcttgagtcacactgagatagtcagttgtgtgtgactctaataaacggagcctaccttttgtaaattaatttcatcttatgtgagtttattgccgggtggaagggaggaaaatgttttagatcacacagaaactaggaagtgaatattgtaggtagagaagttggttatgtgtttggcatgttactgttttaccaaactgttcttttggttttcaatatggaaaggtgtccattggcaaaacaaccttttcttgaggattcatgtgatttctacaggaaatgaaaataagaatccatggagaaaaaatagctaagaaaattggatgcttaatctgaactaaaagagtagagtgtgtagtcactatcttaaaatacattaatagtaagatggagctctttgccactttggttcggggaggcagaattaagatctgtgggttaaagattaaagaggtttccccaaaacttcagaaaattcttaggtgctatctgtaactcgaggatagagccttgagttatactgaggtctgccagtggctcaatttaagcaaagactagatggcatttcccagaggccttgtaggctagagtacttgcctgtgtaacttcagacatccatttcctctggtatcctggagttccgcctcgccactgtgtgtcttagaaataagtcattattcaagaactcaggaaattatacgttggagtgaaaaggtgagtgaaggcaatggggaatcaaaaaggcctggatcctagttctgaggtatgtgtagccttaggaaagataaattataagagtcataagatatggatcataaacatacatagtccattagggtattatgaggattccatgaattaataaatgtcaggttaatcaacacttgtggagaatatcacctggtatgtagtaagcacagataagtggtagatactatgatgcctaaaggtgaatagtttgaaagtaataagcaacatgaaccccagcctggaactcagttctgagatatgtacctcaggaaatataagttatgggagtcataaagtgtggatagtaatgatagataatttcttacaggtagggaaatgtaaacagatcttatcggcaaaatgataatgacaggccaaattgttaaaggtaggttaaaagtagacagcatggtgggaaggttaatcagagtcaaaatgtttcagtgttcttacatttttgggagtagccagttaatatcaacttagtctttttaagtatgcatgataaaattccgaggttaattgctagaagtatatataatctctcaatgaatagtgatgagagatggtgggataatagggaagaaacaaaattttaaatttgagaaataagcatagaaaaggtggataaaacaaaagatggcaaaacaagtccaaatagatcagtaattacaataaatgtataagtattaaactagcccaaggaaaaattgaatattaaaacaaaccccaatcatatgctgtttacaggagacacatctaaaacaaggacataaagttgtcctgcagctgtgagtaacaatataggtgaatgttaataataatgttgaatgaaaaaagctggtgtcagaagacatgtacattatgatactccagaagttcaaaaacaagtgaaacttgtttagacatgcggttggctgtctgtatatgtgggttccacatctatggactcaaccaactacaggttgaaaatattgagggggaaaattgtgtctggactaaacctgtacagacatttttccttgtcatttttccctaaacaatacaaagtattagatggtgtttatactgtattcggtattataagtaatctagagatgacttaaaagtatatgagaaggtatgcacaggttatatccaaatacttcatattagggacttgagcatcagaggatttttatatccaaggaaggttctggaaccaatcctccacggatactaaacggtgactgtgtgtgtatatatatatgtatagtctgttctcattatctatagtagttatgttttataaagtcaccatgaacactgaattagagagtactgaaccattattcccaagggaaatacagggttgggttcctatgaacctctgggcacagtttcatcaacccatcagtacataaacttgttacatgtgtttctgtttgaagacaccttagtatatatggttgacccattaacactgaacttagcccacgacacttattcctgaatgaagcttacctcagtttctccaggcggcacatcacagtcttcttgcacttaggaacacttggcactgtgcgtgggggtcactttaagcagcaaaatccacaaaaatgcaaaagacatggcactaaatagactgaaaaggatacttgtttataagaactgaaacaagaaggccttgttccacctcagctgggaacatggagagcaggcaattcaaattttttcacatgctgcatgtccgcaaatggctgcaaaagcccagcaagtactgatactggagttagaaataaattttagcaagaggtaaattcacacatacggagtctgcaaaaaatgagaattgactattatgtgtgtgtatattatatatatgataaaaaacaaaagaatgataaaaattcccaataatgtttactttggtggtgagaagaggatggcaagtaaaataagtctgtattgttatcagcaattatctagtttgaggttggacagtggtttcatcataggtattgattatattataaatagcccaacctgaactcatgaccatagtgtggtgttattacttagcgttattctagacttattagccattgtatttaaacaagaggaaatagagacattgaagataaagtggagccaggcacagtggctcatgcctgtaatcccagcactttggcaggctgagatgggttaatcaagaccagaagttcaagaccagcgtggccaacatggcaaaaccccgtctctactaaaaaaaaacaaaaaatacaaaaattagccaggcgtggtggcacgcacctgtagtcccagctacttgggaagctgaggcaggagaatctcgaacccaggaggtaggggttgcagtgagctgagatcgcaccactgcaccccagcctgggtgacagcaagatcctttctcaagaaaaaaagtgaaaaggaggagggtttttaaaaaattagtactacccagttgatacggtggaagaaaacttgaaaatgctaatgagaaacatgagatgtaatcacttgaaggcatatcatgttcttgaataagaagactcaacattattttaacaggtgttaattttccctgttaaactacatatttgtcataattacaataaaatacaaagagctattttggaactgggcaagctgtttctaaatgtatatggaaaaataaaaatgtctccaaaaaatccctgcagagggaaactagcccttccagatataaaatatattatagaactgtgtaattaaagcaatatggtactggtccataaaagaacataaaaccaaatagttcagtagactcaaaatgcaagcgttggtgagggtatggagaaaagggaacccttttacacttggtgtgaatgtaaattagtacagacattgtggaaaacagtttgtagagcttcctcaataaaaacacatatgatccagcaatcccactactgggtatatatccaaaggaaatgaaatcagtatgttgaagagatacttccacgttcactgaagcattgttcacaatcgccaagacatcaacctaagtgtccatcaacagaagatagatagggctgagcgcggtggcccacgcctgtaatcccagcactttgggaggccaaggcaggtggatcatttgaggtcagaagttcttgaccagcctggccaacatgatgaaaccccgtctctacaaaagatacaaaaattagccaggcatcttggagggcgcctgtaatcccacctactcgggctgaagtgagaatggcttgaacccaggaagtggagatttcagtgagctgagattccgccactgcagtccagcctgagcgacaagagtgagaagagtgagacttcatctcaaaaaaaaaaaaggtacatctacacaatggaatattattaaccttaaaagaaggaaataactgatttacaacaacatggatggacctggaggacactatgctagtgaaataagccatgatctcacttggatatggaatcacaaaattgaactcacaagcagagtgtagaaaggtggtttcatggactggagggaggggataaatggggagatgttggtcaagggtacaaagtttcagttaaacaggagtagtacgttccggagacctgttgtgcagcagggtgactagttaatgtatacttgaaaattgctaggagtagatctcaccaggagaaatgaatatgtgaggtgatggatgtaactagcttgattgtggtaatcaatttcgcaatgtgtacatatatcaaaacatcacattgtacaaaatacatacagtttttgtcaatttaaagatatcagaattctagaatatgataaagttgtgttttcaagcaagtaaagatagattacttaagagcgaatgagtggtaatttggaaacaatgttggattcctacttcgttacctgcaccaaaataagttgctcatggaataaaaacttgtctgaaaaaaaaaccataaatatgagggaaaaaacacagcaatgtgtttttaatgatttatgagtgaggaagaactttctaagaactgagaatccaggagttattttaaaagactgacaaatttagcaacatttttaaaatctgagtgtcaaattacacacatacacaaatagtcaatacaaatataaaactgggaaaatatttgcagttcatatcaaaaaaagggctaatattcttgtcccagaattcctacagttttttaaggccagtaatttgatacattagtgtgtaaaggatatgaccagacagctcacacacagacacacaaatgtgaaaagatgcttgatctcactgataaagcataaattaaaacgatgtcatttttaaaaatcagattcgcaaattttaaaagttgctaacactggaatggccagagtaagaggaaacgtgacacaggcacagattgctggtagacatataagttggtacagccctctctatgtaattttgtgtttgtcaaaattacaaatatgcatgcccttaacccaggaattccactcctcattatatatcctacaaataaactggtctcgttatgacacaatgtaatgaatacatagataagtactgaaatacttggttatcatagcgtaaagatggtaatcaacccaaatgactattaccagaatagaaattaaacaaagtatgatatatccataaaacacaatactatgcagctgttaagcagaatgagacagtcctctatatatcaatatggataaagagtaagtgaaaaaagccaggagagaatgttgtctataatatgctgttgttgtgtacgggaaaataaataatataaatacctagaatatttgtgaaggtacagccaagaaactactatcactgattgtcttaaggtactagatggggcacaggacaggacgaaagatttacttcttattgtttcttctgtataacttttgaattttatgctgttaatgtaatttttcaaaaaaatatataaaaatataaaaacatgaaaaacatgaaacaa

SEQ ID NO: 140577 - DNA, 1684 bp, Artificial Sequence
  derived and/or modified sequence
cattgcagcctcgagcttctgggctcaaacgatccttccgcctcggtctcccgaagtgctgagattacaggcgtgagccaccgcgcctggccttaaaatcctttttaaaggcactttgacatccattatctcatttaagtctaaaacacgaatttcgacctccgcgctgctttctggttccacctggcggcagctgcacaaagtgtttctcttcgaacgccgtcccaagttttacccggaactacttagcccagggtttcctgagtgctcctcgggccaaaagcagagcgcacaaattccagaagaaattaccaacggcgggactatttcagtgctccgagaagtatcaccagtaaccaatcagcaaaaagctctagctcacgtggtgtatattcagcctatcaagctcctgatattcatgaatgctgtcatttccgcttccgcctccttctttctcgacaagatggccacaccggcggtaccagtaagtgctcctccggccacgccaaccccagtcccggcggcggccccagcctcagttccagcgccaacgccagcaccggctgcggctccggttcccgctgcggctccagcctcatcctcagaccctgcggcagcagcggctgcaactgcggctcctggccagaccccggcctcagcgcaagctccagcgcagaccccagcgcccgctctgcctggtcctgctcttccagggcccttccccggcggccgcgtggtcaggctgcacccagtcattttggcctccattgtggacagctacgagagacgcaacgagggtgctgcccgagttatcgggaccctgttgggaactgtcgacaaacactcagtggaggtcaccaattgcttttcagtgccgcacaatgagtcagaagatgaagtggctgttgacatggaatttgctaagaatatgtatgaactgcataaaaaagtttctccaaatgagctcatcctgggctggtacgctacgggccatgacatcacagagcactctgtgctgatccacgagtactacagccgagaggcccccaaccccatccacctcactgtggacacaagtctccagaacggccgcatgagcatcaaagcctacgtcagcactttaatgggagtccctgggaggaccatgggagtgatgttcacgcctctgacagtgaaatacgcgtactacgacactgaacgcatcggagttgacctgatcatgaagacctgctttagccccaacagagtgattggactctcaagtgacttgcagcaagtaggaggggcatcagctcgcatccaggatgccctgagtacagtgttgcaatatgcagaggatgtactgtctggaaaggtgtcagctgacaatactgtgggccgcttcctgatgagcctggttaaccaagtaccgaaaatagttcccgatgactttgagaccatgctcaacagcaacatcaatgaccttttgatggtgacctacctggccaacctcacacagtcacagattgcactcaatgaaaaacttgtaaacctgtgaatggaccccaagcagtacacttgctggtctaggtattaaccccaggactcagaagtgaaggagaaatgggttttttgtggtcttgagtcacactgagatagtcagttgtgtgtgactctaataaacggagcctaccttttgtaaatt

SEQ ID NO: 140578 - DNA, 1472 bp, Artificial Sequence
  derived and/or modified sequence
cttctttctcgacaagatggccacaccggcggtaccagtaagtgctcctccggccacgccaaccccagtcccggcggcggccccagcgcccgctctgcctggtcctgctcttccagggcccttccccggcggccgcgtggtcaggctgcacccagtcattttggcctccattgtggacagctacgagagacgcaacgagggtgctgcccgagttatcgggaccctgttgggaactgtcgacaaacactcagtggaggtcaccaattgcttttcagtgccgcacaatgagtcagaagatgaagtggctgttgacatggaatttgctaagaatatgtatgaactgcataaaaaagtttctccaaatgagctcatcctgggctggtacgctacgggccatgacatcacagagcactctgtgctgatccacgagtactacagccgagaggcccccaaccccatccacctcactgtggacacaagtctccagaacggccgcatgagcatcaaagcctacgtcagcactttaatgggagtccctgggaggaccatgggagtgatgttcacgcctctgacagtgaaatacgcgtactacgacactgaacgcatcggagttgacctgatcatgaagacctgctttagccccaacagagtgattggactctcaagtgacttgcagcaagtaggaggggcatcagctcgcatccaggatgccctgagtacagtgttgcaatatgcagaggatgtactgtctggaaaggtgtcagctgacaatactgtgggccgcttcctgatgagcctggttaaccaagtaccgaaaatagttcccgatgactttgagaccatgctcaacagcaacatcaatgaccttttgatggtgacctacctggccaacctcacacagtcacagattgcactcaatgaaaaacttgtaaacctgtgaatggaccccaagcagtacacttgctggtctaggtattaaccccaggactcagaagtgaaggagaaatgggttttttgtggtcttgagtcacactgagatagtcagttgtgtgtgactctaataaacggagcctaccttttgtaaattaatttcatcttatgtgagtttattgccgggtggaagggaggaaaatgttttagatcacacagaaactaggaagtgaatattgtaggtagagaagttggttatgtgtttggcatgttactgttttaccaaactgttcttttggttttcaatatggaaaggtgtccattggcaaaacaaccttttcttgaggattcatgtgatttctacaggaaatgaaaataagaatccatggagaaaaaatagctaagaaaattggatgcttaatctgaactaaaagagtagagtgtgtagtcactatcttaaaatacattaatagtaagatggagctctttgccactttggttcggggaggcagaattaagatctgtgggttaaagattaaaga

SEQ ID NO: 140579 - DNA, 1074 bp, Artificial Sequence
  derived and/or modified sequence
atggctacaccggccgtgccggttagtgctcctcccgccactccgactcccgtgccggccgccgctcctgccagcgtccccgctccgaccccagccccggccgccgctcctgtccccgctgctgcccctgcatccagtagcgacccagcagccgctgccgcagccaccgctgcccccggacagacaccagcttccgcccaggctccggcacagacacctgcccccgcacttcctggacctgccctccccgggccattcccgggtggaagggtggtgcgactgcacccagtgattctggcctcaatcgtggatagctatgagcgtaggaatgagggggctgcacgcgtcatcgggactctccttggtaccgtggacaagcattccgtggaggttacgaactgtttttctgtgccgcataatgagtccgaggacgaggtcgctgtggacatggagtttgctaagaacatgtatgaactgcacaaaaaggtgtctccgaacgagttgatcctgggatggtacgcaaccggccatgatatcaccgagcacagcgttctgatccacgaatattattctagggaagctcccaatcccatccatttgactgttgatacctccctccagaacggtagaatgagtataaaagcctatgtgtcaacacttatgggcgtgccagggcgcaccatgggggtgatgtttacaccactgacagtgaagtatgcctactatgatacagaaagaatcggggtggatttaataatgaagacctgcttcagccccaatcgcgtgattgggttaagtagtgaccttcagcaagtcggaggagcctcagccagaatccaggacgctttgtctactgtccttcagtacgctgaggacgtgctgagcggaaaggtatctgctgataacacagtcggccgctttcttatgagtttggtcaatcaggtgcccaagatcgtacccgacgatttcgagaccatgctgaattccaacattaacgatctgctgatggtgacctacctcgctaacttgactcagtctcaaattgccctgaacgagaaactggtaaatctttag

SEQ ID NO: 140580 - DNA, 627 bp, Artificial Sequence
  derived and/or modified sequence
atggaattcgctaaaaacatgtatgagctccacaaaaaagtctcgccaaacgaattgatcctgggttggtacgctaccggccacgatatcaccgaacattcagtgcttattcacgagtactacagtcgcgaggctcctaatcccatacatctaacggtggatacaagcctgcagaacggacggatgtccatcaaagcgtacgtctccaccctgatgggtgtgcccgggcgtaccatgggggtgatgtttacccccctcactgtgaagtatgcctactatgataccgagaggatcggagtggacctgataatgaaaacgtgtttcagtcccaatcgggtgatcgggctctcaagcgatctccaacaggtcggcggcgccagcgcaaggatacaagacgccctgagtactgtgctgcaatacgcagaggatgtactgtccggaaaagtctccgccgacaacaccgttgggaggtttttgatgtcgctggtcaaccaggtgcctaaaattgtgcccgacgattttgagacaatgctgaatagcaacattaacgaccttctcatggtgacctacttggctaatctgacacagtcccaaatagccttgaatgagaaattagtcaacctgtag

SEQ ID NO: 140581 - DNA, 1074 bp, Artificial Sequence
  derived and/or modified sequence
atggctactcccgctgtgcctgtctccgccccacctgccactcccacacccgtgccagccgctgctccggcctctgtcccagctcctacacctgcccctgcagccgcccctgtgcccgccgccgcgcccgcctcctcttcagatcccgcagccgctgccgccgctacagccgcgcccggccagaccccagcctctgcacaggctccagctcagacccccgcgccagcgctgcctggacctgccctccctggacccttccccggcgggcgtgtggtgcgacttcatcctgtgattctggcgagtatcgttgacagctatgaaagaaggaatgagggtgccgcaagagtaattggaacactgctgggtacagtggacaagcattccgttgaggtgacaaattgcttttccgtcccgcataatgagtcagaagacgaagtggcagtcgacatggagttcgctaagaacatgtatgagctgcacaagaaagtgtctccgaatgagctgattctggggtggtatgccacaggacatgacattacggaacattccgttcttatccacgaatattacagtcgagaagcgcccaaccctatacatctgaccgtggatacatctctacagaacggtcggatgtctattaaggcctacgtctcgaccctgatgggggtgcctggcaggaccatgggcgtgatgtttacaccgctaaccgtaaagtacgcttattacgacactgaacgcatcggggtggaccttataatgaagacatgtttctctcctaaccgcgtgattgggctcagcagtgatctgcagcaggtgggtggagcatctgcgagaatccaggatgcattgtctacagtattgcagtatgccgaggatgtgttgtcagggaaagttagtgccgacaacaccgtcgggaggtttctaatgagtctcgttaaccaggtccccaaaatcgtcccagatgattttgagaccatgctgaatagcaacataaacgatctcctgatggtaacgtacttagccaatctgacgcaaagtcaaatcgcactcaacgaaaagcttgtgaatctgtag

SEQ ID NO: 140582 - DNA, 1119 bp, Artificial Sequence
  derived and/or modified sequence
atgaacgcagtgatttctgcctccgcgagcttctttctggataaaatggcgactcctgctgtgccagtctctgcgccccccgccaccccaacgcccgtgcccgctgcggcccccgcaagcgtgccagcacccacgcccgcccctgcagccgctcctgtccctgctgctgccccagcttcctccagcgatcccgccgcggctgccgcagctaccgcagccccaggccagacacctgctagtgctcaggctcctgcccaaacccctgcccccgctttaccagggccagcactgcccggcccttttcctggcggacgggtggtgagattacaccccgtcatcctcgcttctatagtcgactcatacgaaagacgcaatgagggcgctgcccgcgttattggaactctgctcggcaccgtggacaagcacagcgtagaggtgaccaattgttttagtgtgccacacaatgagagtgaagatgaagttgctgtggatatggagttcgccaagaacatgtatgagctgcataagaaggtgtctccaaacgagctcatcttgggatggtatgccacaggtcacgatattaccgaacacagcgtcctgatccatgaatactatagtcgagaggcccccaaccctatccatctgactgttgatacttctctgcagaacggaaggatgtcaatcaaagcctatgtgtccacacttatgggcgttccaggaaggactatgggagtgatgtttacacctttgacggtcaagtatgcgtactacgacactgagcggatcggtgtcgaccttataatgaagacctgcttttcaccgaaccgggtcatcggcctgagctccgatctccagcaagttgggggggcctccgccagaattcaggacgctctttccaccgtcctacagtatgcagaggacgttctgtctggcaaagttagcgccgataacaccgtgggcaggttcctgatgtcattagttaaccaagtgccaaagatagtacctgatgattttgaaacaatgcttaacagtaatataaacgatttgctgatggtcacataccttgcaaacctcacacagtcacagatagcgctcaacgagaaattggtgaatttatag

SEQ ID NO: 140583 - DNA, 924 bp, Artificial Sequence
  derived and/or modified sequence
atggccacgccagccgtgcccgtgtccgcaccacccgccacccccacacccgttccagcggccgcccctgccccagctctacccgggcccgccctgccgggtccttttccgggcggaagggtcgtacgcttacatcctgtcatccttgcaagcatcgtggacagttatgaacgccgcaacgagggagctgctagggtgatcggcactctgctgggtacggtggacaaacactcggtcgaggtgaccaattgcttttctgttcctcacaacgaaagcgaggacgaggtggctgtcgacatggaatttgccaagaatatgtacgaactgcataagaaagtttcaccgaatgaactcatcctgggatggtatgcaactggccacgacattacagagcactctgtcctgatccacgaatactattccagggaagcacccaaccccatccacctgacggtggatacctcactgcaaaacggaagaatgtccattaaggcctatgtgtccactcttatgggcgtgcccggaaggaccatgggggtgatgttcacccccctgaccgtcaaatatgcgtactatgataccgaaaggatcggtgtcgacttgatcatgaaaacttgcttttctccaaacagggtgattggactgagtagtgatctgcagcaggtaggaggcgcttcagcgcgaatacaggacgcactgtctaccgtgttacagtatgccgaagatgtgctgtcaggtaaggtgtccgcagacaacaccgtgggtcgctttcttatgagcctcgttaatcaggttcctaaaatcgtgcctgatgactttgagaccatgcttaactctaatataaacgaccttctcatggtcacctatcttgcgaacttgacccaaagccagattgcgttaaacgagaaattggtgaacctatag

SEQ ID NO: 140584 - DNA, 1074 bp, Artificial Sequence
  derived and/or modified sequence
atggccaccccagctgtgcctgtgtctgcccccccagccacccccacccctgtgcctgctgctgccccagcctctgtgcctgcccccaccccagccccagctgctgcccctgtgcctgctgctgccccagccagcagcagtgaccctgctgctgctgctgctgccacagctgcccctggccagaccccagccagcgcccaggccccagcccagaccccagccccagccctgcccggccctgccctgcccggccccttccctgggggccgggtggtgcggctgcaccctgtgatcctggccagcatcgtggacagctatgaaagaagaaatgaaggagctgcccgggtgattggcaccctgctgggcaccgtggacaagcacagcgtggaggtgaccaactgcttctctgtgccccacaatgaaagtgaagatgaggtggccgtggacatggagtttgccaagaacatgtatgagctgcacaagaaggtgagccccaatgagctgatcctgggctggtacgccactggacatgacatcacagagcacagcgtgctgattcatgagtactacagccgggaggcccccaaccccatccacctgactgtggacaccagcctgcagaatggccgcatgagcatcaaggcctacgtgtccaccctgatgggcgtgcccggccgcaccatgggcgtgatgttcacccccctgactgtgaagtatgcctactatgacacagaaagaattggagtggacctgatcatgaagacctgcttcagccccaacagagtgattggcctgagcagtgacctgcagcaggtgggcggggccagcgcccgcatccaggatgccctgagcacagtgctgcagtatgcagaagatgtgctgagcggcaaggtgtctgctgacaacacagtgggccgcttcctgatgagcctggtgaaccaggtgcccaagatcgtgcctgatgactttgagaccatgctgaacagcaacatcaatgacctgctgatggtgacctacctggccaacctgacccagagccagatcgccctgaatgagaagctggtgaacctgtag

SEQ ID NO: 140585 - DNA, 627 bp, Artificial Sequence
  derived and/or modified sequence
atggagtttgccaagaacatgtatgagctgcacaagaaggtgagccccaatgaactcatcctgggctggtacgccaccggccatgacatcacagagcacagcgtgctgatccacgagtactacagccgggaggcccccaaccccatccacctgactgtggacaccagcctgcagaatggaaggatgagcatcaaggcctacgtgtccaccctgatgggcgtgcccggccgcaccatgggcgtgatgttcacccccctgactgtgaagtatgcctactatgacacagagcgcatcggcgtggacctgatcatgaagacctgcttcagccccaacagagtcatcggcctgagcagtgacctgcagcaggtgggcggggccagcgcccgcatccaggatgccctgagcacagtgctgcagtatgcagaagatgtgctgagcggcaaggtgtctgctgacaacacagtgggccgcttcctgatgagcctggtgaaccaggtgcccaagatcgtgcctgatgactttgagaccatgctgaacagcaacatcaatgacctgctgatggtgacctacctggccaacctgacccagagccagatcgccctgaatgagaagctggtgaacctgtag

SEQ ID NO: 140586 - DNA, 1119 bp, Artificial Sequence
  derived and/or modified sequence
atgaatgctgtgatcagcgccagcgccagcttcttcctggacaagatggccaccccagctgtgcctgtgtctgcccccccagccacccccacccctgtgcctgctgctgccccagcctctgtgcctgcccccaccccagccccagctgctgcccctgtgcctgctgctgccccagccagcagcagtgaccctgctgctgctgctgctgccacagctgcccctggccagaccccagccagcgcccaggccccagcccagaccccagccccagccctgcccggccctgccctgcccggccccttccctgggggccgggtggtgcggctgcaccctgtgatcctggccagcatcgtggacagctatgaaagaagaaatgaaggagctgcccgggtcatcggcaccctgctgggcaccgtggacaagcacagcgtggaggtgaccaactgcttctctgtgccccacaatgaaagtgaagatgaggtggccgtggacatggagtttgccaagaacatgtatgagctgcacaagaaggtgagccccaatgaactcatcctgggctggtacgccaccggccatgacatcacagagcacagcgtgctgatccacgagtactacagccgggaggcccccaaccccatccacctgactgtggacaccagcctgcagaatggaaggatgagcatcaaggcctacgtgtccaccctgatgggcgtgcccggccgcaccatgggcgtgatgttcacccccctgactgtgaagtatgcctactatgacacagagcgcatcggcgtggacctgatcatgaagacctgcttcagccccaacagagtcatcggcctgagcagtgacctgcagcaggtgggcggggccagcgcccgcatccaggatgccctgagcacagtgctgcagtatgcagaagatgtgctgagcggcaaggtgtctgctgacaacacagtgggccgcttcctgatgagcctggtgaaccaggtgcccaagatcgtgcctgatgactttgagaccatgctgaacagcaacatcaatgacctgctgatggtgacctacctggccaacctgacccagagccagatcgccctgaatgagaagctggtgaacctgtag

SEQ ID NO: 140587 - DNA, 924 bp, Artificial Sequence
  derived and/or modified sequence
atggccaccccagctgtgcctgtgtctgcccccccagccacccccacccctgtgcctgctgctgccccagccccagccctgcccggccctgccctgcccggccccttccctgggggccgggtggtgcggctgcaccctgtgatcctggccagcatcgtggacagctatgaaagaagaaatgaaggagctgcccgggtgattggcaccctgctgggcaccgtggacaagcacagcgtggaggtgaccaactgcttctctgtgccccacaatgaaagtgaagatgaggtggccgtggacatggagtttgccaagaacatgtatgagctgcacaagaaggtgagccccaatgagctgatcctgggctggtacgccactggacatgacatcacagagcacagcgtgctgattcatgagtactacagccgggaggcccccaaccccatccacctgactgtggacaccagcctgcagaatggccgcatgagcatcaaggcctacgtgtccaccctgatgggcgtgcccggccgcaccatgggcgtgatgttcacccccctgactgtgaagtatgcctactatgacacagaaagaattggagtggacctgatcatgaagacctgcttcagccccaacagagtgattggcctgagcagtgacctgcagcaggtgggcggggccagcgcccgcatccaggatgccctgagcacagtgctgcagtatgcagaagatgtgctgagcggcaaggtgtctgctgacaacacagtgggccgcttcctgatgagcctggtgaaccaggtgcccaagatcgtgcctgatgactttgagaccatgctgaacagcaacatcaatgacctgctgatggtgacctacctggccaacctgacccagagccagatcgccctgaatgagaagctggtgaacctgtag

SEQ ID NO: 140588 - DNA, 1074 bp, Artificial Sequence
  derived and/or modified sequence
atggccacccccgccgtgcccgtgagcgccccccccgccacccccactcccgtgcccgccgcggcccctgcttcagttcctgctccgacccccgcccccgccgctgctcctgtgcctgccgctgcccccgcttcatcttcagacccagccgccgccgcagcagccactgcagcccccgggcagacaccagcttctgctcaggctcctgcccaaactcccgcccccgccttgcctggcccagctcttcctggaccattccctggtggccgcgtggtgcgcttgcatcccgtgattcttgcgagcatagtcgattcctacgaacgaaggaacgaaggtgccgctcgcgtaatcggcacattgctgggcaccgtggataagcactctgttgaagtgaccaattgtttctcagtgccccacaatgagtcggaggacgaggtggcagtggatatggagtttgccaaaaatatgtatgaactccacaagaaggtgagcccaaacgagcttattctgggttggtacgccactgggcatgacatcactgagcatagcgtgctgattcacgagtactatagcagagaggcccccaatcctatacacctgaccgtcgacaccagcctccagaacggacgcatgtcgatcaaggcttacgtcagtaccctgatgggagtacccgggcggacaatgggcgtaatgtttacaccactgaccgtgaagtacgcctactacgacacagaaaggatcggggtcgatttgatcatgaaaacctgcttctcccctaaccgtgtgataggtctgtcctcagacttgcagcaggtggggggcgcctcagctagaatacaggatgctctcagcaccgtgttgcagtatgcagaagacgtcttgagcggaaaggtgagtgccgacaatactgtgggacgatttctcatgagtctcgtgaaccaggtacccaagatcgtgcccgatgattttgagactatgcttaactccaatatcaacgacttactaatggtgacctatttggcgaatctaacacagagccagatcgctcttaatgagaagcttgtgaacctctag

SEQ ID NO: 140589 - DNA, 627 bp, Artificial Sequence
  derived and/or modified sequence
atggagttcgccaagaacatgtacgagctgcacaagaaggtgagcccgaatgagttaatcctcggctggtacgcaacaggccatgacataactgagcattcagtcctgatacacgaatattattcccgcgaggcacctaaccccattcatcttactgtcgacacatccctgcagaacggccgcatgtccataaaggcttatgtcagcaccctgatgggggtgcccggccggacgatgggtgtaatgttcacccccctgactgtaaaatatgcttactacgataccgagagaatcggggtggacttgattatgaagacatgtttctctcctaacagggttatagggctgagcagtgacctgcagcaggtggggggcgcatccgctcgcattcaggacgcgctttcaacggtgctgcagtatgctgaagacgtccttagcggtaaagtgtccgcggacaatacggtgggcagattcctcatgtctctggtgaatcaggtaccaaagattgttcccgatgatttcgaaacgatgctgaactccaacatcaacgacctactgatggtgacttaccttgcaaacctgactcagagtcagattgccttgaatgaaaagctggtgaatctatag

SEQ ID NO: 140590 - DNA, 1074 bp, Artificial Sequence
  derived and/or modified sequence
atggccacccccgccgtgcccgtgagcgccccccccgccacccccactcctgtgccagccgctgctcccgctagcgtgccggcgccaacacccgccccagccgcagcaccggtgcctgcagccgcgcctgcttccagcagtgatcccgctgctgccgctgccgctacagctgcacccgggcagacacccgcatccgctcaagctccagcgcagacgcccgctcccgcgctgccgggccctgccctccctggccctttcccaggcggaagagtagtccgtctgcaccctgtgatcttggccagtatcgtagactcttacgagcggcgcaacgagggtgcagccagggttataggcactctgcttgggacagtggacaaacacagcgtcgaagtaaccaactgcttttccgtgcctcataatgaatctgaagatgaggtggccgtggatatggaattcgctaaaaacatgtacgaactccacaagaaagtatccccgaatgagcttattttgggatggtatgctacaggacacgacattacagaacattctgtccttatacatgaatattattctcgcgaagcaccgaatccaattcacctcacagtggataccagtctgcagaacggccggatgtccatcaaggcctacgtgagcactctgatgggagtgcccggccgaacaatgggtgtaatgtttaccccactgactgtgaagtatgcttattatgacaccgaacgtatcggagttgacctgattatgaaaacatgcttctctcctaaccgggtcattggcttgagtagcgatcttcaacaggtaggtggtgcatctgcacgcattcaggatgcattgagcaccgtgctccagtacgcagaagatgtgctgtctgggaaagtaagtgcggataataccgtcgggagatttctgatgtccttggtcaatcaggtaccaaaaattgtaccagacgattttgaaacaatgttaaattcaaatatcaatgacctgctgatggtaacatacctggccaacctgacccagagccagatcgcactcaacgaaaaactcgtgaatctctag

SEQ ID NO: 140591 - DNA, 1119 bp, Artificial Sequence
  derived and/or modified sequence
atgaacgccgtgatcagcgccagcgccagcttcttcctggacaagatggccacacctgcggtgcccgtgtctgctccacctgccactccaactcctgtacctgccgccgccccagcatctgtacccgccccaaccccagcacctgctgcggcccctgttccagctgccgcgcctgccagctcaagcgaccccgcagccgccgctgctgccacagcagctcctggacagactccggccagtgcgcaggcccccgctcagaccccagcccctgctctaccgggccctgcactccctggaccattcccaggtggccgagtggttcgtcttcatcccgtcatcctcgcaagcatcgttgattcgtatgaaagaaggaatgaaggcgctgccagggttattgggacactgcttgggactgtcgataagcactctgtcgaagtgacgaactgttttagtgtgcctcataacgagtcagaggatgaggtagcagtggacatggaattcgccaaaaacatgtacgagctgcataagaaggtatcccctaatgaactgatcctcgggtggtatgcgacaggccacgatataaccgagcactccgtgctcatacacgaatattactcaagagaggctcctaaccctattcacctcacagtggataccagtcttcagaacgggcgaatgtcgatcaaagcgtacgtgtccacgttgatgggtgtgccaggacggaccatgggtgttatgttcacacccctgactgtgaagtatgcctactacgatactgaaaggattggcgtggacctcatcatgaagacgtgcttttcccccaatagggtgattggcctgtcttctgacctgcaacaggtgggaggggcaagcgctcgcatccaagacgcactctctacagtgctccagtatgcggaggatgtgctgtccggaaaggtctccgctgacaacactgtcgggcgttttttgatgagcttggtgaatcaagtccccaagattgtccccgacgatttcgaaactatgctgaattctaatataaatgatctgctgatggtcacatatctggcaaatctgacacagtcacagattgctctgaacgagaagttagtcaacctgtag

SEQ ID NO: 140592 - DNA, 924 bp, Artificial Sequence
  derived and/or modified sequence
atggccacccccgccgtgcccgtgagcgccccccccgccacccccacccccgtgcctgccgcagctcccgcaccagcattaccaggaccagcactgcccgggcccttcccggggggacgcgtagtgagattacaccctgttatactcgcgagcattgtcgactcatacgaacggagaaatgaaggcgcggccagagtgatcgggaccctactgggcacagttgataaacacagcgttgaagtaacaaattgtttttctgtgccgcacaacgaatcagaggatgaagtcgcagttgacatggaattcgcaaagaatatgtacgagttgcataaaaaggtgtcccccaacgagttgattctgggctggtacgccactgggcacgacatcacagagcattctgtacttatacatgagtactatagccgggaggctccgaatcccatacacctgaccgtcgataccagcctgcagaatgggcggatgagcatcaaagcctacgtctcgaccctaatgggcgtgcccggaaggaccatgggggtgatgttcacacccctaactgtcaagtacgcttactatgacacggagagaattggcgtcgacttaattatgaagacttgctttagcccaaatagagtcatcggcctgtccagtgatctgcagcaagtcggcggagcctcggctaggatccaggacgcccttagtacggtacttcagtacgcggaggatgttctgagcggtaaggtatcagccgacaatacagtggggcgatttctcatgtctttagtaaatcaggttcccaaaattgttcccgacgacttcgagactatgttaaacagcaatatcaatgacctgctcatggtaacctatctcgctaatctgacccagtcccagatcgcattgaatgaaaagctggtcaatctctag

SEQ ID NO: 140593 - DNA, 1074 bp, Artificial Sequence
  derived and/or modified sequence
atggcaacacctgctgtgcccgtgagcgcacccccagccacaccaaccccagtgcccgctgcagccccagcatcggtgcctgcacctacgcctgctccggctgccgcaccagtgccggctgcagcacccgcttcgagttctgatcctgcagcagctgctgctgcaactgccgctcccggtcagactcctgctagcgcacaggccccagcccagacaccagcacctgcccttcccggaccagccctgcccggacctttccccggtggccgagtggtgcggttgcaccccgtgatattagcctcaatagtggattcttatgaacgcagaaacgagggcgctgctagggtcattgggaccttgctagggacagttgacaagcactctgtggaggtaaccaattgcttttccgtgccccacaatgagagtgaggacgaggtggcagtagacatggagtttgccaagaacatgtacgagttgcacaaaaaggtgagtccgaacgagctgatccttgggtggtatgcaaccgggcatgatattacagagcattccgttctcatccacgagtactacagcagagaagcgcctaaccccatccacctcaccgtcgacacgagcctacaaaacggaaggatgtcgatcaaggcctacgtcagcacactgatgggtgtcccaggcaggaccatgggcgttatgtttactccccttaccgtgaaatacgcctactacgacacggaaaggatcggtgtcgatcttatcatgaagacatgcttcagccccaatagggttattggcctttcttctgacctccaacaggttggtggggctagtgctcgcattcaggatgccctaagcaccgttcttcagtatgccgaggatgtcctgagtggaaaggtctctgccgataacaccgtggggcgattcctgatgtcgctcgtgaaccaggtccccaagatcgtccctgatgactttgagactatgctaaactccaatatcaacgacctgctgatggtgacctacctggccaacctgacacagagccaaattgctctgaacgaaaagctggtaaacctctag

SEQ ID NO: 140594 - DNA, 627 bp, Artificial Sequence
  derived and/or modified sequence
atggaatttgcaaaaaacatgtatgagcttcacaaaaaagtgagtcctaatgagctcatcttaggatggtacgccaccggtcatgacatcacagagcactccgtcttgattcacgagtattattctagagaggccccaaatcccatccacctcaccgtggatactagtttacagaacggaaggatgtctataaaggcatacgtgagcacattgatgggggttcctggacgaacaatgggtgttatgttcactcccctcactgtcaagtacgcttactacgacaccgagagaattggcgtggaccttatcatgaagacttgtttctctccaaatagggtcataggcctcagctcggacctgcagcaggtgggcggtgcctccgccaggatacaggatgcactcagcacggtgctgcagtacgcagaagatgtcttaagcggaaaggtgtctgcggataacaccgtggggagatttctaatgtcactggtgaatcaggtgccaaaaatcgttcctgatgactttgaaactatgttaaattccaatattaatgatcttcttatggtcacctatctcgccaacttgacgcagagccagattgcgctcaatgaaaagctggttaacttgtag

SEQ ID NO: 140595 - DNA, 1074 bp, Artificial Sequence
  derived and/or modified sequence
atggcaacaccagcagtgcccgtgtctgccccacccgcaacccctactcctgttcctgcagctgctcctgccagtgttccggctcccacaccagctcctgctgccgcaccagtacctgcggcagctccagcttctagttccgatcctgccgctgcagctgccgctacagccgcacccggacaaacaccagcgtctgcacaggcacccgctcagacacccgctcccgcattacccggaccagctctgccaggtcctttccctggaggccgtgtcgtccgtctacaccccgtgatacttgcctccatcgtggacagttacgaacgcagaaatgaaggagccgcacgcgttattggaacattacttgggacggtggacaagcattccgtcgaggtcaccaattgtttctcagtgcctcacaatgaatcggaagatgaagtcgccgttgatatggagtttgcaaagaatatgtacgaactgcacaaaaaagtctcccctaacgagctcattctgggctggtacgcaacggggcacgatattaccgagcatagtgtgttaattcacgaatattatagtcgcgaagcacctaatcccatccacttgactgtggacacttccctgcagaatggccgaatgagcataaaagcctacgtgtcaacccttatgggcgtgcccggaagaacaatgggggtgatgtttacgcccctgactgtgaagtatgcctactatgatacagaacgaattggagtggatctcataatgaagacttgcttctccccaaacagggtcatcgggcttagttcagatctgcaacaggtcggaggcgcatcagccaggatacaggacgctttatccactgttctgcagtacgcggaagatgttctgagtgggaaggtctctgccgataatacagtaggtcgatttctgatgtctttagttaaccaagtgccgaagatcgtccctgatgacttcgaaacaatgctgaacagcaatatcaacgacctgctcatggtgacatacctggctaatctcacacagagccagattgcacttaacgaaaaactggttaacctttag

SEQ ID NO: 140596 - DNA, 1119 bp, Artificial Sequence
  derived and/or modified sequence
atgaatgcagtgatttccgcatctgccagcttctttcttgacaaaatggctactcctgctgtgccagtgtctgccccaccagctacccctacgcctgtacccgctgctgccccagcttctgtgcctgccccaactccagccccagccgcagctcctgtgccagcagccgctcccgcttcaagctccgatcctgcagccgcagccgctgccactgccgctcccggacaaacgccagccagcgcgcaggccccagctcagactcctgcaccggctctgccgggacccgcacttccaggcccattccctggtggaagagtggtccgtctgcacccagttatcctggcatccatcgtggattcttatgagcgcaggaatgaaggtgctgctagagtcatcgggactctgcttgggaccgtcgacaaacattccgtcgaggtgaccaattgtttttcagtgccccacaatgagtctgaagatgaggttgcagtggatatggagtttgccaagaatatgtacgagctgcacaaaaaggtctcccctaacgagctgatcctcggatggtacgcaactgggcacgatataacggaacacagcgtcttaattcacgagtactactctcgcgaggcaccgaacccaatccacctcactgtcgatacatccctccagaatggtcgaatgtctattaaagcctacgtttcaaccttaatgggagtacctggacggactatgggggtcatgttcactcccttaaccgtgaaatatgcatattatgataccgagaggatcggagtggacctgataatgaaaacctgcttctccccaaatcgagtgattggcttgtccagcgacttgcaacaggttggaggcgcaagcgctcgcattcaggatgcactaagcacggtcctgcaatatgccgaagatgtcttaagtgggaaagttagcgccgataacaccgtgggcaggtttttaatgtccttagttaatcaagtaccgaagatcgtgcccgatgactttgaaacgatgctaaatagtaatatcaacgacctgctgatggtgacctatctcgctaatcttacacagtctcagattgcactgaatgagaaactcgttaacctgtag

SEQ ID NO: 140597 - DNA, 924 bp, Artificial Sequence
  derived and/or modified sequence
atggccacgccagctgtgccggtgtctgcccctcctgccactccaacccccgtaccagccgctgctcctgctcccgcactacctggcccagccttacctggtccattccctgggggaagagtcgttaggttacacccggtcattttagcttctatcgtcgactcttatgagagaagaaacgagggtgctgcacgcgtaataggaacactgctcggcactgtagataaacattcagtagaggtgacgaactgtttctcggttcctcacaatgagtccgaagacgaagttgccgtagacatggagtttgcgaagaacatgtacgagctccataaaaaagtgtctccaaatgaattaattctgggttggtatgcgaccggtcacgacatcactgagcatagtgtgcttattcacgaatactatagccgcgaagcccctaaccctatacatcttaccgtcgacacgtccctgcaaaacggacgaatgtccatcaaggcctacgttagcacactgatgggagtcccaggacgcactatgggagtgatgtttacaccacttactgtgaagtatgcatactatgatacggagcgaattggtgtggacctcatcatgaagacatgcttttctcctaatcgagtgataggactgtcttcggacttgcaacaagtgggcggtgccagtgcccgtatccaggacgcgctgtctacggttttacagtatgctgaggatgtacttagtggtaaggtgagcgcagataataccgtcggccgattcttgatgagcctcgtgaaccaagtccccaagattgttccagacgacttcgagaccatgctaaattcgaacattaatgatctgctgatggtgacttatctcgccaacctcacccagagccagatagccctgaatgagaagctggtcaacctgtag

SEQ ID NO: 140598 - DNA, 1074 bp, Artificial Sequence
  derived and/or modified sequence
atggccacccccgccgtgcccgtgagcgccccccccgccacccccacccccgtgcccgccgccgcccccgccagcgtgcccgcccccacccccgcccccgccgccgcccccgtgcccgccgccgcccccgccagcagcagcgaccccgccgccgccgccgccgccaccgccgcccccggccagacccccgccagcgcccaggcccccgcccagacccccgcccccgccctgcccggccccgccctgcccggccccttccccggcggcagagtggtgagactgcaccccgtgatcctggccagcatcgtggacagctacgagagaagaaacgagggcgccgccagagtgatcggcaccctgctgggcaccgtggacaagcacagcgtggaggtgaccaactgcttcagcgtgccccacaacgagagcgaggacgaggtggccgtggacatggagttcgccaagaacatgtacgagctgcacaagaaggtgagccccaacgagctgatcctgggctggtacgccaccggccacgacatcaccgagcacagcgtgctgatccacgagtactacagcagagaggcccccaaccccatccacctgaccgtggacaccagcctgcagaacggcagaatgagcatcaaggcctacgtgagcaccctgatgggcgtgcccggcagaaccatgggcgtgatgttcacccccctgaccgtgaagtacgcctactacgacaccgagagaatcggcgtggacctgatcatgaagacctgcttcagccccaacagagtgatcggcctgagcagcgacctgcagcaggtgggcggcgccagcgccagaatccaggacgccctgagcaccgtgctgcagtacgccgaggacgtgctgagcggcaaggtgagcgccgacaacaccgtgggcagattcctgatgagcctggtgaaccaggtgcccaagatcgtgcccgacgacttcgagaccatgctgaacagcaacatcaacgacctgctgatggtgacctacctggccaacctgacccagagccagatcgccctgaacgagaagctggtgaacctgtag

SEQ ID NO: 140599 - DNA, 627 bp, Artificial Sequence
  derived and/or modified sequence
atggagttcgccaagaacatgtacgagctgcacaagaaggtgagccccaacgagctgatcctgggctggtacgccaccggccacgacatcaccgagcacagcgtgctgatccacgagtactacagcagagaggcccccaaccccatccacctgaccgtggacaccagcctgcagaacggcagaatgagcatcaaggcctacgtgagcaccctgatgggcgtgcccggcagaaccatgggcgtgatgttcacccccctgaccgtgaagtacgcctactacgacaccgagagaatcggcgtggacctgatcatgaagacctgcttcagccccaacagagtgatcggcctgagcagcgacctgcagcaggtgggcggcgccagcgccagaatccaggacgccctgagcaccgtgctgcagtacgccgaggacgtgctgagcggcaaggtgagcgccgacaacaccgtgggcagattcctgatgagcctggtgaaccaggtgcccaagatcgtgcccgacgacttcgagaccatgctgaacagcaacatcaacgacctgctgatggtgacctacctggccaacctgacccagagccagatcgccctgaacgagaagctggtgaacctgtag

SEQ ID NO: 140600 - DNA, 1119 bp, Artificial Sequence
  derived and/or modified sequence
atgaacgccgtgatcagcgccagcgccagcttcttcctggacaagatggccacccccgccgtgcccgtgagcgccccccccgccacccccacccccgtgcccgccgccgcccccgccagcgtgcccgcccccacccccgcccccgccgccgcccccgtgcccgccgccgcccccgccagcagcagcgaccccgccgccgccgccgccgccaccgccgcccccggccagacccccgccagcgcccaggcccccgcccagacccccgcccccgccctgcccggccccgccctgcccggccccttccccggcggcagagtggtgagactgcaccccgtgatcctggccagcatcgtggacagctacgagagaagaaacgagggcgccgccagagtgatcggcaccctgctgggcaccgtggacaagcacagcgtggaggtgaccaactgcttcagcgtgccccacaacgagagcgaggacgaggtggccgtggacatggagttcgccaagaacatgtacgagctgcacaagaaggtgagccccaacgagctgatcctgggctggtacgccaccggccacgacatcaccgagcacagcgtgctgatccacgagtactacagcagagaggcccccaaccccatccacctgaccgtggacaccagcctgcagaacggcagaatgagcatcaaggcctacgtgagcaccctgatgggcgtgcccggcagaaccatgggcgtgatgttcacccccctgaccgtgaagtacgcctactacgacaccgagagaatcggcgtggacctgatcatgaagacctgcttcagccccaacagagtgatcggcctgagcagcgacctgcagcaggtgggcggcgccagcgccagaatccaggacgccctgagcaccgtgctgcagtacgccgaggacgtgctgagcggcaaggtgagcgccgacaacaccgtgggcagattcctgatgagcctggtgaaccaggtgcccaagatcgtgcccgacgacttcgagaccatgctgaacagcaacatcaacgacctgctgatggtgacctacctggccaacctgacccagagccagatcgccctgaacgagaagctggtgaacctgtag

SEQ ID NO: 140601 - DNA, 924 bp, Artificial Sequence
  derived and/or modified sequence
atggccacccccgccgtgcccgtgagcgccccccccgccacccccacccccgtgcccgccgccgcccccgcccccgccctgcccggccccgccctgcccggccccttccccggcggcagagtggtgagactgcaccccgtgatcctggccagcatcgtggacagctacgagagaagaaacgagggcgccgccagagtgatcggcaccctgctgggcaccgtggacaagcacagcgtggaggtgaccaactgcttcagcgtgccccacaacgagagcgaggacgaggtggccgtggacatggagttcgccaagaacatgtacgagctgcacaagaaggtgagccccaacgagctgatcctgggctggtacgccaccggccacgacatcaccgagcacagcgtgctgatccacgagtactacagcagagaggcccccaaccccatccacctgaccgtggacaccagcctgcagaacggcagaatgagcatcaaggcctacgtgagcaccctgatgggcgtgcccggcagaaccatgggcgtgatgttcacccccctgaccgtgaagtacgcctactacgacaccgagagaatcggcgtggacctgatcatgaagacctgcttcagccccaacagagtgatcggcctgagcagcgacctgcagcaggtgggcggcgccagcgccagaatccaggacgccctgagcaccgtgctgcagtacgccgaggacgtgctgagcggcaaggtgagcgccgacaacaccgtgggcagattcctgatgagcctggtgaaccaggtgcccaagatcgtgcccgacgacttcgagaccatgctgaacagcaacatcaacgacctgctgatggtgacctacctggccaacctgacccagagccagatcgccctgaacgagaagctggtgaacctgtag

SEQ ID NO: 140602 - protein, 366 aa, Artificial Sequence
  derived and/or modified sequence
MYSRHAQRIPPGKKMASRKEGTGSTATSSSSTAGAAGKGKGKGGSGDSAVKQVQIDGLVVLKIIKHYQEEGQGTEVVQGVLLGLVVEDRLEITNCFPFPQHTEDDADFDEVQYQMEMMRSLRHVNIDHLHVGWYQSTYYGSFVTRALLDSQFSYQHAIEESVVLIYDPIKTAQGSLSLKAYRLTPKLMEVCKEKDFSPEALKKANITFEYMFEEVPIVIKNSHLINVLMWELEKKSAVADKHELLSLASSNHLGKNLQLLMDRVDEMSQDIVKYNTYMRNTSKQQQQKHQYQQRRQQENMQRQSRGEPPLPEEDLSKLFKPPQPPARMDSLLIAGQINTYCQNIKEFTAQNLGKLFMAQALQEYNN

SEQ ID NO: 140603 - protein, 352 aa, Artificial Sequence
  derived and/or modified sequence
MASRKEGTGSTATSSSSTAGAAGKGKGKGGSGDSAVKQVQIDGLVVLKIIKHYQEEGQGTEVVQGVLLGLVVEDRLEITNCFPFPQHTEDDADFDEVQYQMEMMRSLRHVNIDHLHVGWYQSTYYGSFVTRALLDSQFSYQHAIEESVVLIYDPIKTAQGSLSLKAYRLTPKLMEVCKEKDFSPEALKKANITFEYMFEEVPIVIKNSHLINVLMWELEKKSAVADKHELLSLASSNHLGKNLQLLMDRVDEMSQDIVKYNTYMRNTSKQQQQKHQYQQRRQQENMQRQSRGEPPLPEEDLSKLFKPPQPPARMDSLLIAGQINTYCQNIKEFTAQNLGKLFMAQALQEYNN

SEQ ID NO: 140604 - DNA, 2041 bp, Artificial Sequence
  derived and/or modified sequence
aggcgcgtagcaagagcttctctgaaagactggcagtatagtagtagtcagtgataatattgagccttaatatgttccagacactgtcctaagtgatttaccttacattattcccctgaatgtttataattcccaagtgaaagaaggaaatgatatattggatagctatgagtggggaggtttgtactggctgctttcccataaagaaattaagcacgttcacgaagggcacgtagtttgttagtgtctggaacccagttttcgtgcctgaagttcaaatgttcttgctacaccaccatagaaactaacgtcactcaggaaccatttgtcagggcaaagggtgccaccattttgcatttcctcctgccttaggaccatcctaaatcactcgcatggagtgttttggaagaactctcaagagcttcgtttgcctagagtcagaattcctaaccttgagtcctggttttgccacaaacccaagccgtttgatcttgggcaactcccgaagaaagctgggttcaacttcctcactgtcaaactggttgtaggtctagataagtttcaagtactctttttatgtgcatggtctctgacataggaagactacatactgggccagtaacaggaaggcacaaagctgactggaggtttaaaaattacttggtcaatttgattaatgaggagaatgaatcagaaaatttcaagttctcccgtggctaactgtcgagtatccacttcaagatcattccatcggaaagaggtcgaaaatgtacagtaggcatgcacaaaggataccgcctggaaagaagatggcgtcccgcaaggaaggtaccggctctactgccacctcttccagctccaccgccggcgcagcagggaaaggcaaaggcaaaggcggctcgggagattcagccgtgaagcaagtgcagatagatggccttgtggtattaaagataatcaaacattatcaagaagaaggacaaggaactgaagttgttcaaggagtgcttttgggtctggttgtagaagatcggcttgaaattaccaactgctttcctttccctcagcacacagaggatgatgctgactttgatgaagtccaatatcagatggaaatgatgcggagccttcgccatgtaaacattgatcatcttcacgtgggctggtatcagtccacatactatggctcattcgttacccgggcactcctggactctcagtttagttaccagcatgccattgaagaatctgtcgttctcatttatgatcccataaaaactgcccaaggatctctctcactaaaggcatacagactgactcctaaactgatggaagtttgtaaagaaaaggatttttcccctgaagcattgaaaaaagcaaatatcacctttgagtacatgtttgaagaagtgccgattgtaattaaaaattcacatctgatcaatgtcctaatgtgggaacttgaaaagaagtcagctgttgcagataaacatgaattgctcagccttgccagcagcaatcatttggggaagaatctacagttgctgatggacagagtggatgaaatgagccaagatatagttaaatacaacacatacatgaggaatactagtaaacaacagcagcagaaacatcagtatcagcagcgtcgccagcaggagaatatgcagcgccagagccgaggagaacccccgctccctgaggaggacctgtccaaactcttcaaaccaccacagccgcctgccaggatggactcgctgctcattgcaggccagataaacacttactgccagaacatcaaggagttcactgcccaaaacttaggcaagctcttcatggcccaggctcttcaagaatacaacaactaagaaaaggaagtttccagaaaagaagttaacatgaactcttgaagtcacaccagggcaactcttggaagaaatatatttgcatattgaaaagcacagaggatttctttagtgtcattgccgattttggctataacagtgtctttctagccataataaaataaaacaaaatcttg

SEQ ID NO: 140605 - DNA, 3959 bp, Artificial Sequence
  derived and/or modified sequence
ctttcttcctgtctgcttggaaagatggcgtcccgcaaggaaggtaccggctctactgccacctcttccagctccaccgccggcgcagcagggaaaggcaaaggcaaaggcggctcgggagattcagccgtgaagcaagtgcagatagatggccttgtggtattaaagataatcaaacattatcaagaagaaggacaaggaactgaagttgttcaaggagtgcttttgggtctggttgtagaagatcggcttgaaattaccaactgctttcctttccctcagcacacagaggatgatgctgactttgatgaagtccaatatcagatggaaatgatgcggagccttcgccatgtaaacattgatcatcttcacgtgggctggtatcagtccacatactatggctcattcgttacccgggcactcctggactctcagtttagttaccagcatgccattgaagaatctgtcgttctcatttatgatcccataaaaactgcccaaggatctctctcactaaaggcatacagactgactcctaaactgatggaagtttgtaaagaaaaggatttttcccctgaagcattgaaaaaagcaaatatcacctttgagtacatgtttgaagaagtgccgattgtaattaaaaattcacatctgatcaatgtcctaatgtgggaacttgaaaagaagtcagctgttgcagataaacatgaattgctcagccttgccagcagcaatcatttggggaagaatctacagttgctgatggacagagtggatgaaatgagccaagatatagttaaatacaacacatacatgaggaatactagtaaacaacagcagcagaaacatcagtatcagcagcgtcgccagcaggagaatatgcagcgccagagccgaggagaacccccgctccctgaggaggacctgtccaaactcttcaaaccaccacagccgcctgccaggatggactcgctgctcattgcaggccagataaacacttactgccagaacatcaaggagttcactgcccaaaacttaggcaagctcttcatggcccaggctcttcaagaatacaacaactaagaaaaggaagtttccagaaaagaagttaacatgaactcttgaagtcacaccagggcaactcttggaagaaatatatttgcatattgaaaagcacagaggatttctttagtgtcattgccgattttggctataacagtgtctttctagccataataaaataaaacaaaatcttgactgcttgctcatttgattttagatgtattttctctggcttacttttgtttgcttatacttgtttatttctaaaagctaaaacaagccctgaccggaagtttcaccaggcagaaacctataggctccaccacttttgctgcctctcaggtgccacctttcaacccacttctcccaactacttatcccagctcctgaccccgaggccctggcatctactgtgaatattttttttttgaatttttatacttcgctgctcccaaatgagcaccccgagagaagtccaggcttcatgtacttgcccaggaattccttgtccccggacccggaatcacttggcctaattccggtcagtctgccttttcatttctgcaggtgatggtcaaccagtccccgtactcataggccatgggacacaagattattattatcatcattatttttaaagacagagtctcactttgttgcccaggctggagtgtagtggcacaatctcagctcgctgcaacctccaccttctgagttcaagcgattctcccacctcagcctcccaagtagctgggactacaggcgtgtgccatcacgcctggctaatttttgtatttttagtagagatggggtttcaccatgttggccaggctggtctgcatctcctgacctcaagtgattcacctgcttctgtctcccaaagtgctgggaatacaggcatgagccaccactcctggacaggccacagaaattttaaagaaaagaatcatgccaccacaagtaaacttcattttgtttatattatttaggacttcacatttgtcttccgaaaccatgaagtataattctgctaacagcaagtgttgtgaatgaggaattaggaattaggagaatggtagtacattgggaaaaacatattttagtaatttttatattttaaagataatcacagattttgctgtttgtgcatcaccaaaatcagtgagatctgccagctggtgggggtgtgcctatgagaatttttgattatgatcccctaggagggttatcaaaaaaggagatgggtgaaagatcaggagagtcgagaaattcattttttggacaacattgttttgaaggcactactggggctctgggatcaggcagccagattgaaacctggctcctccttttcctaagttatttaacctccctgtgcctcactttttgtcaaccagataagataagaaatgagagcaggtctgttacctcacaaggtggctgtgagtgttgaagacgtttgttgggggtttgggtgaagcatgcaaactctggttggtatgtggcagccactcagcctgtatttatgatgagggaggcattctaggcaccccttccaggatgttgggttgttggctgggttttactttaaaaagctcagggcctagaacattctagaatccaagtacttgctcacatatataattatttctttaggataatctttgatatagacttacgagtcaaagggtatgtaaaatgtcagcccttttacctgtattgccaaattgccttcaaaagtttctgctgttttgccctcctacccatagtgataaccttaaattggagtcaacacaaatttgagtgtgactgtgttagacagaagggatatattaacaggtaaaactggccatggcccctgcccttgtggagtatatgctctgttggttcatttcctctgcattctaattttctagacttgggatcttattgtggagttaaacaaagcacccttaaagtagcaagcgagcaaaataaaagcaaggaaaatcagttggaacataacttatgtattttttaggattaagagtaatttaactgagtcaattcaatatgtttttaaaggtgtgattcttaaattctttatgattgtttagatttctatatcttggtaacatgaatacacacttaatgaaagatttcagtaatttttgatttgggaattaatcatagtgggaaaaactgtttaggaaaacatgtcagtggaaattaactcgccacagtatgtagtgttagggaatagcttctgttcggcatttgatttgagtgctgtattctgacatttttcaggaacaaatacatgtgattcatcttctataaatatttgcagtttcttcaagttgaaatgagaaaagctcgtaaattgagcaccaggtctaataaatcattcacttacccaagaacagaaagacaggaaaagctagcatgttaatctaatgaaaaaatcgaatgttaaaaaaccaagaaagtagaagatatttgacattaactttctaatcattgataataatctaataatcataacattattcttaaaacctgaaagaatggattcctgctcccaatgtgtttttaatatcaacttaaactaaaataatttttttacctatttttggaagcttggaaattgagatgtagttgtctaatgttaacctaattaagagagcttggtgtgatttctcatatacagcatctaaatatttaagttttaatgtcttctaaaatattattacattcttcatactatagttttttaacatcctttagaaaacttgtatcagcttcactttcaaaccatgctggcatcgaactcaggtgtagtggtatcagaatgttatgaaataattttttattttcattataaactccatttttacaataaacacttctcaaccaaa

SEQ ID NO: 140606 - DNA, 1101 bp, Artificial Sequence
  derived and/or modified sequence
atgtattcccgccatgctcaaagaatccctccaggcaaaaaaatggcctcccgtaaggagggcacagggagcaccgctacttcttccagtagtactgctggtgccgctggtaaggggaagggcaaaggaggtagcggtgattctgccgtcaagcaggtgcagatagatgggctggtggtcctcaagattatcaagcactaccaagaggaaggccagggcactgaagttgtccaaggtgtgctcttggggctggtcgttgaggatcgcctggaaataaccaattgttttccatttcctcagcataccgaagatgatgcagattttgacgaagtacaataccagatggagatgatgaggagccttcgacatgtcaatattgaccacctacacgtggggtggtatcagtcaacgtactacgggtctttcgtcacacgagcactgcttgacagccagtttagctatcaacatgcaattgaagagtctgttgttctgatatacgatccaattaagacggcccagggtagtttgagccttaaggcttatcgccttacacccaagctgatggaggtatgcaaggagaaggatttcagtcctgaggccctcaagaaggccaatattacctttgagtacatgttcgaggaggtcccaatcgtaataaaaaattcccatctcataaatgtactgatgtgggagttggaaaagaaatcagcagtggccgacaagcacgagctcttaagcctagcgagtagcaaccacctcggcaagaacttgcagctgttgatggaccgcgttgacgaaatgtctcaggatattgtgaaatataatacatacatgcggaataccagtaagcagcaacaacagaaacatcagtatcagcagagacgccaacaggaaaacatgcagcggcagagtaggggcgagccaccgctccctgaagaggacttgtctaaactctttaagcctccccagcctccagctaggatggactccctgctgatcgcaggccaaatcaacacatattgtcagaatatcaaggaatttactgcccagaatttgggcaagctgttcatggcccaggcattgcaggagtacaataactag

SEQ ID NO: 140607 - DNA, 1059 bp, Artificial Sequence
  derived and/or modified sequence
atggccagccggaaagagggtacaggaagtactgccacgagctcttctagcacagcgggcgccgcagggaaaggaaaggggaaggggggcagtggggatagcgcggtaaagcaggtccaaatagacggactggtcgtcctgaagatcatcaaacattaccaggaagaaggacagggaaccgaggtagtccagggggttctgttggggttggtggtggaggataggctggaaatcactaactgctttccttttccgcaacataccgaggatgatgcagattttgatgaagtgcagtaccagatggaaatgatgcgctcactgcgccacgtgaatatcgaccacctccacgtggggtggtaccagtccacctattacggctcctttgtgacccgggccctgctcgatagccagtttagttaccagcacgcgatcgaggagtcagttgtcctgatctacgatcctattaagacagcccaagggtctctgtcactcaaggcctaccgactgacccccaagctcatggaggtctgcaaagaaaaagacttctcccctgaagcacttaagaaagcaaacattacattcgaatacatgtttgaggaggtcccaattgtgatcaagaatagccaccttatcaacgtgctgatgtgggagctggagaagaagtccgccgttgccgacaagcatgagctcttaagcctggcctcttccaatcatctggggaagaacttacagctcctaatggaccgggtagatgaaatgagccaggacatcgtgaagtacaatacatacatgcgcaatacaagcaaacagcagcagcagaagcaccagtaccaacaacggcggcagcaggagaatatgcagcggcagtcaagaggcgagccacccctcccagaagaggatttgtcaaaactctttaagcctccacagcctcctgccaggatggacagtctgctaatagccgggcagatcaacacatactgtcagaacataaaggaattcactgcgcagaaccttgggaaactgttcatggcccaggcactacaggaatacaataactag

SEQ ID NO: 140608 - DNA, 1101 bp, Artificial Sequence
  derived and/or modified sequence
atgtacagcagacatgcccagaggatccccccaggcaagaagatggccagcaggaaggagggcaccggcagcacagccaccagcagcagcagcacagctggagctgctgggaagggcaagggcaagggcggcagcggggacagcgctgtgaagcaggtgcagattgatggcctggtggtgctgaagatcatcaagcactaccaggaggagggccagggcacagaggtggtgcagggcgtgctgctgggcctggtggtggaggaccggctggagatcaccaactgcttccccttcccccagcacacagaagatgatgctgactttgatgaggtgcagtaccagatggagatgatgaggagcctgcggcacgtgaacatcgaccacctgcacgtgggctggtaccagagcacctactacggcagctttgtgacccgggccctgctggacagccagttctcctaccagcacgccatcgaggagagcgtggtgctgatctatgaccccatcaagacagcccagggcagcctgagcctgaaggcctaccgcctgacccccaagctgatggaggtgtgcaaggagaaggacttcagccctgaggccctgaagaaggccaacatcacctttgagtacatgtttgaggaggtgcccatcgtcatcaagaacagccacctgatcaacgtgctgatgtgggagctggagaagaagtctgctgtggccgacaagcatgagctgctgagcctggccagcagcaaccacctgggcaagaacctgcagctgctgatggacagagtggatgagatgagccaggacatcgtgaagtacaacacctacatgaggaacaccagcaagcagcagcagcagaagcaccagtaccagcagaggcggcagcaggagaacatgcagaggcagagcagaggagagccccccctgcctgaggaggacctgagcaagctgttcaagccaccccagcccccagccaggatggacagcctgctgattgctggccagatcaacacctactgccagaacatcaaggagttcaccgcccagaacctgggcaagctgttcatggcccaggccctgcaggagtacaacaactag

SEQ ID NO: 140609 - DNA, 1059 bp, Artificial Sequence
  derived and/or modified sequence
atggccagcaggaaggagggcaccggcagcacagccaccagcagcagcagcacagctggagctgctgggaagggcaagggcaagggcggcagcggggacagcgctgtgaagcaggtgcagattgatggcctggtggtgctgaagatcatcaagcactaccaggaggagggccagggcacagaggtggtgcagggcgtgctgctgggcctggtggtggaggaccggctggagatcaccaactgcttccccttcccccagcacacagaagatgatgctgactttgatgaggtgcagtaccagatggagatgatgaggagcctgcggcacgtgaacatcgaccacctgcacgtgggctggtaccagagcacctactacggcagctttgtgacccgggccctgctggacagccagttctcctaccagcacgccatcgaggagagcgtggtgctgatctatgaccccatcaagacagcccagggcagcctgagcctgaaggcctaccgcctgacccccaagctgatggaggtgtgcaaggagaaggacttcagccctgaggccctgaagaaggccaacatcacctttgagtacatgtttgaggaggtgcccatcgtcatcaagaacagccacctgatcaacgtgctgatgtgggagctggagaagaagtctgctgtggccgacaagcatgagctgctgagcctggccagcagcaaccacctgggcaagaacctgcagctgctgatggacagagtggatgagatgagccaggacatcgtgaagtacaacacctacatgaggaacaccagcaagcagcagcagcagaagcaccagtaccagcagaggcggcagcaggagaacatgcagaggcagagcagaggagagccccccctgcctgaggaggacctgagcaagctgttcaagccaccccagcccccagccaggatggacagcctgctgattgctggccagatcaacacctactgccagaacatcaaggagttcaccgcccagaacctgggcaagctgttcatggcccaggccctgcaggagtacaacaactag

SEQ ID NO: 140610 - DNA, 1101 bp, Artificial Sequence
  derived and/or modified sequence
atgtacagccggcacgcccagcggatcccccccggcaagaagatggctagtcgtaaggagggtaccggttctaccgctaccagttcttcgtctaccgccggcgcagcgggtaaaggtaaaggtaaaggaggctccggcgacagtgcagtgaaacaagttcagatcgacgggcttgttgtgctgaagatcatcaaacattaccaggaagagggacagggaaccgaagttgtgcagggggtgttgttagggcttgtggtcgaagaccggctcgagataacaaattgtttccctttcccacagcacaccgaggatgacgctgattttgatgaggtacagtaccaaatggagatgatgcgatcgctccggcatgttaacattgaccatctgcatgtgggatggtatcaaagcacttactatggaagcttcgtaacccgagccctgctggatagccaattttcttatcagcatgccatcgaagaatctgttgtgctgatatacgaccccatcaagactgcccaaggctctctttctctgaaggcctatcggctcacccccaaactcatggaagtctgcaaggagaaggatttctctccagaagctctgaaaaaggccaatatcacatttgagtatatgtttgaggaagtgcctatagttattaagaattcccatttgattaatgttctgatgtgggaactcgaaaaaaaaagcgcggttgctgacaagcacgagctactgtccctggcctctagtaatcacctcgggaagaacctgcagttgttgatggacagagtggacgagatgagccaggatatcgtcaagtacaacacctacatgaggaatacctcaaaacagcaacaacagaagcatcagtaccagcaacgtcgacagcaggaaaatatgcagagacagtcccgaggtgagcctccgctgccggaagaggacttaagtaagctgttcaagccaccgcaaccccctgcaagaatggattctcttctgatagccgggcagataaatacttattgccagaacatcaaagagtttacagcccagaatcttgggaagctgtttatggcccaggctctgcaagagtataataactag

SEQ ID NO: 140611 - DNA, 1059 bp, Artificial Sequence
  derived and/or modified sequence
atggccagccggaaggagggcaccggcagcaccgccaccagcagcagcagcaccgcaggtgcggcagggaaaggaaaaggtaagggaggttccggcgatagcgccgtcaaacaggtgcagatcgacggccttgtggtcctgaaaataatcaaacattaccaggaggagggccagggcaccgaagtggtccagggggtcctgcttgggctcgtcgtcgaagaccggctggaaatcacaaactgtttccctttcccacagcacacggaagacgacgccgattttgacgaggttcagtatcaaatggagatgatgagatctcttcgtcacgtaaacatcgatcaccttcatgttggctggtatcaatccacatattatgggtcttttgtcacgagagccttattagactctcagttttcataccagcatgcaatagaagaaagcgtggtgctgatttatgatcctataaaaactgctcagggaagtctctccctgaaagcataccgcctaacccctaaattaatggaggtctgcaaggaaaaggatttctctcctgaggccctcaagaaagctaatattacgtttgaatatatgtttgaagaggtgccgatcgtgataaagaattcccatcttatcaacgtgttaatgtgggaactcgagaaaaagagcgcagtcgcggataagcacgaactgctcagcctcgcctcctcaaaccatctggggaaaaatctgcagctcctaatggaccgcgtggacgaaatgtcacaggacattgtgaagtataatacttatatgcggaacacgtccaagcaacagcaacaaaagcatcagtatcagcaacgcagacagcaggagaatatgcaaagacagagtaggggggaacccccgctgccagaggaagacctttctaagttatttaagccaccccagccacccgcgcggatggacagtctcttgatagcggggcagattaatacctattgtcagaacattaaagagtttacagcacagaatttagggaagctgttcatggctcaggccctgcaggaatataataactag

SEQ ID NO: 140612 - DNA, 1101 bp, Artificial Sequence
  derived and/or modified sequence
atgtacagtagacacgctcagcggatcccacccggaaagaagatggccagtcgtaaggagggcaccggatcgacagccacctcgtccagctccacagcaggcgctgcagggaagggaaagggcaaaggaggctccggggattccgcagtgaagcaagtgcagatcgatggtttggtggtcctcaagatcatcaaacactatcaggaagaggggcagggcacagaagtggtgcagggcgtgttgcttggcctggttgttgaagatcggctcgaaatcactaactgtttccctttcccccagcatactgaggacgacgctgactttgatgaggtacagtatcagatggagatgatgagaagtctgcggcacgtgaacatcgaccatctgcacgtagggtggtaccagagtacttattacggttcttttgtaacccgggcattgctggacagccagtttagctaccaacacgctatcgaggagtccgtcgtgctgatttacgatcctattaagactgcccagggtagtctctccctgaaagcctatagactcactccaaagttgatggaggtctgtaaagagaaagacttcagccctgaggcccttaagaaggcaaatatcacattcgagtacatgttcgaggaagtgcccatcgtaatcaaaaatagccacctgattaacgtccttatgtgggagcttgaaaaaaaatctgcagtagccgacaagcacgagttactgtcactggcctcttctaatcatctcggaaagaatctgcagctgctgatggatcgcgtcgacgaaatgtcacaagacattgtaaagtataacacatacatgcggaatacatcaaagcagcaacagcagaagcaccagtatcagcaaagaagacaacaggagaatatgcaacgtcagtctaggggggaaccgcctctcccggaggaggatctcagtaaactttttaaaccccctcagccacctgcccgaatggattcgctcctcatagccggacaaataaacacatactgtcaaaatataaaagagttcactgctcaaaacttaggtaagttgttcatggcgcaggctcttcaggagtacaacaattag

SEQ ID NO: 140613 - DNA, 1059 bp, Artificial Sequence
  derived and/or modified sequence
atggcatcccgaaaagaaggcactgggtcaacagctacttctagctcgagcactgctggagccgcagggaagggcaaaggaaaaggcggatccggcgactcagccgtgaaacaggtacagattgatggtttggtagtcctcaagataatcaagcactaccaggaggaaggacaaggtacagaagtagtccagggcgtccttctcggcttagttgtggaggatcgacttgaaatcacgaactgttttcctttcccacagcacaccgaggacgacgctgacttcgacgaggtacagtaccaaatggaaatgatgcggtctctacgccatgtgaacatcgaccatctgcacgtgggctggtaccagtctacttactacggatctttcgtcacccgtgccttactggatagtcagttttcctaccaacatgccatcgaggaatcagtcgttttgatttacgacccaatcaagaccgcccagggttctttgtccctgaaagcctatcggctcactcccaagctcatggaagtgtgcaaggagaaggactttagtccggaagctctgaagaaggccaatatcacattcgagtatatgttcgaagaggtgcccatcgtcataaagaactctcacctcatcaacgtacttatgtgggaactagaaaagaaatctgcagtggccgacaaacatgaactgctgtccctggcttcctcaaaccatcttggaaagaacctacagcttctgatggacagggtggatgagatgtctcaggatattgtgaaatacaatacctatatgaggaacacatccaaacaacagcagcaaaaacaccaataccagcagaggagacagcaggaaaatatgcagcgccaaagtcgtggagaaccaccactccctgaagaagatctgagtaagcttttcaagccgccacaaccacctgcaaggatggattctctgctcatcgcaggacagatcaacacatactgccaaaacatcaaggagtttacggcccagaatctgggcaagctgttcatggctcaggcactgcaggaatacaataattag

SEQ ID NO: 140614 - DNA, 1101 bp, Artificial Sequence
  derived and/or modified sequence
atgtacagcagacacgcccagagaatcccccccggcaagaagatggccagcagaaaggagggcaccggcagcaccgccaccagcagcagcagcaccgccggcgccgccggcaagggcaagggcaagggcggcagcggcgacagcgccgtgaagcaggtgcagatcgacggcctggtggtgctgaagatcatcaagcactaccaggaggagggccagggcaccgaggtggtgcagggcgtgctgctgggcctggtggtggaggacagactggagatcaccaactgcttccccttcccccagcacaccgaggacgacgccgacttcgacgaggtgcagtaccagatggagatgatgagaagcctgagacacgtgaacatcgaccacctgcacgtgggctggtaccagagcacctactacggcagcttcgtgaccagagccctgctggacagccagttcagctaccagcacgccatcgaggagagcgtggtgctgatctacgaccccatcaagaccgcccagggcagcctgagcctgaaggcctacagactgacccccaagctgatggaggtgtgcaaggagaaggacttcagccccgaggccctgaagaaggccaacatcaccttcgagtacatgttcgaggaggtgcccatcgtgatcaagaacagccacctgatcaacgtgctgatgtgggagctggagaagaagagcgccgtggccgacaagcacgagctgctgagcctggccagcagcaaccacctgggcaagaacctgcagctgctgatggacagagtggacgagatgagccaggacatcgtgaagtacaacacctacatgagaaacaccagcaagcagcagcagcagaagcaccagtaccagcagagaagacagcaggagaacatgcagagacagagcagaggcgagccccccctgcccgaggaggacctgagcaagctgttcaagcccccccagccccccgccagaatggacagcctgctgatcgccggccagatcaacacctactgccagaacatcaaggagttcaccgcccagaacctgggcaagctgttcatggcccaggccctgcaggagtacaacaactag

SEQ ID NO: 140615 - DNA, 1059 bp, Artificial Sequence
  derived and/or modified sequence
atggccagcagaaaggagggcaccggcagcaccgccaccagcagcagcagcaccgccggcgccgccggcaagggcaagggcaagggcggcagcggcgacagcgccgtgaagcaggtgcagatcgacggcctggtggtgctgaagatcatcaagcactaccaggaggagggccagggcaccgaggtggtgcagggcgtgctgctgggcctggtggtggaggacagactggagatcaccaactgcttccccttcccccagcacaccgaggacgacgccgacttcgacgaggtgcagtaccagatggagatgatgagaagcctgagacacgtgaacatcgaccacctgcacgtgggctggtaccagagcacctactacggcagcttcgtgaccagagccctgctggacagccagttcagctaccagcacgccatcgaggagagcgtggtgctgatctacgaccccatcaagaccgcccagggcagcctgagcctgaaggcctacagactgacccccaagctgatggaggtgtgcaaggagaaggacttcagccccgaggccctgaagaaggccaacatcaccttcgagtacatgttcgaggaggtgcccatcgtgatcaagaacagccacctgatcaacgtgctgatgtgggagctggagaagaagagcgccgtggccgacaagcacgagctgctgagcctggccagcagcaaccacctgggcaagaacctgcagctgctgatggacagagtggacgagatgagccaggacatcgtgaagtacaacacctacatgagaaacaccagcaagcagcagcagcagaagcaccagtaccagcagagaagacagcaggagaacatgcagagacagagcagaggcgagccccccctgcccgaggaggacctgagcaagctgttcaagcccccccagccccccgccagaatggacagcctgctgatcgccggccagatcaacacctactgccagaacatcaaggagttcaccgcccagaacctgggcaagctgttcatggcccaggccctgcaggagtacaacaactag

SEQ ID NO: 140616 - protein, 258 aa, Artificial Sequence
  derived and/or modified sequence
MAAAAAAAGDSDSWDADAFSVEDPVRKVGGGGTAGGDRWEGEDEDEDVKDNWDDDDDEKKEEAEVKPEVKISEKKKIAEKIKEKERQQKKRQEEIKKRLEEPEEPKVLTPEEQLADKLRLKKLQEESDLELAKETFGVNNAVYGIDAMNPSSRDDFTEFGKLLKDKITQYEKSLYYASFLEVLVRDVCISLEIDDLKKITNSLTVLCSEKQKQEKQSKAKKKKKGVVPGGGLKATMKDDLADYGGYDGGYVQDYEDFM

SEQ ID NO: 140617 - protein, 1035 aa, Artificial Sequence
  derived and/or modified sequence
MSTENVEGKPSNLGERGRARSSTFLRVVQPMFNHSIFTSAVSPAAERIRFILGEEDDSPAPPQLFTELDELLAVDGQEMEWKETARWIKFEEKVEQGGERWSKPHVATLSLHSLFELRTCMEKGSIMLDREASSLPQLVEMIVDHQIETGLLKPELKDKVTYTLLRKHRHQTKKSNLRSLADIGKTVSSASRMFTNPDNGSPAMTHRNLTSSSLNDISDKPEKDQLKNKFMKKLPRDAEASNVLVGEVDFLDTPFIAFVRLQQAVMLGALTEVPVPTRFLFILLGPKGKAKSYHEIGRAIATLMSDEVFHDIAYKAKDRHDLIAGIDEFLDEVIVLPPGEWDPAIRIEPPKSLPSSDKRKNMYSGGENVQMNGDTPHDGGHGGGGHGDCEELQRTGRFCGGLIKDIKRKAPFFASDFYDALNIQALSAILFIYLATVTNAITFGGLLGDATDNMQGVLESFLGTAVSGAIFCLFAGQPLTILSSTGPVLVFERLLFNFSKDNNFDYLEFRLWIGLWSAFLCLILVATDASFLVQYFTRFTEEGFSSLISFIFIYDAFKKMIKLADYYPINSNFKVGYNTLFSCTCVPPDPANISISNDTTLAPEYLPTMSSTDMYHNTTFDWAFLSKKECSKYGGNLVGNNCNFVPDITLMSFILFLGTYTSSMALKKFKTSPYFPTTARKLISDFAIILSILIFCVIDALVGVDTPKLIVPSEFKPTSPNRGWFVPPFGENPWWVCLAAAIPALLVTILIFMDQQITAVIVNRKEHKLKKGAGYHLDLFWVAILMVICSLMALPWYVAATVISIAHIDSLKMETETSAPGEQPKFLGVREQRVTGTLVFILTGLSVFMAPILKFIPMPVLYGVFLYMGVASLNGVQFMDRLKLLLMPLKHQPDFIYLRHVPLRRVHLFTFLQVLCLALLWILKSTVAAIIFPVMILALVAVRKGMDYLFSQHDLSFLDDVIPEKDKKKKEDEKKKKKKKGSLDSDNDDSDCPYSEKVPSIKIPMDIMEQQPFLSDSKPSDRERSPTFLERHTSC

SEQ ID NO: 140618 - DNA, 3108 bp, Artificial Sequence
  derived and/or modified sequence
atgagcaccgagaacgtggagggcaagcccagcaacctgggcgagagaggcagagccagaagcagcaccttcctgagagtggtgcagcccatgttcaaccacagcatcttcaccagcgccgtgagccccgccgccgagagaatcagattcatcctgggcgaggaggacgacagccccgcccccccccagctgttcaccgagctggacgagctgctggccgtggacggccaggagatggagtggaaggagaccgccagatggatcaagttcgaggagaaggtggagcagggcggcgagagatggagcaagccccacgtggccaccctgagcctgcacagcctgttcgagctgagaacctgcatggagaagggcagcatcatgctggacagagaggccagcagcctgccccagctggtggagatgatcgtggaccaccagatcgagaccggcctgctgaagcccgagctgaaggacaaggtgacctacaccctgctgagaaagcacagacaccagaccaagaagagcaacctgagaagcctggccgacatcggcaagaccgtgagcagcgccagcagaatgttcaccaaccccgacaacggcagccccgccatgacccacagaaacctgaccagcagcagcctgaacgacatcagcgacaagcccgagaaggaccagctgaagaacaagttcatgaagaagctgcccagagacgccgaggccagcaacgtgctggtgggcgaggtggacttcctggacacccccttcatcgccttcgtgagactgcagcaggccgtgatgctgggcgccctgaccgaggtgcccgtgcccaccagattcctgttcatcctgctgggccccaagggcaaggccaagagctaccacgagatcggcagagccatcgccaccctgatgagcgacgaggtgttccacgacatcgcctacaaggccaaggacagacacgacctgatcgccggcatcgacgagttcctggacgaggtgatcgtgctgccccccggcgagtgggaccccgccatcagaatcgagccccccaagagcctgcccagcagcgacaagagaaagaacatgtacagcggcggcgagaacgtgcagatgaacggcgacaccccccacgacggcggccacggcggcggcggccacggcgactgcgaggagctgcagagaaccggcagattctgcggcggcctgatcaaggacatcaagagaaaggcccccttcttcgccagcgacttctacgacgccctgaacatccaggccctgagcgccatcctgttcatctacctggccaccgtgaccaacgccatcaccttcggcggcctgctgggcgacgccaccgacaacatgcagggcgtgctggagagcttcctgggcaccgccgtgagcggcgccatcttctgcctgttcgccggccagcccctgaccatcctgagcagcaccggccccgtgctggtgttcgagagactgctgttcaacttcagcaaggacaacaacttcgactacctggagttcagactgtggatcggcctgtggagcgccttcctgtgcctgatcctggtggccaccgacgccagcttcctggtgcagtacttcaccagattcaccgaggagggcttcagcagcctgatcagcttcatcttcatctacgacgccttcaagaagatgatcaagctggccgactactaccccatcaacagcaacttcaaggtgggctacaacaccctgttcagctgcacctgcgtgccccccgaccccgccaacatcagcatcagcaacgacaccaccctggcccccgagtacctgcccaccatgagcagcaccgacatgtaccacaacaccaccttcgactgggccttcctgagcaagaaggagtgcagcaagtacggcggcaacctggtgggcaacaactgcaacttcgtgcccgacatcaccctgatgagcttcatcctgttcctgggcacctacaccagcagcatggccctgaagaagttcaagaccagcccctacttccccaccaccgccagaaagctgatcagcgacttcgccatcatcctgagcatcctgatcttctgcgtgatcgacgccctggtgggcgtggacacccccaagctgatcgtgcccagcgagttcaagcccaccagccccaacagaggctggttcgtgccccccttcggcgagaacccctggtgggtgtgcctggccgccgccatccccgccctgctggtgaccatcctgatcttcatggaccagcagatcaccgccgtgatcgtgaacagaaaggagcacaagctgaagaagggcgccggctaccacctggacctgttctgggtggccatcctgatggtgatctgcagcctgatggccctgccctggtacgtggccgccaccgtgatcagcatcgcccacatcgacagcctgaagatggagaccgagaccagcgcccccggcgagcagcccaagttcctgggcgtgagagagcagagagtgaccggcaccctggtgttcatcctgaccggcctgagcgtgttcatggcccccatcctgaagttcatccccatgcccgtgctgtacggcgtgttcctgtacatgggcgtggccagcctgaacggcgtgcagttcatggacagactgaagctgctgctgatgcccctgaagcaccagcccgacttcatctacctgagacacgtgcccctgagaagagtgcacctgttcaccttcctgcaggtgctgtgcctggccctgctgtggatcctgaagagcaccgtggccgccatcatcttccccgtgatgatcctggccctggtggccgtgagaaagggcatggactacctgttcagccagcacgacctgagcttcctggacgacgtgatccccgagaaggacaagaagaagaaggaggacgagaagaagaagaagaagaagaagggcagcctggacagcgacaacgacgacagcgactgcccctacagcgagaaggtgcccagcatcaagatccccatggacatcatggagcagcagcccttcctgagcgacagcaagcccagcgacagagagagaagccccaccttcctggagagacacaccagctgctag

SEQ ID NO: 140619 - DNA, 3108 bp, Artificial Sequence
  derived and/or modified sequence
atgagcacggagaatgttgagggcaagcccagcaaccttggtgaaagaggacgcgctcgcagctccacgttcctcagagttgtgcagccaatgttcaatcacagtattttcacctcggcggtatctccagctgcagaaagaataagatttattctcggggaagaggatgactcgcctgcaccacctcagctatttacggagctggatgagttgctggcggtggatggccaggagatggagtggaaagagactgccagatggatcaagtttgaggaaaaagtggaacaagggggggaaagatggagcaaaccccacgtggccaccctctcgctccacagcctttttgagcttcgtacctgcatggagaaaggtagcatcatgttggacagggaagcgagtagtctccctcagctggtggagatgatcgtcgatcatcagatcgagaccggtctgctgaaaccggaactcaaggacaaggtaacatatacccttttgcggaagcataggcatcagactaaaaagtccaatctccgcagcctcgcggacattgggaaaaccgtgtcctccgccagcaggatgtttacaaaccctgacaatggatccccagcgatgacccaccgcaatctgactagcagtagtctaaacgacataagtgacaagccagaaaaggatcagctaaaaaataagttcatgaagaagctgcctcgggatgctgaggcaagcaacgtcctggtaggtgaggtggatttcctcgatacaccatttatcgcattcgttaggttgcaacaggccgtgatgctcggagcattgactgaagtgccggttccaactagattcctattcatcctgttgggccctaagggcaaagcaaaaagctaccatgaaattggcagggcaatcgcgactctgatgtccgacgaggtatttcacgacattgcatacaaggccaaagatcgacatgatcttattgccggaatcgacgaattcctcgacgaagttatcgtcttaccccccggtgaatgggatcccgcaattcgcatcgagcccccgaagagtctgcctagctccgacaaaaggaaaaacatgtactcagggggggaaaatgttcagatgaacggagatacccctcacgacggtggccatggcggaggtgggcacggggactgcgaggagctacagcgaactggcaggttctgcggaggattgatcaaagatatcaagcggaaagctccattttttgcttcagatttctacgacgcccttaatattcaggcactgtcggccatactctttatctatctggccacagtcactaacgctatcactttcgggggattattgggagatgccaccgacaacatgcagggagtactggagagctttctggggaccgccgtttctggggctatcttttgcctgttcgccggccagccactcactatattgagtagcactggtccggtgcttgtgttcgaaagacttttatttaacttcagcaaagataacaactttgactatctggaatttcgtctttggataggtttgtggtctgcttttttgtgcttaatactggtggccacggatgccagctttctagttcagtacttcacccgctttacagaggaagggttttcctcattaatttcatttatattcatttacgacgcctttaaaaagatgattaagctggcggattactacccaatcaattcaaatttcaaggtaggctataacaccctcttttcatgtacatgcgtgccacctgaccctgcgaatatcagtatcagcaatgacacaacccttgcacccgagtacctgcctactatgtcctcgaccgatatgtaccataatacaacattcgattgggctttcttatcaaaaaaagaatgttccaaatatggcggaaacctagtcggtaataattgcaatttcgtccccgatattacactgatgtcattcatcctgttcctggggacatatacttcctcgatggctctgaagaagtttaaaacatcgccctattttcccactactgctagaaaacttatcagcgacttcgccattattctatctattcttatattctgcgtgattgatgccctggtaggtgtcgacacacctaagctgattgtcccatccgaatttaagcctacgtctcccaatcgcgggtggtttgtaccaccattcggtgaaaatccatggtgggtgtgcctagccgccgccatccccgcactcctggttaccattctgatcttcatggatcagcaaataactgctgtcatcgtgaatagaaaagagcacaagctgaagaaaggggcaggctaccacctcgacctgttctgggtggctattttgatggtaatttgcagcctgatggccctgccttggtacgtggccgctactgtgatcagcatagctcacatcgatagcctgaagatggagaccgaaacttctgcccccggtgaacagccgaaattccttggtgtccgggagcaacgggtcaccggtacgctggtgttcatcctcactggtctctcagtgttcatggcgcctattctgaaatttatccctatgccagttctgtacggagtatttctttatatgggggttgccagtctaaacggcgttcagtttatggataggcttaaactcctactgatgcctctgaaacaccagccggacttcatctacctgagacatgtcccgctacgtcgggtgcatctcttcacctttctccaggtgctttgcctggcgctgctctggatcctgaaatcaacagtcgccgccattatttttcctgtgatgatactggctcttgtggcagtgagaaaaggtatggactaccttttttcccagcatgatctgtcctttttagacgatgtgattcctgaaaaagataagaaaaagaaagaggatgaaaaaaaaaagaagaagaagaagggtagcttagattctgataacgacgactccgattgcccatatagcgagaaagtgcctagcattaaaattcctatggacatcatggagcagcagcccttcctgtccgattccaagccatcagaccgggaacgttcacctacttttctcgagaggcacactagctgttag

SEQ ID NO: 140620 - DNA, 3108 bp, Artificial Sequence
  derived and/or modified sequence
atgagcacagaaaatgtggagggcaagcccagcaacctgggggagcggggccgggcccggagcagcaccttcctgcgggtggtgcagcccatgttcaaccacagcatcttcaccagcgctgtgtccccagctgctgagcgcatccgcttcatcctgggggaggaggatgacagccctgccccaccccagctgttcacagagctggatgagctgctggccgtggatggccaggagatggagtggaaggagacagcccgctggatcaagtttgaggagaaggtggagcagggcggggagcgctggagcaagccccacgtggccaccctgagcctgcacagcctgtttgagctgcggacctgcatggagaagggcagcatcatgctggaccgggaggccagcagcctgccccagctggtggagatgattgtggaccaccagattgaaacaggcctgctgaagccagagctgaaggacaaggtgacctacaccctgctgaggaagcaccgccaccagaccaagaagagcaacctgcggagcctggccgacatcggcaagacagtgtcctctgccagcaggatgttcaccaacccagacaatggcagccctgccatgacccacaggaacctgaccagcagcagcctgaatgacatcagtgacaagccagagaaggaccagctgaagaacaagttcatgaagaagctgcccagagatgctgaggccagcaatgtgctggtgggggaggtggacttcctggacacccccttcatcgcctttgtgcggctgcagcaggccgtgatgctgggcgccctgacagaggtgcctgtgcccacccgcttcctgttcatcctgctgggccccaagggcaaggccaagagctaccacgagatcggccgggccatcgccaccctgatgtctgatgaggtgttccatgacatcgcctacaaggccaaggacagacatgacctgattgctggcattgatgagttcctggatgaagtcatcgtgctgcccccaggagagtgggaccctgccatcagaattgagccccccaagagcctgcccagcagtgacaagaggaagaacatgtacagcggaggagaaaatgtgcagatgaatggagacacccctcatgatggcggccatggaggcggcggccacggggactgtgaggagctgcagaggacaggccgcttctgtggcggcctcatcaaggacatcaagaggaaggcccccttctttgccagtgacttctatgatgccctgaacatccaggccctgagcgccatcctcttcatctacctggccaccgtgaccaatgccatcacctttggaggcctgctgggagatgccacagacaacatgcagggcgtgctggagagcttcctgggcacagctgtgtctggggccatcttctgcctgtttgctggccagcccctgaccatcctgagcagcactggacctgtgctggtgtttgagcggctgctcttcaacttcagcaaggacaacaactttgactacctggagttccggctgtggattggcctgtggagcgccttcctgtgcctgatcctggtggccacagatgccagcttcctggtgcagtacttcacccgcttcacagaggagggcttcagcagcctcatctccttcatcttcatctatgatgccttcaagaagatgatcaagctggccgactactaccccatcaacagcaacttcaaggtgggctacaacaccctcttcagctgcacctgtgtgcccccagaccctgccaacatcagcatcagcaatgacaccaccctggcccctgagtacctgcccaccatgagcagcacagacatgtaccacaacaccacctttgactgggccttcctgagcaagaaggaatgttccaaatatggaggcaacctggtgggcaacaactgcaactttgtgcctgacatcaccctgatgtccttcatcctcttcctgggcacctacaccagctccatggccctgaagaagttcaagaccagcccctacttccccaccacagccaggaagctgatcagtgactttgccatcatcctgagcatcctgatcttctgtgtgattgatgccctggtgggcgtggacacccccaagctgattgtgcccagcgagttcaagcccaccagccccaacagaggctggtttgtgcccccatttggagagaacccctggtgggtgtgcctggccgccgccatcccagccctgctggtgaccatcctgatcttcatggaccagcagatcacagctgtgattgtgaacaggaaggagcacaagctgaagaagggagctggctaccacctggacctcttctgggtggccatcctgatggtgatctgcagcctgatggccctgccctggtacgtggccgccaccgtcatcagcatcgcccacatcgacagcctgaagatggagacagagaccagcgcccctggagagcagcccaagttcctgggcgtgcgggagcagagggtgacaggcaccctggtgttcatcctgaccggcctgagcgtcttcatggcccccatcctgaagttcatccccatgcctgtgctgtatggagtcttcctgtacatgggcgtggccagcctgaatggagtgcagttcatggaccggctgaagctgctgctgatgcccctgaagcaccagcctgacttcatctacctgcggcacgtgcccctgcggcgggtgcacctgttcaccttcctgcaggtgctgtgcctggccctgctgtggatcctgaagagcacagtggccgccatcatcttccctgtgatgatcctggccctggtggccgtgaggaagggcatggactacctgttcagccagcacgacctgtccttcctggatgatgtgattcctgagaaggacaagaagaagaaggaggatgagaagaagaagaagaagaagaagggcagcctggacagcgacaatgatgacagcgactgcccctacagcgagaaggtgcccagcatcaagatccccatggacatcatggagcagcagcccttcctgagtgacagcaagcccagcgaccgggagaggagccccaccttcctggagcggcacaccagctgctag

SEQ ID NO: 140621 - DNA, 3108 bp, Artificial Sequence
  derived and/or modified sequence
atgagcaccgagaacgtggagggcaagcccagcaacctgggcgagcgcggccgcgcccggtcctccacctttctgagggtggtacagccaatgttcaatcactcgatcttcacatcagcagtctcgccggcagcagagcgcatccgatttatcctgggcgaggaagacgattctccggcccctccgcaactttttactgagctcgatgagctactggccgtcgacggtcaggagatggaatggaaagaaaccgctcggtggatcaaatttgaggagaaagtggagcaggggggcgaacgctggtccaaaccacacgttgccacactctcactgcattctctgtttgaattgagaacgtgcatggaaaagggatcaataatgctcgatcgagaggcgtcctcattgccacagctggtcgaaatgatcgtggaccatcagattgagacaggtctcctgaaaccagagttgaaggataaagttacttataccctgcttaggaagcacagacatcagaccaaaaaatctaacttgcggagcctggctgatatcggcaagacggtgagttccgcgtcaaggatgtttaccaatcccgataacggtagccccgccatgactcatcgcaacctgacatccagctctctgaacgatatatccgataagccggaaaaggatcaactgaaaaataagttcatgaagaagctccctcgcgacgccgaggccagcaacgtgctggtgggcgaagttgacttcctagacaccccttttattgcctttgtccgcctccagcaggccgtcatgctcggcgccctgacagaggtgcccgtgccaaccaggtttctctttatcctcctgggccctaagggcaaggcgaaatcttatcacgagatcggccgcgctattgccacgctcatgtcagacgaggtttttcacgatattgcctataaagccaaagatagacacgatctgatcgccgggattgatgaatttctggatgaggtaattgtcctccctccgggtgagtgggacccagccatccggattgagccacctaagagccttcctagttcagacaaaaggaagaacatgtacagcggtggagagaatgtccagatgaatggcgacactccgcatgacggcggccatggtggcggtggtcatggggattgtgaggagctgcagcgcaccggtcgtttttgcggcgggctcataaaagacatcaagaggaaagccccattcttcgcaagcgacttctacgacgctctgaacattcaggcactgtctgctattctatttatatacttggccacagtaactaacgcgattaccttcggggggttgttgggtgacgcgacagacaacatgcagggcgtgttagagtcctttctgggaactgctgtctctggagctatattttgtctgttcgccggacagccactaacaatcctcagcagcaccggccccgtccttgtgttcgagcgcctactatttaatttttcaaaggataacaatttcgactatctggaatttcgcttatggataggattgtggagcgcgttcctgtgcctgatactggtggccactgacgcctcattcctcgtgcaatatttcactcgcttcacagaggaaggttttagttcactgatcagctttatttttatctacgacgccttcaaaaagatgattaagctggccgactactaccctataaactcaaactttaaggtcgggtacaacactctgttttcatgtacctgtgttcctcccgaccctgcaaacatcagtatcagcaatgatacgacactggccccagagtaccttccgacaatgtctagcaccgacatgtatcacaacacaacattcgattgggcttttctctccaagaaggaatgctctaaatatggaggaaacctggtaggaaataactgcaatttcgttccagatattacccttatgagtttcattttatttctggggacatacacatcaagtatggcattaaagaaatttaagacatctccatatttcccaactaccgcgagaaaactgatctcagatttcgccatcatactgtctatactgatcttctgtgtgatagatgccctggtcggcgtagacacacccaagctcatcgtgccatccgagtttaagcccaccagtcccaaccgcggctggttcgtcccacctttcggcgagaacccctggtgggtatgtctggcagccgctattcctgcattactggtgaccatactgattttcatggatcagcagatcactgccgtgatcgttaaccggaaggagcacaagctcaagaaaggggcaggctaccatctggaccttttttgggtggccattttgatggtgatttgctctctgatggcattaccatggtacgtggccgccacagtgattagcattgctcacatagatagtcttaagatggagacagaaacctccgcaccaggggagcaacctaagttcttgggtgtcagagagcagcgagtcacaggtacgctggtatttatacttacaggcctctccgtgttcatggcccccattctgaagtttattcctatgccagtgctctacggagtctttctgtacatgggcgtggcgagtttgaacggggtgcagttcatggacaggttgaagttgctcctcatgccactgaagcaccagcctgattttatctatctcaggcacgtcccactaaggcgtgtccacctgtttacgttcttgcaggtactgtgtctagctctgctgtggatcctgaagtctacagtcgctgccattatctttccagtgatgattttggccctggtggctgtgcggaagggcatggattatttgttctcacagcatgacctatcttttctggatgacgtcataccagagaaagataagaagaagaaggaagatgaaaagaaaaagaaaaagaagaagggaagtctggactccgacaatgacgactccgattgtccatattctgaaaaggtgccttctatcaagattcccatggatattatggagcagcagcccttcctgagtgactcaaagccatctgacagagagcggagtccaacctttctcgagcggcacacctcttgttag

SEQ ID NO: 140622 - DNA, 3108 bp, Artificial Sequence
  derived and/or modified sequence
atgtcaactgagaacgtggagggtaagccgagtaacttgggagagaggggaagagcgcgttcatccaccttcttacgagtagtgcagcctatgtttaaccactctatttttacgagtgctgtaagtccagccgcagagaggatccgattcatccttggggaggaggacgattcccccgctccaccccaacttttcacagagctagatgagctcctggccgtagacggccaggaaatggaatggaaggaaacggccagatggataaaattcgaggagaaggtggagcaaggaggggaacggtggtccaagccacacgtcgccaccttaagcctacattcactgtttgagctccgaacctgcatggaaaaggggtctattatgttggacagagaagccagctctctgccccaactggttgagatgattgtggatcatcaaatcgaaacaggtctcctgaaacctgaactcaaagacaaagtgacatacacccttcttcggaagcaccgacatcagactaagaagtctaacctcaggtctctggccgatattggaaagacagtgtctagcgcatcacggatgttcactaatcccgacaacgggtccccggctatgacccaccgcaacctaactagcagctcgttaaacgacatatccgacaaacccgagaaggatcagttgaaaaataagtttatgaagaaactcccacgggatgctgaagcctccaatgtgctggtgggagaggtggattttctggacacgccgtttatagcatttgtgcggctgcaacaagccgttatgctgggagcactgaccgaggtgcctgtgcctactagattcctctttattctcctcggcccaaaggggaaggctaagtcctaccacgaaatcggccgagcaatcgcaacactgatgagcgatgaggtcttccacgatatagcttataaggccaaagacaggcacgatctgattgcaggcattgacgagttcctagacgaggtcatcgtgctccctccgggtgagtgggatccagctatccgcatcgaacctcctaagtccctgccatctagtgacaagcggaaaaatatgtactctggaggagagaatgtccagatgaacggcgacacgccccatgacggcggacacggcggtggaggacacggggactgcgaggagctccagcgcactgggagattctgcggcggtctcattaaagatattaaaaggaaagcccctttttttgcatccgacttctacgatgccctcaacatccaggcactatccgccattctgtttatctacctggccactgtgaccaacgcgatcacatttgggggactgcttggtgatgccactgacaatatgcagggtgtccttgaaagctttctcgggacagccgtgtccggcgcaattttctgtttgtttgccggacagccacttactatactgagttccaccggtcccgtgctcgtcttcgagcggctgctttttaacttttctaaggacaacaactttgattacctcgagttccgcttgtggatcgggttatggagcgccttcctgtgcttaatcctggtggccaccgatgcctctttcctggtccaatacttcaccaggtttacagaagagggcttttcatcacttatatcttttatttttatatacgatgctttcaagaagatgattaagctcgccgattattacccaattaacagtaatttcaaggtaggctacaacactctgttttcttgcacatgtgttcctcctgacccagccaatatctccatctccaatgatactactctagcaccagaatacctgcctaccatgagctccaccgacatgtatcataatacaacgttcgattgggcattcctgtcaaagaaagaatgctctaaatatggtggcaacttagtggggaataattgtaattttgtgcctgacatcacattgatgagttttatactgttcctgggaacatacaccagcagcatggccctcaaaaagttcaagacatcaccttattttcccaccaccgccagaaagctgatcagcgactttgccattattctgtccatcctgatcttttgtgtgatcgacgccttggtcggcgttgacacccctaagttaatcgtcccgagcgaattcaaaccaacgtcgcctaacagaggttggttcgttcctccttttggcgaaaatccttggtgggtttgccttgcagccgctataccagcgctgctggttacaattctgatatttatggaccagcagatcaccgctgtcattgtcaaccgaaaggagcataaactgaagaaaggtgctgggtatcacttagaccttttttgggttgccatcctgatggtgatttgttcacttatggcgttgccgtggtatgtcgccgctacagtgatcagtatcgcacacatcgatagtctaaagatggagaccgagacttctgcccctggggagcagccaaaatttctgggcgtccgggaacagcgtgtcacaggcacactggttttcattttaacaggattatctgttttcatggcgcctatcctgaaattcatccccatgccagtgttatacggagtgtttctgtatatgggcgtggcatccctcaacggtgtgcagtttatggacaggctgaagctgctacttatgcctctaaagcatcagcctgacttcatttacctcagacacgtgccactgcgtcgcgtgcacctgtttacatttttgcaggtgctgtgtctagccctgctgtggatcctcaagagtacggtagctgcgataattttccccgtcatgatcttagcactggtggccgtgcggaagggaatggattacttatttagtcaacacgatctgagtttcctggatgatgtgatacccgagaaagacaaaaagaaaaaagaggatgaaaagaagaaaaaaaagaagaaagggtctttagactccgataatgacgacagcgactgtccttactctgaaaaagtcccaagtatcaaaatccccatggatatcatggaacagcaaccatttttgtctgattccaagcccagtgatcgtgagagatcgcccaccttcttagaaagacataccagctgctag

SEQ ID NO: 140623 - DNA, 7640 bp, Artificial Sequence
  derived and/or modified sequence
aggaggggaagtgagtggttagacctcagctcatctgagggctaaaggttctttgtgacacatcacacagaattggagtgctgtccttctggagagtggtggagaaccaagatacagttcagaaccaaaggaatagagaagggctttgatttctttttggctttagattggggatttgggaggcttagcaggaaagatgtccactgaaaatgtggaagggaagcccagtaaccttggggagagaggaagagcccggagctccactttcctcagggttgtccagccaatgtttaaccacagtattttcacttctgcagtctctcctgctgcagaacgcatccgattcatcttgggagaggaggatgacagcccagctccccctcagctcttcacggaactggatgagctgctggccgtggatgggcaggagatggagtggaaggaaacagccaggtggatcaagtttgaagaaaaagtggaacagggtggggaaagatggagcaagccccatgtggccacattgtcccttcatagtttatttgagctgaggacatgtatggagaaaggatccatcatgcttgatcgggaggcttcttctctcccacagttggtggagatgattgttgaccatcagattgagacaggcctattgaaacctgaacttaaggataaggtgacctatactttgctccggaagcaccggcatcaaaccaagaaatccaaccttcggtccctggctgacattgggaagacagtctccagtgcaagtaggatgtttaccaaccctgataatggtagcccagccatgacccataggaatctgacttcctccagtctgaatgacatttctgataaaccggagaaggaccagctgaagaataagttcatgaaaaaattgccacgtgatgcagaagcttccaacgtgcttgttggggaggttgactttttggatactcctttcattgcctttgttaggctacagcaggctgtcatgctgggtgccctgactgaagttcctgtgcccacaaggttcttgttcattctcttaggtcctaaggggaaagccaagtcctaccacgagattggcagagccattgccaccctgatgtctgatgaggtgttccatgacattgcttataaagcaaaagacaggcacgacctgattgctggtattgatgagttcctagatgaagtcatcgtccttccacctggggaatgggatccagcaattaggatagagcctcctaagagtcttccatcctctgacaaaagaaagaatatgtactcaggtggagagaatgttcagatgaatggggatacgccccatgatggaggtcacggaggaggaggacatggggattgtgaagaattgcagcgaactggacggttctgtggtggactaattaaagacataaagaggaaagcgccattttttgccagtgatttttatgatgctttaaatattcaagctctttcggcaattctcttcatttatctggcaactgtaactaatgctatcacttttggaggactgcttggggatgccactgacaacatgcagggcgtgttggagagtttcctgggcactgctgtctctggagccatcttttgcctttttgctggtcaaccactcactattctgagcagcaccggacctgtcctagtttttgagaggcttctatttaatttcagcaaggacaataattttgactatttggagtttcgcctttggattggcctgtggtccgccttcctatgtctcattttggtagccactgatgccagcttcttggttcaatacttcacacgtttcacggaggagggcttttcctctctgattagcttcatctttatctatgatgctttcaagaagatgatcaagcttgcagattactaccccatcaactccaacttcaaagtgggctacaacactctcttttcctgtacctgtgtgccacctgacccagctaatatctcaatatctaatgacaccacactggccccagagtatttgccaactatgtcttctactgacatgtaccataatactacctttgactgggcatttttgtcgaagaaggagtgttcaaaatacggaggaaacctcgtcgggaacaactgtaattttgttcctgatatcacactcatgtcttttatcctcttcttgggaacctacacctcttccatggctctgaaaaaattcaaaactagtccttattttccaaccacagcaagaaaactgatcagtgattttgccattatcttgtccattctcatcttttgtgtaatagatgccctagtaggcgtggacaccccaaaactaattgtgccaagtgagttcaagccaacaagtccaaaccgaggttggttcgttccaccgtttggagaaaacccctggtgggtgtgccttgctgctgctatcccggctttgttggtcactatactgattttcatggaccaacaaattacagctgtgattgtaaacaggaaagaacataaactcaagaaaggagcagggtatcacttggatctcttttgggtggccatcctcatggttatatgctccctcatggctcttccgtggtatgtagctgctacggtcatctccattgctcacatcgacagtttgaagatggagacagagacttctgcacctggagaacaaccaaagtttctaggagtgagggaacaaagagtcactggaacccttgtgtttattctgactggtctgtcagtctttatggctcccatcttgaagtttatacccatgcctgtactctatggtgtgttcctgtatatgggagtagcatcccttaatggtgtgcagttcatggatcgtctgaagctgcttctgatgcctctgaagcatcagcctgacttcatctacctgcgtcatgttcctctgcgcagagtccacctgttcactttcctgcaggtgttgtgtctggccctgctttggatcctcaagtcaacggtggctgctatcatttttccagtaatgatcttggcacttgtagctgtcagaaaaggcatggactacctcttctcccagcacgacctcagcttcctggatgatgtcattccagaaaaggacaagaaaaagaaggaggatgagaagaaaaagaaaaagaagaagggaagtctggacagtgacaatgatgattctgactgcccatactcagaaaaagttccaagtattaaaattccaatggacatcatggaacagcaacctttcctaagcgatagcaaaccttctgacagagaaagatcaccaacattccttgaacgccacacatcatgctgataaaattcctttccttcagtcactcggtatgccaagtcctcctagaactccagtaaaagttgtgcctcaaattagaatagaacttgaacctgaagacaatgattatttctggaggagcaagggaacagaaactacattgtaacctgtttgtctttcttaaaactgacatttgttgttaatgtcatttgtttttgtttggctgtttgtttattttttaacttttatttcgtctcagtttttggtcacaggccaaataatacagcgctctctctgcttctctcttgcatagacacaatcaagacaatagtgcaccgttccttaaaaacagcatctgaggaatcccccttttgttcttaaactttcagatgtgtcctttgataaccaaattctgtcactcaagacacagacacgcacagaccctgtcctttgcctctattaagcagaggatggaagtattaaggattttgtaacaccttttatgaaaatgttgaaggaacttaaaactttagctttggagctgtgcttactggcttgtctttgtctggtagaacaaaccttgacctccagacagagtcccttctcacttatagagctctccaggactggaaaaagtgctgctattttaacttgctcttgcttgtaaatcctaatcttagagttatcaaaagaagaaaaaactgaaggtactttactccctatagagaaaccattgccatcattgtagcaagtgctggaatgtcccttttttcctatgcaactttttttaaccctttaatgaacttatctgttgagtacattgaagaatatttttcttcctagattttgttgtttaaattatggggcctaacctgccacttattttttgtcaatttttaaaacttttttttaattactgtaaagaaaatgaattttttcctgcagcaggaaacatagttttgagtagttctacctcttatttgtagctgccaggctttctgtaaaaattgtattgtatataatgtgatttttacacatacatacacacacaaatacacaatctctagggtaagccagaaggcaagatcagattaaaaacaccatgtttctaagcatccatttttccctttctttaaaagaaacttaactgttctatgaaggagattgagggagaagagacaaactcctatgtcatgagaataaccgatgttctgataatagtagcatctaggtacagatgctggttgtattaccacgtcaatgtcctatgcagtattgttagacattttctcattttgaaatatttgtgtgtttgtgtatgtgctctgtgccatggctggtgtatatatgtgcaatgttagaaggcaaaagagtgatggtaggcagagggcaaagtcattgaatctcttatgccagttttcataaaacccaaaccacatatgaaaaaatccattaagggtccaagaagtctgtccatatgaaaatgagggtaaatatagtttatttcccaggtatcagtcattataattgatataatagctctaacatgcaatataaaattcataggagtattaatagcccatttacacatctataaaatgtaatgggattgcagagctgcagagtacagtgtaacagtactctcatgcaatttttttcaggatgcaaaggcaattattctttgtaagcgggacatttagaatatatttgtgtacatattatatgtatgtatatttcaaagtaccacactgaaaattagacatttattaaccaaatttaacgtggtatttaaaggtaatatttttaatatgatacattacatattgtgaatgtatactaaaaaaacattttaaatgttaaaattataatttcagattcatataaccacaactgtgatatatcctaactataaccagttgttgaggggtatactagaagcagaatgaaaccacattttttggtttgataatatgcacttattgactcccactcattgttatgttaattaagttattattctgtctccttgtaattttgattacaaaaattttattatcctgagttagctgttacttttacagtacctgatactcctaaaacttttaacttatacaaattagtcaataatgaccccaattttttcattaaaataatagtggtgaattatatgttattgtgttaaaacctcacttgccaaattctggcttcacatttgtatttagggctatccttaaaatgatgagtctatattatctagctttctattaccctaatataaactggtataagaagactttccttttttctttatgcatggaagcatcaataaattgtttaaaaaccatgtatagtaaattcagcttaacccgtgatcttcttaagttaaaggtacttttgttttataaaagctctagataaaactttcttttctgatcatgaatcaagtatctgtggtttcatgcccctctctatacctttcaaagaactcctgaagcaacttaactcatcatttcagcctctgagtagaggtaaaacctatgtgtacttctgtttatgatccatattgatatttatgacatgaacacagaatagtaccttacatttgctaaacagacagttaatatcaaatcctttcaatattctgggaacccagggaagtttttaaaaatgtcattactttcaaaggaacagaagtagttaaccaaactaacaagcaaaacctgaggtttacctagtgacaccaaattatcggtattttaactgaatttacccattgactaagaatgaaccagatttggtggtggttttgtttctatgcaaactggacacaaattacaacagtaaatttttttataagtgcttctcccttctccatgatgtgacttccggagataaaggattcaaaagataaagacaaagtacgctcagagttgttaaccagaaagtcctggctgtggttgcagaaacactgttggaagaaaagagatgactaagtcaagtgtctgccttatcaaaagagcaaaaatgcctctggttttgtgtttgggagaaaagtatcttggacgcactgttttccttgataaaagtcatcttctctactgtgtgaaatgaatacttggaattctaattgttttgtgtgccaggggcagtaatgtccctgcctcttctcccaatcaaggttgaggagtggggctggggagaggacttaactgacttaagaagtaggaaaacaaaaacctctctcctcagccttccacctccaagagaggaggaaaaacagttgtctgctgtctgtaattcagtttgcgtgtattttatgctcatgcaccaacccatacagagtaaatcttttatcaactgtatactggtgtttaatagagaatgattgtcttccgagttttttggttccttttttaactgtgttaaagtacttgaaatgtattgactgctgactatattttaaaaacaaaatgaaataatttgagttgtattacagaggttgacattgttcagggatgggacaaagccttcttcaatccttttcatactacttaatgattttggtgcaggaacctgagattttctgatttatatttcatgatatttcacatttgctcttcacagcatgagcatgaagcccagtggcaccaaatggctgggtacaatcaagtgatattttgtagcacctcactatctgaaaggccatgagttttcagatgatttcattgagcttcattgcagcctgaaattttaaaaaagttgtgtaatacgccaaccagtcaagttgtgttttggccagagatttagatatgtccaatttcctggctcatttcattgtgctctatgggtacgtataaaaagcaagaattctgtttcctaggcaaacattgcaactcagggctaaagtcatccagtgaaacttttagagccagaagtaactttgtcccagtcctacaatgtgaaaagagtgaatagttgcctctttttagccattttcatggctggtacatattcgtacgcattacttttcagaatcaatacgcactttcagatattcttatttttattctcttaagtctttattaactttggagagagaaatgatgcatctttttattttaaatgaagtagatcaacatggtggaacaaaatgataaagaacagaaaacatttcaatatattactaataactttttccaatataaatcctaaaattcctataacatagtattttacagttttatgaagctttctattgtgacttttatggaattaagagatgaagaagatgagatattttagcatttatatttttcaaaattatatgtatacttaaaaataaagtaactttatgcattta

SEQ ID NO: 140624 - protein, 100 aa, Artificial Sequence
  derived and/or modified sequence
MEEASEGGGNDRVRNLQSEVEGVKNIMTQNVERILARGENLEHLRNKTEDLEATSEHFKTTSQKVARKFWWKNVKMIVLICVIVFIIILFIVLFATGAFS

SEQ ID NO: 140625 - DNA, 303 bp, Artificial Sequence
  derived and/or modified sequence
atggaggaggccagcgagggcggcggcaacgacagagtgagaaacctgcagagcgaggtggagggcgtgaagaacatcatgacccagaacgtggagagaatcctggccagaggcgagaacctggagcacctgagaaacaagaccgaggacctggaggccaccagcgagcacttcaagaccaccagccagaaggtggccagaaagttctggtggaagaacgtgaagatgatcgtgctgatctgcgtgatcgtgttcatcatcatcctgttcatcgtgctgttcgccaccggcgccttcagctag

SEQ ID NO: 140626 - DNA, 303 bp, Artificial Sequence
  derived and/or modified sequence
atggaggaagctagtgaggggggcgggaacgatagagtgaggaacctacagtctgaggtggagggcgtaaaaaacatcatgacgcagaatgttgaaagaattctagcccggggggaaaacttggagcacctgcgcaacaagactgaggacctcgaagccacttccgaacacttcaagacgacgtcccagaaggtggccaggaaattctggtggaaaaatgtgaaaatgatagtgctgatctgtgtcattgtgtttatcatcatactgtttatagtgcttttcgctaccggggccttttcctag

SEQ ID NO: 140627 - DNA, 303 bp, Artificial Sequence
  derived and/or modified sequence
atggaggaggccagcgagggcggcggcaatgacagagtgaggaacctgcagagcgaggtggagggcgtgaagaacatcatgacccagaatgtggagcgcatcctggcccggggggagaacctggagcacctgaggaacaagacagaggacctggaggccaccagcgagcacttcaagaccaccagccagaaggtggccaggaagttctggtggaagaatgtgaagatgattgtgctgatctgtgtgattgtgttcatcatcatcctcttcatcgtgctgtttgccaccggggccttctcctag

SEQ ID NO: 140628 - DNA, 303 bp, Artificial Sequence
  derived and/or modified sequence
atggaggaggccagcgagggcggcggcaacgaccgggtgcggaacttgcagtccgaagtcgagggagtaaaaaatattatgacgcagaacgtggagaggattctagccaggggcgagaatttggaacatctccgtaataagacagaagacttggaggcaaccagtgaacactttaagacaaccagccagaaggtggctcgaaaattctggtggaagaacgtgaagatgatcgtcctgatctgtgtaatcgtctttatcattattctcttcatcgttctgttcgccaccggggccttttcatag

SEQ ID NO: 140629 - DNA, 303 bp, Artificial Sequence
  derived and/or modified sequence
atggaagaggctagcgaggggggaggaaatgatcgcgtgcgaaatctgcagagtgaagttgaaggagtgaaaaatattatgacacagaacgtggagcgcattttggcgaggggtgagaacctagagcacttacggaacaaaactgaggacctggaggcgacgagtgagcacttcaaaacaacaagccaaaaggtggccaggaagttttggtggaagaacgtgaagatgattgtactcatctgcgtcattgtgttcatcatcatcttgttcatcgttctgttcgccacaggagctttctcatag

SEQ ID NO: 140630 - DNA, 774 bp, Artificial Sequence
  derived and/or modified sequence
ggaaacctgagttaggtgtggctggagcgactcgagatgcgaggtgggcgggggcaggctgaaagttggagcaagcaggaagtgaactgagggccaccctgggaggaagccgactaggcgaattcacttactgaccggcctgggctgctctgagacatggaggaagccagtgaaggtggaggaaatgatcgtgtgcggaacctgcaaagtgaggtggagggagttaagaatattatgacccagaatgtggagcggatcctggcccggggggaaaacttggaacatctccgcaacaagacagaggatctggaagccacatctgagcacttcaagacgacatcgcagaaggtggctcgaaaattctggtggaagaacgtgaagatgattgtccttatctgcgtgattgtttttatcatcatcctcttcattgtgctctttgccactggtgccttctcttaagtaacagggaacctctcccacctgcccttctcttcagggacaaccctccataaatgtgtgccaagagggtctcctttcctgtcttcctctacagagaatgctgctcggtcctcctacccctcttcccgaggccctgctgccatgttgtatgccccagaaggtaccttggtcccccggaaggagagaaaaaagagagatggactgtggctgcatttcttgggtccttagagtgggctggagagacctagagggcccagcatgtggctgggaaactgttggtggccagtgggtaataaagacctttcagtatcccta

SEQ ID NO: 140631 - protein, 141 aa, Artificial Sequence
  derived and/or modified sequence
MPPKFKRHLNDDDVTGSVKSERRNLLEDDSDEEEDFFLRGPSGPRFGPRNDKIKHVQNQVDEVIDVMQENITKVIERGERLDELQDKSESLSDNATAFSNRSKQLRRQMWWRGCKIKAIMALVAAILLLVIIILIVMKYRT

SEQ ID NO: 140632 - DNA, 426 bp, Artificial Sequence
  derived and/or modified sequence
atgccccccaagttcaagagacacctgaacgacgacgacgtgaccggcagcgtgaagagcgagagaagaaacctgctggaggacgacagcgacgaggaggaggacttcttcctgagaggccccagcggccccagattcggccccagaaacgacaagatcaagcacgtgcagaaccaggtggacgaggtgatcgacgtgatgcaggagaacatcaccaaggtgatcgagagaggcgagagactggacgagctgcaggacaagagcgagagcctgagcgacaacgccaccgccttcagcaacagaagcaagcagctgagaagacagatgtggtggagaggctgcaagatcaaggccatcatggccctggtggccgccatcctgctgctggtgatcatcatcctgatcgtgatgaagtacagaacctag

SEQ ID NO: 140633 - DNA, 426 bp, Artificial Sequence
  derived and/or modified sequence
atgcctccgaaatttaagaggcatctcaatgacgatgacgtcactggaagcgtgaaaagcgagcggaggaacctcctcgaagacgatagtgatgaggaagaggattttttcctgagaggcccatccggccccagatttggcccacggaatgacaaaatcaaacacgtccagaatcaggtcgacgaagtgatagacgtgatgcaggaaaatatcacaaaagtgatcgagagaggagagagactggacgaactccaggataagtctgaaagcctctctgacaatgcaacagcctttagcaacaggtccaaacagttacgtcggcagatgtggtggagggggtgcaagatcaaagccatcatggcactggtggccgctattctgctgctggtcataatcatactaattgtcatgaaatacaggacctag

SEQ ID NO: 140634 - DNA, 426 bp, Artificial Sequence
  derived and/or modified sequence
atgcctcctaagttcaaacgacaccttaatgatgacgatgtgactggatccgtgaaaagcgagagaagaaacctactggaagatgattccgacgaagaggaggacttcttcctgcggggacctagcggcccccgatttggacccagaaacgataaaataaaacatgtgcaaaaccaggtggacgaagttatcgacgtgatgcaggaaaacatcacaaaggtgattgagcgcggggaaaggctcgacgagctccaagataagagcgaatcactgtcagacaatgcaacggctttctcaaatcgctccaaacaactcagaagacagatgtggtggcgtgggtgcaaaataaaagcgataatggccttggtggccgccatactgctattggtgattattatcctaatcgtgatgaaatatcggacctag

SEQ ID NO: 140635 - DNA, 426 bp, Artificial Sequence
  derived and/or modified sequence
atgccacccaagttcaagaggcacctgaatgatgatgatgtgactggatctgtgaagtctgagaggaggaacctgctggaggatgacagtgatgaggaggaggacttcttcctgcggggccccagcggcccccgcttcggccccagaaatgacaagatcaagcacgtgcagaaccaggtggatgaggtgattgatgtgatgcaggagaacatcaccaaggtgattgagcggggggagcggctggatgagctgcaggacaagtctgagagcctgagtgacaatgccacagccttcagcaacagaagcaagcagctgcggcggcagatgtggtggaggggctgcaagatcaaggccatcatggccctggtggccgccatcctgctgctggtgatcatcatcctgattgtgatgaagtaccgcacctag

SEQ ID NO: 140636 - DNA, 426 bp, Artificial Sequence
  derived and/or modified sequence
atgccccccaagttcaagcggcacctgaacgacgacgacgtgaccgggtctgttaagagcgagaggcgcaacctcttggaggacgatagcgacgaagaggaagactttttcctacgcgggccatcggggccccgtttcggtccccggaatgacaagattaagcacgtacagaatcaggttgacgaggtcatagatgtcatgcaggaaaatataactaaagtaatcgaaagaggcgagagactggacgagctgcaggataagtccgaatcactttccgataacgcaacagccttttcgaacagaagtaagcaactgcggcgacagatgtggtggagaggctgtaagatcaaagccattatggctttggttgccgctatcctgcttctagtcattattatactgattgtgatgaagtataggacctag

SEQ ID NO: 140637 - DNA, 426 bp, Artificial Sequence
  derived and/or modified sequence
atgccccccaagttcaagcggcacctgaacgacgacgacgtgaccgggtctgtaaaaagcgagagaaggaacctgttggaagatgacagcgatgaagaagaagactttttcttgagggggccatctggccctcgctttgggcccaggaacgacaaaataaaacacgtgcagaaccaagtagacgaagtgattgacgtgatgcaggaaaatatcactaaggtaatagagagaggggaaaggcttgacgagttgcaggacaagtctgaaagccttagcgataatgcaactgcattctctaatcggtctaagcagcttcgccggcagatgtggtggagggggtgtaaaattaaggcaatcatggccttggtcgcggcaatcttgctgctggttattataatcttgatagtcatgaagtacagaacgtag

SEQ ID NO: 140638 - DNA, 426 bp, Artificial Sequence
  derived and/or modified sequence
atgcctcccaaattcaagagacatctgaacgacgatgatgttactgggtcggtgaagagtgagcggaggaatctgctcgaggacgatagcgatgaggaggaagatttctttctgcgcggaccctccggaccgagattcggccctaggaatgataaaataaagcatgtccaaaaccaggtggacgaggtaatagatgtaatgcaagagaacattaccaaggtcattgagcggggtgaacggctcgacgagctgcaagataaatcagagagtctgtccgacaacgctacggccttttcgaatcgatcaaaacaactgaggcgtcaaatgtggtggagagggtgtaagataaaggcaatcatggctctggttgcagccattctgctgttggtgattatcattctgatcgttatgaaataccgcacgtag

SEQ ID NO: 140639 - DNA, 426 bp, Artificial Sequence
  derived and/or modified sequence
atgccccctaaattcaaaagacatctaaacgacgacgatgtgacaggatctgtcaaatctgaacgcagaaatcttctggaggacgatagcgacgaggaagaggacttttttctgaggggaccaagtggtccgagattcgggcctcgaaacgataagatcaaacatgtgcagaatcaggttgacgaggtcattgacgtgatgcaggagaatattactaaggtgatcgagaggggagagcggttagacgaactgcaagacaaatcagagtccctgtccgacaatgccaccgcattttctaatcgaagcaagcagctgcgccgtcagatgtggtggaggggttgcaagatcaaggcgattatggcactggtggccgctatcctcttgttggtaattattattctgatagtgatgaagtatcgcacctag

SEQ ID NO: 140640 - DNA, 5159 bp, Artificial Sequence
  derived and/or modified sequence
gacaaccagtggttgttcctcccctaaagcacagcataaatttggagagatgcatctaaactgcgtgtgggttcgggctcttttaggtgaatagggctcggcggatcgacttcctcgattatctccgtgccctggacccgccccctccgcctggcgccaggccgccgagcgccgatcggctcgatgagcggaggcgctgctgcggcgctgcggccgacgccgggtccgcaccaactgtctccccctcccagcttcttacctcggcttcctactccttcccccgcccgcccagcaccgccagcccgggagagctgccgggagttccccgggagcctcaggtggtgactatcctgttgagaagcaaaagatactttgcaagtaaaaaatatgcctcccaagtttaagcgccacctcaatgatgatgatgtcacaggttctgtgaaaagtgaaaggagaaatcttttggaagatgattcagatgaagaagaggacttttttctaaggggaccatctggaccaagatttggacctagaaatgataaaattaagcatgttcagaatcaagtggatgaagttattgatgtcatgcaagaaaatattacaaaggtaattgagagaggggagagactagatgaactacaggacaaatcagaaagcttatcggataatgcaacagcttttagcaacagatccaaacaacttcgaaggcaaatgtggtggcgtggatgcaaaataaaagccatcatggctttggttgctgctatccttttgctagtgattatcattcttatagtcatgaaataccgtacttgatttgatgacagagatcttcattaaacaagatctgggacagtaataaaagattgctgcataatttaaatgaaacctatgtgtatataactttcaaaacttctttttcaagaaactaagaggcaagtatcacttcaaattggaacgttgagaatgtccaattatcttctccctttctaacaaaatgttcttttaataattatgtttaaggcaaagagaactagcctctatttttccatatttcaaggatctaatttgaaactagatacttgccagttcattatttgtgtatataaacactgattataatatttcatattaatattttaatggcataaggacttgcattattgcattagggagcgggtcatgctgggggtcaggaagcctgtgtagagtaccaaattatatgctgaaagagatgcataaccattctgtcaatatttgcagaaatatagttcctttcatattacagttgttttgcaagcaatttccacatttataggtgtaacaaaagctaaatgttgtaaatgttgttgccctcaggtataactaaaaacattccagtaaatatatttttgactgtgtaagagaatgtgtagtaatttttttggcattggattatggaaatggaaatttttaaacagtgtgaaaaaacatggtatggcatcataaaactggagataataaagttattgaagagtgtcattggagtatttgaaaatgaccaatatatagctgccagtcatggtccagtctgttttctgttaaactccaataaagagagaccagtcagtcctaatgtgagtaaatgaaatttacaggtaacttacttactccttaattttattttagttaatagcctctaacttccaactatctcatttaccaaaagtacaaaaagtagcaaaaccatctattaatactttgaattttatatctttgcatttcctgttcatccttgaggagatgtatgttgcacaatcaaattttgcatcagccaacagtaatgagtagtagaaagtcaggaacctatgtgtatatatatatatatatatatatatatatatatatatatatatacacacaaacacacacacacacacacacacacacgcacacatatgataatcagtcagtcggtaaccaaatgctagagagtgaccattaacctaagcctgtttttataatgaaaaaatgtgttaactttaaaatatgccaacctccttgtgtcttttaaacaagtcagagtgaaaatacattgtcccctaaggtgtggggagaggaagctttataataaaattagtgattctgcagaaacttgtgcactggatatcttgacaatatgaatataaaactccctaaattaaaaatagggttaatagaaattatcagtatttaaatagggaaaaatgattttatgtttattttatttaggttttatttctttggtcatcttaatgcaaaatgaataaagcatagaatctgggtttggtgtttttttgtctgtttttaaaattctacaggattattactaggaggcaaaaaatgctgtttagaatggaaaaaatttgaagagagaaagcagactgagacactcaagacacctgcaagttatctaagaagatctaaatagaattactaaattttatagtttgcttagagcatttagaaggagataaaggtcttacatactatagtgtatattgtctttggtctctatgctctttgtaaatgtcaattaatataaacagcatctgaacagctaataaatcttttaagttaagatacccagaaaaatgagcatttttagaatttcagtagctaataattcaggaatggaaatattttaactgaatggacagaatcagtcctaacatttgtatgtatgtcctttatttgaattggaactaggctcataagtggttaattttccattagttgatgtagaaatctggtttctccataatatctacaagtgaagatgaagattacttctcaaaaagtatccatatttccagtgttccttttaataaaatatgccacttttaaataaataattacaaaatgtaaaattataaaatttttaaatttaaataataagtaacagtaaaattttttgacaatatatatgtcactgtctttgtaatttaaacatattgctgcctgggatatgggtaacagaattatcactcatggaactttgtagtagtgatggcttggtttgtaattcatcatttcatctttcttggtcttgattaatcctgaaatccttaaaatggctggcatggttatgactttattgtggtaaccttggagatataagccctcttacgatcaaaaacagaagaaaaaaatatattgttcaaactgatgccaggcctacctttattccctcccttaattactttttttctcattcagctcagatcatcctgcacttgaaaaatgaagttttaccaccatcaaaactatcattatttaacaacaagtgaagatcaacagaaaaattcaagtagctttgcaaatactagttgatactcagtgaaatcacgtcactattttgatgcctgaatccatacctttgtgatttatgtttaattacagaagcctattgccttgcagcaattttgttgttataatactgattaattggttactccttcttattataactcagtaatacctgtggtcatttggttcctctatcctgacaaagttcactggaaattgccctcagattttataaactgggggatttcttaattagataaaagttcattactgaagatggaatattatataagatggaggaagggtaattaatagacatgagatatagaaatactttgttagccctgctatagattgcctattgtagtctttctgtgcatttcaatagtctgtattaggaaattataacttcagcacttttgatagcaaaaattggcatctttcaattctgtatagtatgtgactatcctgtaaatgataatatgtgtacagactgagaaggcaggaatataaagtaattgaaatctctcattgccggtatactctaaaacatgcttgatgccttgtcagcatcattgcacacattgactctgtatttacatctgtatatacactatgattagaaaatatgcaagaaattgtttttccatgttaagaacaaatgccattagaagatgtccccttaattgtattgtcagagtattactatgtcaaggatgactgttctgttaacctaattttgtgttttcacatggaaatgtgattggactccatttttctgtgagttgagagtaagagcataagtcagtttgaaagcatttacaagtttgttttagaatgtagtaagggctgaaaggtgctctacttcttaacttgttttttccatgttgtagacaaatgaaatttgtctaaatgcttttgtctaaaaatgcatttgtctaaatgctttagattgatgtagggtttagatcctctttaatactttgagatagtcttattctgattttttttttcttctggaaaccaagtagaattagggatgggaatacaaatgcatttattctggcttctgttttattccaagaagcttcttggaacaaatcagtaggaattgaaaagaaagcatgaccaacccaattacaggggataaatgtaagcttgttaaagtaagcaccacaccatgtttctgtctccccagcacccagcacagtgctgtgaaccttggcagatgctagataaatgtgtgttgaatgaatgtgcctatgaagccacaaagatgccacatgttagtatatcagtgagaggtgactccacagtgctctctggagaagcaatatgagtgactgaagagtggggccttttgcttttgcctggatataggggtgctcttctactgtaattgggtgtggaaaaactctggctttatggtattccattaggttcttttcatttaaagtagtcttaaaatcaaagtatccaatattttaaagccacaaagtagattacataattagcagagattttagtcagtaaaatgttagaaatcaaactataagaaaattcaagtcctttattttgtgtcttgggtatatgtcattattttaaattccacactcccttatttaatcactttggtaagtgcctttgatgttttgaaatgtatagtgggagatgagcaaatgtaaatgtcatgtgccctgttccctagcttctcaattcctcataaccatttttaccagtgttgcaaagtttagacctttgtgttaatatcagaagtgtatttgtagcccctccatagtgaacaatgaaataaactatttcatagaaaacaaaaa

SEQ ID NO: 140641 - DNA, 1738 bp, Artificial Sequence
  derived and/or modified sequence
gcggaggcgctgctgcggcgctgcggccgacgccgggtccgcaccaactgtctccccctcccagcttcttacctcggcttcctactccttcccccgcccgcccagcaccgccagcccgggagagctgccgggagttccccgggagcctcaggtggtgactatcctgttgagaagcaaaagatactttgcaagtaaaaaatatgcctcccaagtttaagcgccacctcaatgatgatgatgtcacaggttctgtgaaaagtgaaaggagaaatcttttggaagatgattcagatgaagaagaggacttttttctaaggggaccatctggaccaagatttggacctagaaatgataaaattaagcatgttcagaatcaagtggatgaagttattgatgtcatgcaagaaaatattacaaaggtaattgagagaggggagagactagatgaactacaggacaaatcagaaagcttatcggataatgcaacagcttttagcaacagatccaaacaacttcgaaggcaaatgtggtggcgtggatgcaaaataaaagccatcatggctttggttgctgctatccttttgctagtgattatcattcttatagtcatgaaataccgtacttgatttgatgacagagatcttcattaaacaagatctgggacagtaataaaagattgctgcataatttaaatgaaacctatgtgtatataactttcaaaacttctttttcaagaaactaagagctcagatcatcctgcacttgaaaaatgaagttttaccaccatcaaaactatcattatttaacaacaagtgaagatcaacagaaaaattcaagtagctttgcaaatactagttgatactcagtgaaatcacgtcactattttgatgcctgaatccatacctttgtgatttatgtttaattacagaagcctattgccttgcagcaattttgttgttataatactgattaattggttactccttcttattataactcagtaatacctgtggtcatttggttcctctatcctgacaaagttcactggaaattgccctcagattttataaactgggggatttcttaattagataaaagttcattactgaagatggaatattatataagatggaggaagggtaattaatagacatgagatatagaaatactttgttagccctgctatagattgcctattgtagtctttctgtgcatttcaatagtctgtattaggaaattataacttcagcacttttgatagcaaaaattggcatctttcaattctgtatagtatgtgactatcctgtaaatgataatatgtgtacagactgagaaggcaggaatataaagtaattgaaatctctcattgccggtatactctaaaacatgcttgatgccttgtcagcatcattgcacacattgactctgtatttacatctgtatatacactatgattagaaaatatgcaagaaattgtttttccatgttaagaacaaatgccattagaagatgtccccttaattgtattgtcagagtattactatgtcaaggatgactgttctgttaacctaattttgtgttttcacatggaaatgtgattggactccatttttctgtgagttgagagtaagagcataagtcagtttgaaagcatttacaagtttgttttagaatgtagtaagggctgaaaggtgctctacttcttaacttgttttttccatgttgtagacaaatgaaa

SEQ ID NO: 140642 - protein, 304 aa, Artificial Sequence
  derived and/or modified sequence
MATRRLTDAFLLLRNNSIQNRQLLAEQLADDRMALVSGISLDPEAAIGVTKRPPPKWVDGVDEIQYDVGRIKQKMKELASLHDKHLNRPTLDDSSEEEHAIEITTQEITQLFHRCQRAVQALPSRARACSEQEGRLLGNVVASLAQALQELSTSFRHAQSGYLKRMKNREERSQHFFDTSVPLMDDGDDNTLYHRGFTEDQLVLVEQNTLMVEEREREIRQIVQSISDLNEIFRDLGAMIVEQGTVLDRIDYNVEQSCIKTEDGLKQLHKAEQYQKKNRKMLVILILFVIIIVLIVVLVGVKSR

SEQ ID NO: 140643 - DNA, 915 bp, Artificial Sequence
  derived and/or modified sequence
atggccaccagaagactgaccgacgccttcctgctgctgagaaacaacagcatccagaacagacagctgctggccgagcagctggccgacgacagaatggccctggtgagcggcatcagcctggaccccgaggccgccatcggcgtgaccaagagacccccccccaagtgggtggacggcgtggacgagatccagtacgacgtgggcagaatcaagcagaagatgaaggagctggccagcctgcacgacaagcacctgaacagacccaccctggacgacagcagcgaggaggagcacgccatcgagatcaccacccaggagatcacccagctgttccacagatgccagagagccgtgcaggccctgcccagcagagccagagcctgcagcgagcaggagggcagactgctgggcaacgtggtggccagcctggcccaggccctgcaggagctgagcaccagcttcagacacgcccagagcggctacctgaagagaatgaagaacagagaggagagaagccagcacttcttcgacaccagcgtgcccctgatggacgacggcgacgacaacaccctgtaccacagaggcttcaccgaggaccagctggtgctggtggagcagaacaccctgatggtggaggagagagagagagagatcagacagatcgtgcagagcatcagcgacctgaacgagatcttcagagacctgggcgccatgatcgtggagcagggcaccgtgctggacagaatcgactacaacgtggagcagagctgcatcaagaccgaggacggcctgaagcagctgcacaaggccgagcagtaccagaagaagaacagaaagatgctggtgatcctgatcctgttcgtgatcatcatcgtgctgatcgtggtgctggtgggcgtgaagagcagatag

SEQ ID NO: 140644 - DNA, 915 bp, Artificial Sequence
  derived and/or modified sequence
atggctacccgtcgtctgaccgacgctttcttactgctgcgcaacaactctatccagaacaggcaattactggctgagcagctcgccgatgaccgcatggccctcgtgagtggtatttcgttggacccagaggccgcgattggtgttacaaagagacctccacctaagtgggttgacggcgtcgacgagatccagtatgacgtcggtcgcattaagcagaagatgaaggaacttgcttccctgcacgacaaacacttaaaccggcctactcttgatgactctagtgaggaggaacacgcgatcgagattaccacccaggaaatcacacaactgtttcatcgctgccaacgggcagtgcaggccctgccttcacgcgcgcgcgcctgtagcgagcaagaaggtcgtctgctgggcaatgtagtggctagcctggcgcaggccctccaagagctgagcacctcttttcgccacgctcagagcggatatttgaaacggatgaagaatagggaagagagatcccagcacttctttgacacgagcgtccctctcatggatgatggggatgacaacacactgtaccacaggggtttcacagaggatcagcttgttttggtggaacagaatactttaatggtagaggaacgcgaacgcgagattcgtcagatcgtgcagagcatcagcgatctgaacgaaatttttcgggacttgggcgccatgatcgtggaacagggcacggtgctcgatcgcattgactataatgtcgagcagtcttgcatcaagacagaagatgggctgaaacagcttcacaaggccgaacagtatcagaagaagaatcgcaagatgctggtcattctcatcctgttcgtaatcataatagttctaattgtggtcctggtaggagtcaagtcacgctag

SEQ ID NO: 140645 - DNA, 915 bp, Artificial Sequence
  derived and/or modified sequence
atggccacccggcggctgacagatgccttcctgctgctgaggaacaacagcatccagaaccggcagctgctggccgagcagctggctgatgacaggatggccctggtgtctggcatcagcctggaccctgaggccgccatcggcgtgaccaagaggcccccacccaagtgggtggatggagtggatgagatccagtatgatgtgggccgcatcaagcagaagatgaaggagctggccagcctgcatgacaagcacctgaaccggcccaccctggatgacagcagcgaggaggagcacgccatcgagatcaccacccaggagatcacccagctgttccaccgctgccagagagctgtgcaggccctgcccagccgggcccgggcctgcagcgagcaggagggccgcctgctgggcaatgtggtggccagcctggcccaggccctgcaggagctgagcaccagcttcagacatgcccagagcggctacctgaagaggatgaagaaccgggaggagaggagccagcacttctttgacacctctgtgcccctgatggatgatggagatgacaacaccctgtaccaccggggcttcacagaggaccagctggtgctggtggagcagaacaccctgatggtggaggagcgggagcgggagatccggcagatcgtgcagagcatcagtgacctgaatgagatcttccgggacctgggcgccatgattgtggagcagggcaccgtgctggacagaattgactacaacgtggagcagagctgcatcaagacagaagatggcctgaagcagctgcacaaggccgagcagtaccagaagaagaacaggaagatgctggtgatcctgatcctcttcgtcatcatcatcgtgctgattgtggtgctggtgggcgtgaagagcaggtag

SEQ ID NO: 140646 - DNA, 915 bp, Artificial Sequence
  derived and/or modified sequence
atggccacccggcggctgaccgacgccttcctgctgctgcggaacaattccattcagaatagacagctgctggctgagcagctggccgatgacaggatggcattggtgtctggcatcagcctcgatccagaggcagccattggagtcactaaacgcccccctcccaagtgggtggacggagtggatgagattcagtatgatgtgggaagaattaagcagaaaatgaaggaattagcaagcctccatgacaagcatctgaaccggccaaccttggatgattcctcggaagaggaacatgctatagagatcactacgcaggaaataacgcagctgttccaccgatgtcagcgggctgttcaggcgctaccgagccgtgctcgggcatgcagtgagcaggagggacgccttttaggtaatgttgtagccagtctcgctcaggcactgcaggaactcagtacaagcttccggcacgcacaaagcgggtaccttaagagaatgaaaaaccgggaagagcgtagccagcacttctttgacacaagcgttcctctgatggatgatggagacgacaatactctctatcatcgagggttcaccgaggaccaacttgtgcttgtggagcagaatacattgatggtcgaggaacgtgaacgcgagattcgacaaattgtccagtctatttctgacctaaatgaaatctttcgcgaccttggagccatgatagtggaacaaggcaccgtgctggaccggatcgattataacgtggagcagtcctgcattaagaccgaggacgggctgaaacagctccacaaggcagagcagtaccagaagaaaaataggaaaatgctggtcatccttatccttttcgtgattatcattgtcctgattgtcgtgctcgtgggagtaaagtcaaggtag

SEQ ID NO: 140647 - DNA, 915 bp, Artificial Sequence
  derived and/or modified sequence
atggctactcgccgactcaccgatgcctttcttcttctgaggaacaattcaattcagaacaggcagttgctggccgagcagcttgcggacgaccgcatggctctggtaagtgggatcagtctagaccccgaagcagcgattggggtgacaaaaagaccccctcccaagtgggtggatggtgtggacgaaattcaatatgatgttgggagaatcaaacagaagatgaaagaactggcatcccttcatgacaaacatttgaatagaccaaccctggatgactcctcggaggaggaacacgccatcgagattacaacccaggaaattacccaactgtttcaccgatgccagcgtgcagttcaggcccttccatcacgagcccgagcatgttctgaacaagagggtcggcttctgggcaatgtggtggcaagtttggctcaagcattgcaggaactgagcacctcatttcggcacgctcagagcggatacctgaaaagaatgaaaaatcgcgaggagagatcgcagcacttcttcgatacttccgtgccactcatggacgacggagacgacaacacactgtatcaccgagggttcacagaagaccaactcgtcttggtcgagcaaaacaccctcatggtggaagagagggaacgcgagataagacagattgtgcagtctattagcgacctgaatgagatcttccgggatttgggcgctatgattgtggagcaggggaccgtccttgatcgaatcgattataacgtggagcagagctgcatcaagactgaggacggcctgaaacagttacacaaggccgaacagtaccagaagaaaaacagaaaaatgctggtaatcctgattttgttcgtgattattatcgtactgattgttgtcctggtcggcgtgaagtccaggtag

SEQ ID NO: 140648 - DNA, 785 bp, Artificial Sequence
  derived and/or modified sequence
agctgcagtcagatccggggatggagggagccggagaagaggagtgagaaggccggggaggcaggccctgctgtcttcctgcaggccggcagcctgctggcagtggaggaccaggccgtccaggaaaggaaggggtcaggagctgttagccgagcaacttgctgatgaccgtatggcactggtgtcaggcatcagcttagatccagaagcagcgattggtgtgacaaaacggccacctcctaagtgggtggatggagtggatgaaattcagtatgatgttggccggattaagcagaagatgaaagaattggccagccttcatgacaagcatttaaacagacccaccctggatgacagcagcgaagaggaacatgccattgagataactacccaagagatcactcagctcttccacaggtgccagcgtgccgtgcaggccctgccgagccgggcccgggcctgctccgagcaggaggggcggctgcttgggaacgtggtggcctcgctggcgcaggccctgcaggaactctccaccagcttccggcacgcacagtcaggctacctcaaacgcatgaagaatcgagaggaaagatcccagcattttttcgacacatcagtaccactaatggatgatggagacgataacactctttaccatcggggttttacagaggaccagttagttctggtggagcagaacacactgatggtggaagagcgggaacgagagattcgccagattgtacagtccatttctgacctgaatgaaatattcagggacttag

SEQ ID NO: 140649 - DNA, 4552 bp, Artificial Sequence
  derived and/or modified sequence
gcagagacctccggggggtctcagggagtagggggcttcagggcctcccagtctagagccggattggcgagttagacgcttgtagatccaaggttggattggggtggggtctctgggacgttggatcgctacgcaaggattggggggattcaagtgcttagagatcgaagtctgccctgggtagggggagtcagacaattggaaagcctaggtagttatttggggaggggtctctacgccttggcgaagcgcacagctgcatctttttggcttgaggcctgaggccttgtcgagaagcttccgtgaaagggtgggccagccgggccacgagaaagaaagtgaataaatcaggaatataagtgggcggggggcccctgagaggggggtcgcaaagggtgagacatggccaccaggcgtttaaccgacgctttcttgttgttgcggaataattccatccaaaaccggcagctgttagccgagcaacttgctgatgaccgtatggcactggtgtcaggcatcagcttagatccagaagcagcgattggtgtgacaaaacggccacctcctaagtgggtggatggagtggatgaaattcagtatgatgttggccggattaagcagaagatgaaagaattggccagccttcatgacaagcatttaaacagacccaccctggatgacagcagcgaagaggaacatgccattgagataactacccaagagatcactcagctcttccacaggtgccagcgtgccgtgcaggccctgccgagccgggcccgggcctgctccgagcaggaggggcggctgcttgggaacgtggtggcctcgctggcgcaggccctgcaggaactctccaccagcttccggcacgcacagtcaggctacctcaaacgcatgaagaatcgagaggaaagatcccagcattttttcgacacatcagtaccactaatggatgatggagacgataacactctttaccatcggggttttacagaggaccagttagttctggtggagcagaacacactgatggtggaagagcgggaacgagagattcgccagattgtacagtccatttctgacctgaatgaaatattcagggacttaggggcgatgattgtagaacagggtacagtccttgacagaattgactataacgttgaacagtcctgtatcaaaactgaagatggtttgaaacagcttcacaaggcagaacagtatcaaaagaagaatcggaagatgcttgtgattttaatattatttgtcatcatcattgtgctcattgttgtcctcgttggcgtgaagtctcgataagtggcattgggttttcgtgtgtgccgcgcgtgtggatctcccgggtgtgaggggcttggcctgcgccccgccagctgcccgcagaggtgcagcctcgaggaatctgagggcgtcggggcagcgaacctttgcatccacggactcctccttccctagtcctgctcaagcggtccggggaatgggtttttgtttttccttcattgttgagaatttaaggacctttgatactgctgcacaatagagattgagttctgggatcagttataatatatattttttttagaaagagaaaatgagctgagagtttacaggcactgcagaagctgttcagtattatatgtgtatatgctatttttttagcagccatgtctgagcagaatgttaacataatttttggaaaaattttctttaaaccatctggtttttaagaaatttggtaccaaaaattgatgagtagaggcaaaaatgccccttcatctttctctatatattttccagttgaaaacaaactaagaagtcctttaagaatttataatccgttccccattaacttaatttagcttttccatcactgttaatgatcagagtaacaaagtgtgaaaaataagaaaccatcattgatgttaattaacacatttagatgggccagttaaaacagcttcataagttttaaattaattgtaaatggaatattcctcatttaaaatttttgcactgcattttctactgtaaaccaaaagaggttactaagcaaaaccacctaaatttaagttggtgatttaaatgaatctcacattaaaagaaagcttgacagtgttatgaaagccaccagactcagccagtgtgtccccatgggtatccccagccatccttgctcaatccattacttatatactaactacataatgacctgttcaaaccagactctatttaatgaactgtgaatttacacagaggccattttaaatgggtcaccccatttaggattagtggatctcaaattattaaccaaacatcactccatttcaaagtaaaatattccaccagcgatttgatttattggctcttccattgccactgagcaatgcccaggaagcaggcacattgccaaggactgggggcatcttgactaggaagctcctcgtttgtgtgagcgtgggtcagaccgccaaagtaggacttcatcgtttacctacctattatcaatatggtgcttgaatatattcctataactgtagaacagtgtggaaagtgatggtaactttgaagttgttcatgttttattggctttgttttaattgacactagtagagttttaatggtctttgtgtaaattttaatggcttttccattgtttttgcttctcttaaaaagtttaagaagaatatgacctcattaaatgtgctgttttatttggaccagtcacacaaaatgtctctctagagttgactttaaagttgtttacagaaatttaaactcaattccagagattgaagttgtccaaacagctcatgggcttagtgtccaaacccctgcccagccttccctttccaagttggtgccacctccaggtagccattggtggttttcctattactgatgtggctgtggaatgataaggtcctagaggggccctggcatttcaggaagcggacctggtattccctgacaaacattgcttaggaaagagggccggagaataagaagccagcacctcatcagtcagccctgcaatgtgagacttccgtagctgttgagagtcactgcaggtgttctttcatcccatctgattttaacccatggttgagacgttccaagttagatctgctgctcttaggtgtggggctgtccacattagggaacttgcctcaaaaacagtccacagtggcaataccggacttctgttcaagctttttaaagtgctgagccttacaaacccctgaaggaaagtgaccctttaagagaggatcatctttttttatatttattttcaccaaatagggtgatgagggttggtttttgttccctcaacccatttgggtaaaataacggatctgattagaaactgttttaaggaggggctgggctcggtggctcacgcctgtaatcccagactttgagaggccaaggcggtcacgaggtcaggagttcgagaccagcctagccaacatggtgaaaccccgtctctacaaaaaatacaaaaattagccgggtgggacacgcctgtaatcccagctactcaagaggctgaggcaggagaatagcttgaacccgggaggcagaggttgcagtgagccgagatcacaccactgcactccagcctgggtgacagagcgaggctccgtctcaaaaaaaaaaaaaaaaaattgttttagcgctgggtttcccaaggtgggagagacagacccagcctggagctggcccctggcctgtgtgctgacttcttggggtcctcaaaccactgtatttttctgttgagcctgtacttggggagagatcagtagcatttgaggaagtaagagaaaagaatcatggtacctcagggtttctttccctttactcgctggcagccattgtctgtgggcacctcatgtttttccacactctactgggccgtggaggtaacgatcacccaggccagtctcctctgcctgggatgcgccctctgagaggaggcctagcagggcaggctccctctgggcatccctggatgcagcctctggacacatgcctcctttaaagtgtccgggtgcagctcaggttgagtggaggtagaaggagaaacagacatgtttaccacgcgttttccaaagctcctgatctttcccaagattgtaactgaaaactgctgtctcttgttttgttcgttttgggggtggtggtgctggctgggccatgcttgtgaagtgatgtgtgtctctgatttaacggattcactgttttctctgctaattgagagagcgttatttacattatttatttgttttgacacaagtgctttcagtgttttatcctagctaatggcttcttaaaggtaataaaacccttccaacgtaattggtcagataaaactttttttcttgtatgcttaaataaagcaattagtgaagcacttctatccaaaatgacttttttgtccttttttaaaaccaatttactgttactggaaactttttgtacaataaagcaatcacgcagattaaagaacatcctgcaatcctagtattaattttaa

SEQ ID NO: 140650 - DNA, 560 bp, Artificial Sequence
  derived and/or modified sequence
agtcagatccggggatggagggagccggagaagaggagtgagaaggccggggaggcaggccctgctgtcttcctgcaggccggcagcctgctggcagtggaggaccaggccgtccaggaaaggaaggggtcaggaggtcgggcagggcctcagcagctgttagccgagcaagagctggacgagcttgctgatgaccgtatggcactggtgtcaggcatcagcttagatccagaagcagcgattggtgtgacaaaacggccacctcctaagtgggtggatggagtggatgaaattcagtatgatgttggccggattaagcagaagatgaaagaattggccagccttcatgacaagcatttaaacagacccaccctggatgacagcagcgaagaggaacatgccattgagataactacccaagagatcactcagctcttccacaggtgccagcgtgccgtgcaggccctgccgagccgggcccgggcctgctccgagcaggaggggcggctgcttgggaacgtggtggcctcgctggcgcaggccctgcaggaactctccac

SEQ ID NO: 140651 - DNA, 553 bp, Artificial Sequence
  derived and/or modified sequence
gagctgcagtcagatccggggatggagggagccggagaagaggagtgagaaggccggggaggcaggccctgctgtcttcctgcaggccggcagcctgctggcagtggaggaccaggccgtccaggaaaggaaggggtcaggagctgttagccgagcaagagctggacgagcttgctgatgaccgtatggcactggtgtcaggcatcagcttagatccagaagcagcgattggtgtgacaaaacggccacctcctaagtgggtggatggagtggatgaaattcagtatgatgttggccggattaagcagaagatgaaagaattggccagccttcatgacaagcatttaaacagacccaccctggatgacagcagcgaagaggaacatgccattgagataactacccaagagatcactcagctcttccacaggtgccagcgtgccgtgcaggccctgccgagccgggcccgggcctgctccgagcaggaggggcggctgcttgggaacgtggtggcctcgctggcgcaggccctgcaggaactctccaccagctt

SEQ ID NO: 140652 - DNA, 864 bp, Artificial Sequence
  derived and/or modified sequence
atgaaggacagactggccgagctgctggacctgagcaagcagtacgaccagcagttccccgacggcgacgacgagttcgacagcccccacgaggacatcgtgttcgagaccgaccacatcctggagagcctgtacagagacatcagagacatccaggacgagaaccagctgctggtggccgacgtgaagagactgggcaagcagaacgccagattcctgaccagcatgagaagactgagcagcatcaagagagacaccaacagcatcgccaaggccatcaaggccagaggcgaggtgatccactgcaagctgagagccatgaaggagctgagcgaggccgccgaggcccagcacggcccccacagcgccgtggccagaatcagcagagcccagtacaacgccctgaccctgaccttccagagagccatgcacgactacaaccaggccgagatgaagcagagagacaactgcaagatcagaatccagagacagctggagatcatgggcaaggaggtgagcggcgaccagatcgaggacatgttcgagcagggcaagtgggacgtgttcagcgagaacctgctggccgacgtgaagggcgccagagccgccctgaacgagatcgagagcagacacagagagctgctgagactggagagcagaatcagagacgtgcacgagctgttcctgcagatggccgtgctggtggagaagcaggccgacaccctgaacgtgatcgagctgaacgtgcagaagaccgtggactacaccggccaggccaaggcccaggtgagaaaggccgtgcagtacgaggagaagaacccctgcagaaccctgtgctgcttctgctgcccctgcctgaagtag

SEQ ID NO: 140653 - DNA, 864 bp, Artificial Sequence
  derived and/or modified sequence
atgaaagacagactggcggaattgctggacctgtctaaacaatatgatcagcagtttcccgacggcgacgacgaatttgatagcccacatgaagatatagtttttgaaaccgaccacatactggaaagcctctatagggacattcgagacatacaggatgaaaatcaactgctcgtggccgacgtgaagcgattggggaaacaaaatgcacggtttctcacatcaatgcgaaggctgagcagcattaagcgggacacgaattctatagccaaggcaatcaaagcccgtggcgaggtcattcactgcaagctgagagccatgaaggagctttcagaggcagctgaggctcagcatggcccccattcagcagtggcaaggatttctcgggcccaatacaatgctttgactcttactttccaacgcgccatgcacgactacaaccaggctgaaatgaagcagagagacaactgcaagattagaattcagaggcagttggaaattatgggcaaggaagtctcaggagatcagatagaagatatgtttgaacagggaaagtgggatgtcttttcggagaacctgcttgcagatgtgaagggagcaagagccgctctgaacgagatcgagtcgcgccacagggaactcctgaggctcgagagtaggattcgcgatgtgcatgagctatttttgcagatggctgtcctggtagagaagcaggcggacaccctgaacgtgattgaattaaacgtccagaagactgttgactataccgggcaggccaaggcacaggtgcggaaagcagttcagtatgaggagaaaaatccttgtagaactctctgctgcttctgttgcccctgtctaaaatag

SEQ ID NO: 140654 - DNA, 864 bp, Artificial Sequence
  derived and/or modified sequence
atgaaggaccggctggccgagctgctggacctgagcaagcagtatgaccagcagttcccagatggagatgatgaatttgacagcccccatgaagatattgtgtttgaaacagaccacatcctggagagcctgtacagagacatccgggacatccaggatgagaaccagctgctggtggctgatgtgaagaggctgggcaagcagaatgcccgcttcctgacctccatgaggcggctgagcagcatcaagagggacaccaacagcatcgccaaggccatcaaggcccggggggaggtgatccactgcaagctgcgggccatgaaggagctgtctgaggccgctgaggcccagcacggcccccacagcgctgtggcccgcatcagccgggcccagtacaatgccctgaccctgaccttccagagggccatgcatgactacaaccaggccgagatgaagcagagggacaactgcaagatccgcatccagaggcagctggagatcatgggcaaggaggtgtctggggaccagatcgaggacatgtttgagcagggcaagtgggatgtgttttctgagaacctgctggctgatgtgaagggggcccgggccgccctgaatgaaattgagagccgccaccgggagctgctgcggctggagagccgcatcagagatgtgcatgagctgttcctgcagatggctgtgctggtggagaagcaggccgacaccctgaatgtgattgagctgaatgtgcagaagacagtggactacacaggccaggccaaggcccaggtgaggaaggctgtgcagtatgaggagaagaacccctgcaggaccctgtgctgcttctgctgcccctgcctgaagtag

SEQ ID NO: 140655 - DNA, 864 bp, Artificial Sequence
  derived and/or modified sequence
atgaaggaccggctggccgagctgctggacctgagcaagcagtacgaccagcagttccctgacggggacgatgagttcgactcaccccacgaggatatcgtctttgagacagaccacatcctcgagtctctgtatcgcgacattcgggatatacaggatgagaaccagctcctggtggcagatgtcaagcgtcttgggaagcaaaacgctcgctttttgacctccatgcgacggctttcgagtattaagcgggataccaatagcatagcgaaagccatcaaagcacggggcgaagttatccactgcaagcttcgggccatgaaagagctgagcgaggcggccgaagctcagcacggcccccacagtgccgttgccaggatatcgagggcccagtataacgctcttacactgacctttcagagagccatgcatgactataatcaagcagaaatgaagcaaagggataattgtaagatccgcattcagagacagctcgagatcatgggaaaggaagtcagtggggaccaaatcgaggacatgtttgagcaaggtaagtgggacgttttctcagagaatctgttagcagacgtcaaaggggcccgggcggctttgaacgagatcgaatcacgtcaccgggaactactgcggctggagtccagaataagggacgtgcacgaacttttcttgcagatggcagtgcttgtagaaaaacaagctgacaccctcaacgtaattgaacttaacgtgcagaagaccgttgactacaccggacaggccaaggcacaggtccggaaagcagtgcaatacgaagagaaaaacccctgcaggacactatgttgtttctgctgtccatgcctcaagtag

SEQ ID NO: 140656 - DNA, 864 bp, Artificial Sequence
  derived and/or modified sequence
atgaaggataggttggcagagctgctggatctttcaaaacaatatgatcagcagttccctgacggagatgacgagtttgatagccctcacgaggatatcgtctttgaaacagatcatattttggagtccctgtaccgcgacatccgtgatatacaagatgaaaatcagctgctggtggcggatgtgaagcggttggggaaacagaacgcacgcttcctcacctcgatgcggaggctgtctagcatcaaacgggacacaaactccatcgcgaaagcgattaaagcaagaggtgaagtgatccattgcaaactgcgggctatgaaagagttgagtgaggccgctgaagctcagcacgggccacattccgctgtcgcccgtatcagtagagcccagtacaatgcccttaccttaacattccagagagcaatgcacgactacaaccaggcagagatgaagcaacgggacaactgtaagattaggatccagagacaattggaaatcatgggtaaggaggtctcaggagaccaaattgaggacatgtttgagcaaggaaagtgggatgtttttagcgaaaatctgctggcggatgtgaaaggtgcaagggctgctctcaatgagatagaatctaggcaccgagagctgcttcggcttgagtcacggattagagacgtgcacgagctttttcttcaaatggccgtcctcgtcgagaaacaggcggacaccctcaacgtgatcgagttaaatgtgcaaaaaacagttgactataccgggcaggccaaggctcaggtacggaaagccgttcagtatgaggagaaaaatccttgcaggaccctctgttgcttttgctgcccttgtctaaaatag

SEQ ID NO: 140657 - protein, 221 aa, Artificial Sequence
  derived and/or modified sequence
MSGWADERGGEGDGRIYVGNLPTDVREKDLEDLFYKYGRIREIELKNRHGLVPFAFVRFEDPRDAEDAIYGRNGYDYGQCRLRVEFPRTYGGRGGWPRGGRNGPPTRRSDFRVLVSGLPPSGSWQDLKDHMREAGDVCYADVQKDGVGMVEYLRKEDMEYALRKLDDTKFRSHEGETSYIRVYPERSTSYGYSRSRSGSRGRDSPYQSRGSPHYFSPFRPY

SEQ ID NO: 140658 - DNA, 666 bp, Artificial Sequence
  derived and/or modified sequence
atgagcggatgggctgatgagcgggggggagagggcgacggacgcatatacgtcggaaatctccctacggatgtgcgcgaaaaagatctcgaagacctcttttacaagtacggccgcatccgggagatagagctgaagaacagacacgggctggtgccatttgccttcgtgcggtttgaggaccccagggacgccgaagatgccatctatggaaggaacggctatgactatggccagtgcagactgagagttgaattcccccggacatacggaggcagaggtgggtggccaagaggaggacgcaacggtcccccaacccgacgcagtgatttcagagtcctggtatccgggcttccgccaagcggttcatggcaggacttaaaggaccatatgagggaagccggggacgtttgctatgccgacgttcagaaagacggcgtggggatggtggagtacctgcgtaaggaggacatggaatacgccctgagaaaactggacgataccaagtttcgctcccacgagggtgagacgtcttacatcagagtgtaccccgagcgctcgacttcctacgggtactccagaagccgatccggaagccggggcagagactccccatatcaatcgcgcgggtctcctcattacttttcacccttccgtccttattag

SEQ ID NO: 140659 - DNA, 666 bp, Artificial Sequence
  derived and/or modified sequence
atgagcggctgggcagatgagcggggcggggagggagatggccgcatctacgtgggcaacctgcccacagatgtgcgggagaaggacctggaggacctcttctacaagtatggccgcatccgggagattgagctgaagaacagacatggcctggtgccctttgcctttgtgcgctttgaggaccccagagatgctgaagatgccatctacggcagaaatggctatgactatggccagtgccgcctgcgggtggagttccccaggacctacggcggccggggcggctggccccggggcggcagaaatggcccccccaccaggagaagtgacttccgggtgctggtgtctggcctgcccccatctggctcctggcaggacctgaaggaccacatgagggaggccggagatgtgtgctacgcagatgtgcagaaggatggagtgggcatggtggagtacctgaggaaggaggacatggagtatgccctgaggaagctggatgacaccaagttccgcagccatgaaggagagaccagctacatccgggtgtacccagagaggagcaccagctatggctacagccgcagccgcagcggcagccggggccgggacagcccctaccagagccggggcagcccccactacttcagccccttccggccctactag

SEQ ID NO: 140660 - DNA, 666 bp, Artificial Sequence
  derived and/or modified sequence
atgagcggctgggccgacgagcggggcggcgagggcgacggccggatctacgtcggaaatctgccaactgatgttagagaaaaagaccttgaggacctgttttacaaatatggacgcattcgtgaaattgaactgaaaaaccggcatggcctggtgccgtttgcttttgttcgcttcgaggaccctagagacgccgaggatgcgatctatggtcgaaatggctacgattatggccaatgccgtcttagggtcgagttcccacggacttatggcggaagaggtggctggccacgtggcggacggaacgggcctcccacccggagaagcgactttcgcgttctggtatctggtttacctccatcgggcagctggcaggacctgaaggaccatatgagagaggcaggggacgtctgctacgcggacgtgcagaaggacggtgtcgggatggtcgaatacttgagaaaggaggatatggagtatgctctgagaaaacttgatgacacgaaattcaggagccacgaaggagagaccagttacataagagtgtaccctgagcggtccaccagctacggatattctaggagcaggtctggctcacggggcagggattcaccttatcagagtcggggttctccacactatttttcacctttccggccatactag

SEQ ID NO: 140661 - DNA, 666 bp, Artificial Sequence
  derived and/or modified sequence
atgtcgggatgggctgacgagagaggcggtgaaggcgacggaaggatttacgtcggcaatctgcccaccgatgttagggagaaagaccttgaagaccttttttataagtatggaaggatcagggagattgagttaaaaaatagacatggcctcgttcccttcgctttcgtcagattcgaagatccacgcgatgccgaggacgcgatctatggtcggaacggatacgactatgggcagtgtcgtctccgggtggagttccctagaacctatggcggtcgaggtggatggcctaggggtggtagaaatggcccacctacgaggcgatctgactttcgggttcttgtctcagggctgccgccatccggaagttggcaagacctgaaggaccacatgcgcgaagcaggagacgtctgctatgcagatgtccaaaaagacggggtcggcatggtcgagtatctgaggaaggaagacatggagtacgctttacgtaaactcgacgatacgaagttcagatcccacgaaggagaaacatcatatatacgcgtctaccccgaacggagtacctcctatggctattcgagatctagaagcggtagcagggggagggatagtccctaccagtccagaggctcaccgcactatttctctcctttcagaccctattag

SEQ ID NO: 140662 - DNA, 666 bp, Artificial Sequence
  derived and/or modified sequence
atgagcggctgggccgacgagagaggcggcgagggcgacggcagaatctacgtgggcaacctgcccaccgacgtgagagagaaggacctggaggacctgttctacaagtacggcagaatcagagagatcgagctgaagaacagacacggcctggtgcccttcgccttcgtgagattcgaggaccccagagacgccgaggacgccatctacggcagaaacggctacgactacggccagtgcagactgagagtggagttccccagaacctacggcggcagaggcggctggcccagaggcggcagaaacggcccccccaccagaagaagcgacttcagagtgctggtgagcggcctgccccccagcggcagctggcaggacctgaaggaccacatgagagaggccggcgacgtgtgctacgccgacgtgcagaaggacggcgtgggcatggtggagtacctgagaaaggaggacatggagtacgccctgagaaagctggacgacaccaagttcagaagccacgagggcgagaccagctacatcagagtgtaccccgagagaagcaccagctacggctacagcagaagcagaagcggcagcagaggcagagacagcccctaccagagcagaggcagcccccactacttcagccccttcagaccctactag

SEQ ID NO: 140663 - DNA, 1201 bp, Artificial Sequence
  derived and/or modified sequence
cgcagccgcgttctctttaagaggactccttttgcctccgccgaccccttcgcttccgctccgcgttcccacaatgcagtgcggctgagcgcctcggagcccgcggggacgctgcggggggacccgtgctgaggcggcggcggcgacgtgggctgcggcgggcccgcggcgtcgggcggtgcggatgtcgggctgggcggacgagcgcggcggcgagggcgacgggcgcatctacgtggggaaccttccgaccgacgtgcgcgagaaggacttggaggacctgttctacaagtacggccgcatccgcgagatcgagctcaagaaccggcacggcctcgtgcccttcgccttcgtgcgcttcgaggacccccgagatgcagaggatgctatttatggaagaaatggttatgattatggccagtgtcggcttcgtgtggagttccccaggacttatggaggtcggggtgggtggccccgtggtgggaggaatgggcctcctacaagaagatctgatttccgagttcttgtttcaggacttcctccgtcaggcagctggcaggacctgaaggatcacatgcgagaagctggggatgtctgttatgctgatgtgcagaaggatggagtggggatggtcgagtatctcagaaaagaagacatggaatatgccctgcgtaaactggatgacaccaaattccgctctcatgagggtgaaacttcctacatccgagtttatcctgagagaagcaccagctatggctactcacggtctcggtctgggtcaaggggccgtgactctccataccaaagcaggggttccccacactacttctctcctttcaggccctactgagacaggtgatgggaattttttctttattttttaggttaactgagctgctttgtgctcagaatctacattccagattgaggatttagtgtcttaggaaatttttttaattttttttttttaaagaagaaaaaaaactacataatttctaccagggccatattagcagtgaaacattttaaactgcagaaattgtggttttggttcagaaacaagttgtatatttttcacccctgattatgggaaaaaaatcagttctgtctttgtgggttgctctactatggagatcaacagttactgtgactgagtcggcccattctgtttagaaatatattttaaatgtttagtaattga

SEQ ID NO: 140664 - protein, 578 aa, Artificial Sequence
  derived and/or modified sequence
MAVRWTWAGKSCLLLAFLTVAYIFVELLVSTFHASAGAGRARELGSRRLSDLQKNTEDLSRPLYKKPPADSRALGEWGKASKLQLNEDELKQQEELIERYAINIYLSDRISLHRHIEDKRMYECKSQKFNYRTLPTTSVIIAFYNEAWSTLLRTIHSVLETSPAVLLKEIILVDDLSDRVYLKTQLETYISNLDRVRLIRTNKREGLVRARLIGATFATGDVLTFLDCHCECNSGWLEPLLERIGRDETAVVCPVIDTIDWNTFEFYMQIGEPMIGGFDWRLTFQWHSVPKQERDRRISRIDPIRSPTMAGGLFAVSKKYFQYLGTYDTGMEVWGGENLELSFRVWQCGGKLEIHPCSHVGHVFPKRAPYARPNFLQNTARAAEVWMDEYKEHFYNRNPPARKEAYGDISERKLLRERLRCKSFDWYLKNVFPNLHVPEDRPGWHGAIRSRGISSECLDYNSPDNNPTGANLSLFGCHGQGGNQFFEYTSNKEIRFNSVTELCAEVPEQKNYVGMQNCPKDGFPVPANIIWHFKEDGTIFHPHSGLCLSAYRTPEGRPDVQMRTCDALDKNQIWSFEK

SEQ ID NO: 140665 - DNA, 1737 bp, Artificial Sequence
  derived and/or modified sequence
atggccgtgagatggacctgggccggcaagagctgcctgctgctggccttcctgaccgtggcctacatcttcgtggagctgctggtgagcaccttccacgccagcgccggcgccggcagagccagagagctgggcagcagaagactgagcgacctgcagaagaacaccgaggacctgagcagacccctgtacaagaagccccccgccgacagcagagccctgggcgagtggggcaaggccagcaagctgcagctgaacgaggacgagctgaagcagcaggaggagctgatcgagagatacgccatcaacatctacctgagcgacagaatcagcctgcacagacacatcgaggacaagagaatgtacgagtgcaagagccagaagttcaactacagaaccctgcccaccaccagcgtgatcatcgccttctacaacgaggcctggagcaccctgctgagaaccatccacagcgtgctggagaccagccccgccgtgctgctgaaggagatcatcctggtggacgacctgagcgacagagtgtacctgaagacccagctggagacctacatcagcaacctggacagagtgagactgatcagaaccaacaagagagagggcctggtgagagccagactgatcggcgccaccttcgccaccggcgacgtgctgaccttcctggactgccactgcgagtgcaacagcggctggctggagcccctgctggagagaatcggcagagacgagaccgccgtggtgtgccccgtgatcgacaccatcgactggaacaccttcgagttctacatgcagatcggcgagcccatgatcggcggcttcgactggagactgaccttccagtggcacagcgtgcccaagcaggagagagacagaagaatcagcagaatcgaccccatcagaagccccaccatggccggcggcctgttcgccgtgagcaagaagtacttccagtacctgggcacctacgacaccggcatggaggtgtggggcggcgagaacctggagctgagcttcagagtgtggcagtgcggcggcaagctggagatccacccctgcagccacgtgggccacgtgttccccaagagagccccctacgccagacccaacttcctgcagaacaccgccagagccgccgaggtgtggatggacgagtacaaggagcacttctacaacagaaacccccccgccagaaaggaggcctacggcgacatcagcgagagaaagctgctgagagagagactgagatgcaagagcttcgactggtacctgaagaacgtgttccccaacctgcacgtgcccgaggacagacccggctggcacggcgccatcagaagcagaggcatcagcagcgagtgcctggactacaacagccccgacaacaaccccaccggcgccaacctgagcctgttcggctgccacggccagggcggcaaccagttcttcgagtacaccagcaacaaggagatcagattcaacagcgtgaccgagctgtgcgccgaggtgcccgagcagaagaactacgtgggcatgcagaactgccccaaggacggcttccccgtgcccgccaacatcatctggcacttcaaggaggacggcaccatcttccacccccacagcggcctgtgcctgagcgcctacagaacccccgagggcagacccgacgtgcagatgagaacctgcgacgccctggacaagaaccagatctggagcttcgagaagtag

SEQ ID NO: 140666 - DNA, 1737 bp, Artificial Sequence
  derived and/or modified sequence
atggctgtgcggtggacctgggccggtaagtcatgtcttctgcttgccttcctcactgttgcctacatattcgtcgaacttctggtcagtaccttccacgcttcggccggtgctggtagagcccgcgagcttggctctaggcgtttaagtgatctgcaaaaaaatacggaggacctcagccgaccactctacaaaaagccccctgcagactccagggccctgggggagtggggcaaggccagtaaactccagctcaacgaagatgagctgaaacagcaggaagaacttattgagaggtacgccattaacatctacctaagcgaccgcatatccctccaccgccatatagaggacaagcggatgtatgaatgtaagagccagaagtttaattacagaacactgcccaccacttccgtcatcatcgccttttataacgaggcctggtctaccctgctgcgaacaatccatagtgtcttagaaaccagtcctgccgtcttactgaaggaaataatcctggtcgacgaccttagtgaccgggtttatctgaagacacagttggaaacatatatatccaatctggaccgagtccggctgatccggaccaacaagcgggagggcctcgtgagagcaaggcttatcggcgccacatttgctactggcgatgtgctcacgtttcttgactgccactgtgagtgcaacagcggatggctggaaccgcttctcgagaggattggtagagacgagaccgccgtcgtttgcccagtgatcgacacaatagattggaacactttcgagttttatatgcagattggcgagcctatgatcggaggcttcgattggcgattgacttttcaatggcacagcgtcccgaagcaagaacgtgaccgtcggatttcccgcattgatccgatcaggtcccctacaatggcgggtggactatttgctgtcagcaaaaaatacttccagtatttgggcacatacgataccgggatggaggtgtggggcggtgaaaacttggaactctcttttagggtctggcaatgcggcgggaagcttgagattcatccctgtagccacgtaggacatgtcttcccaaagagagccccatacgcacggcccaacttccttcaaaataccgcgcgcgcagcggaggtgtggatggacgagtacaaagagcacttttataacagaaacccaccagctcgcaaggaagcatatggtgatatatcagaaaggaaacttctccgagagaggctgcgctgcaagagctttgactggtacctaaagaatgtcttccctaatctacatgtgccggaagacaggcccgggtggcacggcgctatcagatcccgcggcatcagttctgaatgcttggactataatagccccgacaataatcctacaggggcaaacctcagcctttttggctgtcatggccaaggaggtaatcaattttttgagtacacctcaaataaggagataaggtttaactccgttactgagctgtgcgccgaagtgccagaacagaagaactacgtcgggatgcaaaattgccctaaggacggattccctgtgcctgctaatatcatctggcactttaaggaggatggaactatcttccaccctcactcaggactctgccttagcgcctaccgcactcccgagggccgtccggacgtccaaatgcgcacctgtgacgctttggacaaaaatcagatctggtccttcgaaaaatag

SEQ ID NO: 140667 - DNA, 1737 bp, Artificial Sequence
  derived and/or modified sequence
atggctgtgcgctggacctgggccggcaagagctgcctgctgctggccttcctgactgtggcctacatctttgtggagctgctggtgtccaccttccacgccagcgctggggccggccgggcccgggagctgggcagccggcggctgagtgacctgcagaagaacacagaggacctgagccggcccctgtacaagaagcccccagctgacagccgggccctgggggagtggggcaaggccagcaagctgcagctgaatgaagatgagctgaagcagcaggaggagctgattgaaagatatgccatcaacatctacctgagtgaccgcatcagcctgcaccgccacatcgaggacaagaggatgtatgagtgcaagagccagaagttcaactaccgcaccctgcccaccaccagcgtcatcatcgccttctacaatgaggcctggagcaccctgctgcggaccatccacagcgtgctggagaccagccctgctgtgctgctgaaggagatcatcctggtggatgacctgagtgacagagtgtacctgaagacccagctggagacctacatcagcaacctggacagagtgcggctcatccgcaccaacaagcgggagggcctggtgcgggcccggctgattggagccacctttgccactggagatgtgctgaccttcctggactgccactgtgagtgcaacagcggctggctggagcccctgctggagcgcatcggcagagatgaaacagctgtggtgtgccctgtgattgacaccatcgactggaacacctttgagttctacatgcagatcggggagcccatgattggaggctttgactggaggctgaccttccagtggcacagcgtgcccaagcaggagcgggaccggcgcatcagcagaattgaccccatccgcagccccaccatggccggcggcctgtttgctgtgtccaagaagtacttccagtacctgggcacctatgacaccggcatggaggtgtggggcggggagaacctggagctgtccttccgggtgtggcagtgtggcggcaagctggagatccacccctgcagccacgtgggccacgtgttccccaagagggccccctatgcccggcccaacttcctgcagaacacagcccgggctgctgaggtgtggatggatgagtacaaggagcacttctacaacagaaatcctccagccaggaaggaggcctacggggacatcagcgagaggaagctgctgcgggagcggctgcgctgcaagagctttgactggtacctgaagaatgtgttccccaacctgcacgtgcctgaagatcggcccggctggcatggagccatccgcagccggggcatcagcagcgagtgcctggactacaacagcccagacaacaaccccaccggggccaacctgagcctgtttggctgccacggccagggcggcaaccagttctttgagtacaccagcaacaaggagatccgcttcaacagcgtgacagagctgtgtgccgaggtgcctgagcagaagaactacgtgggcatgcagaactgccccaaggatggcttccctgtgcctgccaacatcatctggcacttcaaggaggatggcaccatcttccacccccacagcggcctgtgcctgagcgcctaccgcaccccagagggccgcccagatgtgcagatgaggacctgtgatgccctggacaagaaccagatctggagctttgagaagtag

SEQ ID NO: 140668 - DNA, 1737 bp, Artificial Sequence
  derived and/or modified sequence
atggccgtgcggtggacctgggccggcaagagctgcctgctgctggcctttctgacagtggcatatatcttcgtagagcttctggtgtctacatttcatgcctctgccggcgccggacgcgccagggagctgggaagtaggaggctgtctgatctgcagaagaacacagaggacctcagtcgacccctatacaaaaagccgccggctgattcccgagcactaggcgaatggggtaaagcgtcaaagcttcagttgaatgaggatgaactgaagcagcaggaggaactaatagaacggtacgctatcaacatttatctgtcggaccgaatcagtttacatcgtcacatcgaagataaaagaatgtatgagtgcaaaagccagaaattcaattacagaacccttccgacaacctctgtgatcatcgcattttacaacgaggcctggagcacactcctgagaaccatccatagcgtcctggagacaagccccgcagtgctgctgaaggagatcatcctcgtggacgaccttagcgatagggtgtacctgaagacgcagcttgaaacatacatttccaatctggaccgggtaagactgatcaggacgaataagagagaggggttagtgagagctcggctgatcggagccaccttcgctaccggtgacgtgctgacattcctggattgtcactgcgagtgcaatagcggctggctggagcccctgctcgagcggatcggccgtgatgaaactgcagtagtttgccctgtgattgacacgattgactggaacacatttgagttttacatgcaaattggcgaacccatgattggcggattcgattggcgtctcacttttcagtggcatagtgtccctaagcaggaacgcgacaggagaatcagtaggatcgatccaataagatccccgaccatggctggcggtctatttgcagtgtcgaagaaatatttccagtacctcggcacctacgatactggtatggaggtgtgggggggtgaaaacctggagctaagctttagagtctggcaatgtggtggtaagctggaaatccatccctgtagtcacgtcggccacgtgtttcccaagcgtgctccatatgcacgccccaactttctgcaaaatactgcccgcgcagccgaagtgtggatggacgaatataaggagcacttctacaacaggaatcctcccgctcggaaggaagcctacggcgatattagcgagcggaagttgttacgcgaaaggctaagatgcaagtctttcgattggtatctcaagaacgtgttcccaaacctccacgttccggaagataggcctggttggcacggggccatacggtctcgcggaatcagttcagagtgtctggattacaatagccctgacaacaacccaacaggagctaacctgagcctgtttgggtgtcatggacaggggggcaatcagttcttcgaatacacctccaacaaggagatccgcttcaactcagtgacagagttgtgtgccgaggtacctgagcagaagaattatgtgggcatgcaaaactgtccaaaggatggattcccagtgcctgctaacatcatttggcactttaaagaggacggcaccatttttcatccgcattctggtttatgcctctcagcctataggacacctgaaggcaggcccgacgtccagatgaggacctgcgacgctttggataagaaccagatttggtcatttgaaaagtag

SEQ ID NO: 140669 - DNA, 1737 bp, Artificial Sequence
  derived and/or modified sequence
atggccgtgagatggacctgggcaggcaagagttgcctgcttctggccttccttacagtcgcctatatttttgtggagctgctggtgtcaacattccatgcttccgccggagccggacgcgctcgcgaactgggcagtaggcggctgtcagatctgcagaaaaacacagaagacctttcccggcctctctataaaaagcctcccgctgattcccgggcactgggggagtggggcaaggcatccaaactgcagcttaatgaagacgagctgaaacagcaggaggagctgattgagcggtatgccattaacatatacctatcagatcgcatctctctgcacaggcacatcgaggataaaagaatgtatgaatgcaagtcccagaagttcaattaccggacacttcccactaccagcgtgatcatcgctttttacaacgaagcatggagcaccctcctgcggactatccattcagtgctggagacctcacctgcagtcctgcttaaagagataatcctggtggatgatctctcagatagggtttacctcaagactcagttggaaacgtatatatccaatctggaccgggtgcgactgatcaggacaaacaagcgggagggacttgtgcgcgctcggttgatcggtgcaaccttcgcaaccggtgatgtgttgaccttccttgattgtcattgtgaatgcaattccgggtggctggaaccattgctggaacggattggccgagatgagacagcggttgtatgcccagtcatcgataccattgactggaacacatttgaattttatatgcagattggcgaaccaatgatcggcggttttgattggcggctgaccttccaatggcattcagtccccaaacaggagcgagatagaagaatcagcaggatagaccccattcgttctcccaccatggccggaggcttgttcgccgttagtaagaagtacttccagtacctggggacctatgacactggaatggaggtgtggggaggggaaaacctggaactttcctttagggtttggcagtgcggcggtaaactagaaatccatccctgttctcacgtcggtcacgtgttccccaagagagccccttatgccaggcctaattttctgcagaacactgcacgagccgctgaagtttggatggacgaatataaggaacacttttacaaccgtaatccacccgcacggaaagaagcctatggcgacatctccgagcgcaagctgctgagggaaagacttcggtgtaaatctttcgactggtatttgaagaacgtgtttcctaacctgcatgtacctgaggaccggcctggctggcatggagcaatccgatcacggggaatttcaagtgagtgtctggactacaactcaccagacaacaacccaactggggctaatctgtctctttttggttgtcatggccagggcggtaaccaattctttgagtatacctctaacaaggaaatccgttttaatagcgtgacagagctgtgtgcagaagtaccagaacagaagaattacgtgggaatgcaaaactgccccaaagacgggttcccggttccggctaatatcatatggcatttcaaggaggatgggacaattttccaccctcattcgggactttgcctgtccgcttataggactcccgaaggaaggcctgacgtgcaaatgaggacctgtgacgcactggataaaaaccagatatggtcatttgagaaatag

SEQ ID NO: 140670 - DNA, 5399 bp, Artificial Sequence
  derived and/or modified sequence
gttggctggagagtttgtgaaaagttgtgagccgagcaggaggaagtagggagagaggagttgggctgtgccggaggccgaggaccgagagggctcaggtgacccctggaaagcctgggtggctggaaaggagcctagcgcctgcatgaaaggaagaacctgctgggaagtacctgagctcgagctgtgggttccgccgcccttcccctgcgtggtggcttggtggccgcgtctgcgcctcagccctgagaatccggatggcggtgaggtggacttgggcaggcaagagctgcctgctgctggcgtttttaacagtggcctatatcttcgtggagctcttggtctctacttttcatgcctccgcaggagccggccgtgccagggagctggggtcaagaaggctctcagacctccagaaaaatacggaggatttgtctcgaccgctttataagaagccccctgcagattcccgtgcacttggggagtgggggaaagccagcaaactccagctcaacgaggatgaactgaagcagcaagaagaactcattgagagatacgccatcaatatttacctcagtgacaggatttccctgcatcgacacatagaggataaaagaatgtatgagtgtaagtcccagaagttcaactataggacacttcctaccacctctgttatcattgctttctataacgaagcctggtcgactttgctccgtaccattcacagtgttttagaaacttctcctgcagttcttttgaaagagatcatcttggtggatgacttgagtgacagagtttatttgaagacacaacttgaaacttacatcagcaatcttgatagagtacgcttgattaggaccaataagcgagaggggctggttagggcccgtctgattggggccactttcgccactggggacgtcctcactttcctggattgtcactgtgagtgtaattccggttggctggaaccgcttttggaaaggattgggagagatgaaacagcagttgtgtgtcctgttatagacacaattgattggaatacttttgaattctatatgcagataggggagcccatgattggtgggtttgactggcgtttaacatttcagtggcattctgtccccaaacaggaaagggacaggcggatatcaagaattgaccccatcagatcacctaccatggctggaggactgtttgctgtcagcaagaaatattttcagtaccttggaacgtatgacacaggaatggaagtgtggggaggtgaaaaccttgagctgtcttttagggtgtggcagtgtggtggcaaattggagatccacccgtgttcccacgtgggccatgtgttccccaagcgggcaccatatgctcgccccaatttcctacagaatactgctcgggcagcagaagtttggatggatgaatacaaagagcacttctacaatagaaaccctccagcaagaaaagaagcttatggtgatatttctgaaagaaaattactacgagagcggttgagatgcaagagctttgactggtatttgaaaaacgtttttcctaatttacatgttccagaggatagaccaggctggcatggggctattcgcagtagagggatctcgtctgaatgtttagattataattctcctgacaacaaccccacaggtgctaacctttcactgtttggatgccatggtcaaggaggcaatcaattctttgaatatacttcaaacaaagaaataaggtttaattctgtgacagagttatgtgcagaggtacctgagcaaaaaaattatgtgggaatgcaaaattgtcccaaagatgggttccctgtaccagcaaacattatttggcattttaaagaagatggaactatttttcacccacactcaggactgtgtcttagtgcttatcggacaccggagggccgacctgatgtacaaatgagaacttgtgatgctctagataaaaatcaaatttggagttttgagaaatagagcacaacagcactttcgtcatgagctgacagtagtgtcaagaaagtcaaagagccttaagagcctcagtgaagattgtattttattttatcaaaagccacctagcagtcatctgtggagcactggaaagctggggttcattttggtatatcacactgaaactgggtacccagagtgctgctgtttaatatttcacaatgccttacttattggttgttttatataagagttttgtcaatatggtctcttcttaaaagaagttgactatgaattgaaacacacaaaacatttaagtgccagacttaatattaaagaatgtaaaggtccaagtaaaatgaggtatgatttatgttgatgtgtaagttcaccgcacatcccactttttaacaaaactcatgaatgtgcagtttgagccattgctattttgattacatagaatttgtatttcttttttagccagcacattaaattttagattttattttttaatctaatttttttctaatcaaaaagaaaattgagcttaaggcaaaaggcctggttttagagatatgtgtaattggaagagggcatttgtttgagtgtgagtttggaggcctttttaacatgcagacatacccatatttaaatgaaatggggagatatttacattccgtactttgtaaacttgagctattggacttcactgatgtatatattaatacctcagattcctctgattttgtaagctgtcttctctgtgaacgtgtttgtgtgtgtagggcattttctgattgcacttccttaagttatgaatgtactagaaagggactcatccagaatactatgcctccctttgttaatgcttaatcatttaaagtaaacacaattgaagcctctctgaagttaaacccaactatgtttattaaaatgtgtgaaactgaaagtgggctaggttctaccaaggctgtggaactctcctacgagttctgctgatcaggaaatttaagaatttatcttaaaaatgcaaggaaaaaagactgccttggcaattgtgaatggtgctttcaatctcctagcaccgagcctggcacttaggcagctttcagtaagtgggtgaatgaatgactgaatgaatgaatgaatggctcagctgaggaatgtaactttggtcaagttattatgatgtgtttgggcttagttttctcattggtaaaatgtgggtgctggattggatcttaaagatcccttccagctctgaaatgctgattgtacagtatattcttcccagattgactcactgtgcaatctttacaatactttttatcttttcacttttgacataggtaatgttgttgagcagttgagcaatgttcagtccagttgtgaagctggagaagagaaatgggttttaaaaattaagtgaggggaggccgggtgcggtggctcacgcatgtaatcccagcactttgggaggccaaggcaggtggatcacgaggtcaggagatccagaccatcctggctaacatggtgaaacctcgtctctactaaaaatacaaaaaattagccagctgtggtggcgggcgcctgtagtcccagctactcaggaggctgaggcaggagaatggcgtgaacctgtgaggcagagcttacagtgagccgagatcgtgccactgcactccagcctgggcgacagagcaagactctgtctcaaaaaaaaaaaataataataaaataagtgagctgaactcacctgaagtggtttacttctgtgggttaagaagttctagtcagtgttcatagtcgtttcgttttgataattgttgaaccaattttgtttttaaaacctttagactctgaaagtaatattttgactaagaatgtaaatatttccaaactaaattactcgggaagtaaacgctttttttaaaagtatttttactggttttataccaatattatatgcagaaatcacaggatgaatttagaattaaatctcaattagttcactttggcctagatttatgaaaaatgcatgcctcgtaaagagtccactgtattcacgagtaaagttgcttttagtgttcacttgatgacttggagagtaggaattttgcaaaatctgaatttaaggaaattctttaggataaccatttcaaaaaataaaattgctatgcaatcttgaatattttctcttttgcctcgtaaaatgaaaatgcattcacagtttctgtaaattatttagcagccttaaagtttatcaaaaaattgtccagattccacgtgcagcatgcttggccctgcatttaatttaagaaggattaataataatgctctgaatttttcgaaagggattctcctaaacccacccacttctcttgcccaggctgctttttaaaaatatttttttattttttacttatttttaaattttctctttttatttatttttggttttcttgttagccacctgttatatgggagaacgaaaattgttatattttgaaagtacttattacattatttttattttagtatcttgatgctcctgtcaaaagggaaatgaggcttttaaaaataaagtaccttaattctttattgactttttgccctaaattgctaggtgtgacccagcaatcttttaggaagagattttacagtggtgctttatttatatcaataatccagtatagttaggctgttcattcctcataatagagtacataacagaaaagtgggactttcacattttcatatttaggcacgttccaatttaattccaaaaatactctgtaattctacatctaaaaaaaccgattccctaattcgaatttattggtaccaaagctctctttggctatagacaattaagagttgaccttttaagttaatgtatatgcttaaaaacagttttaggaaaatatttggtagacaaagagtttcaactttaaatgttcactatgtcatttagtgtccaactttacggataggttgactatctaaataggcatttttagtcattaaaaaaaatctagtcaccaggaggatccctatgactcaaaataacttgtttgtaaaagaaaatttgtttacttacccattagtaagttcctgcatattcattataagatggcaaatcaaacttttctaggatgaagacagcttatttttaagttgtatagtcttagttggtttagggtctcaattttaattaataaaatacttggtttttatttgcttgtccttttgaattcctgttttaataattttaaaatgagcacaaagaacgttgaagttcagattaatctcttctgaatgatgtttttttcctctgtgatgagttgtttctgacttttttccttttgtatttgtaatgttgattaagatgtaaaataaaaagtgtgcctgattatttttgcaaataga

SEQ ID NO: 140671 - protein, 384 aa, Artificial Sequence
  derived and/or modified sequence
MNATGTPVAPESCQQLAAGGHSRLIVLHYNHSGRLAGRGGPEDGGLGALRGLSVAASCLVVLENLLVLAAITSHMRSRRWVYYCLVNITLSDLLTGAAYLANVLLSGARTFRLAPAQWFLREGLLFTALAASTFSLLFTAGERFATMVRPVAESGATKTSRVYGFIGLCWLLAALLGMLPLLGWNCLCAFDRCSSLLPLYSKRYILFCLVIFAGVLATIMGLYGAIFRLVQASGQKAPRPAARRKARRLLKTVLMILLAFLVCWGPLFGLLLADVFGSNLWAQEYLRGMDWILALAVLNSAVNPIIYSFRSREVCRAVLSFLCCGCLRLGMRGPGDCLARAVEAHSGASTTDSSLRPRDSFRGSRSLSFRMREPLSSISSVRSI

SEQ ID NO: 140672 - DNA, 1155 bp, Artificial Sequence
  derived and/or modified sequence
atgaacgccaccggcacccccgtggcccccgagagctgccagcagctggccgccggcggccacagcagactgatcgtgctgcactacaaccacagcggcagactggccggcagaggcggccccgaggacggcggcctgggcgccctgagaggcctgagcgtggccgccagctgcctggtggtgctggagaacctgctggtgctggccgccatcaccagccacatgagaagcagaagatgggtgtactactgcctggtgaacatcaccctgagcgacctgctgaccggcgccgcctacctggccaacgtgctgctgagcggcgccagaaccttcagactggcccccgcccagtggttcctgagagagggcctgctgttcaccgccctggccgccagcaccttcagcctgctgttcaccgccggcgagagattcgccaccatggtgagacccgtggccgagagcggcgccaccaagaccagcagagtgtacggcttcatcggcctgtgctggctgctggccgccctgctgggcatgctgcccctgctgggctggaactgcctgtgcgccttcgacagatgcagcagcctgctgcccctgtacagcaagagatacatcctgttctgcctggtgatcttcgccggcgtgctggccaccatcatgggcctgtacggcgccatcttcagactggtgcaggccagcggccagaaggcccccagacccgccgccagaagaaaggccagaagactgctgaagaccgtgctgatgatcctgctggccttcctggtgtgctggggccccctgttcggcctgctgctggccgacgtgttcggcagcaacctgtgggcccaggagtacctgagaggcatggactggatcctggccctggccgtgctgaacagcgccgtgaaccccatcatctacagcttcagaagcagagaggtgtgcagagccgtgctgagcttcctgtgctgcggctgcctgagactgggcatgagaggccccggcgactgcctggccagagccgtggaggcccacagcggcgccagcaccaccgacagcagcctgagacccagagacagcttcagaggcagcagaagcctgagcttcagaatgagagagcccctgagcagcatcagcagcgtgagaagcatctag

SEQ ID NO: 140673 - DNA, 1155 bp, Artificial Sequence
  derived and/or modified sequence
atgaatgctacaggcaccccagtagcaccagaaagttgtcagcaactagccgccggcggtcattcaagattaattgtgctgcactataatcactccggccgactggccggccgcggaggtcctgaagatggcgggctgggcgcactgagggggctgagcgtggccgcctcatgcttagtggttctcgagaatctgctagttctggccgccatcacttctcacatgcggtcccgtagatgggtttattattgcctggtgaatattaccttgtcggatctgttgaccggggctgcatatcttgctaacgtcctcttaagcggcgcccgcactttccgcctcgcgcccgctcagtggttcctccgcgagggcctcctctttacagctctggccgccagcacattctcattgctattcacagctggggaaagatttgccaccatggtgaggccggttgccgaaagcggcgctaccaaaaccagtcgcgtctacggttttataggtctatgttggctgttggccgccctgcttggtatgttgccgctgctgggatggaactgcctgtgtgcctttgatcggtgtagctccctgctcccactgtacagcaaaagatacattttgttctgcctcgtgatatttgctggtgttttggccactattatgggactctatggcgcgattttccgccttgtgcaggctagtggtcaaaaggccccccggcctgcagcccgtcggaaagcgcgtcgccttctgaaaactgtgttgatgatcctccttgcgtttctcgtctgttggggacctctcttcgggctgcttctggcagacgtttttggctctaacctgtgggctcaggagtatctgcgcgggatggattggatcctagcgctggcggtactcaacagtgcagttaacccaattatctattctttccggagccgggaggtttgtagggcagtcttgtcttttttatgttgcgggtgtctgcgtctggggatgagaggccctggcgactgcctggcccgcgctgtcgaagcacactccggtgccagcaccaccgactcctcactgaggccacgcgactccttccggggttcccgatcattgagcttccgaatgcgagagccgctgagttctattagtagcgttagatcaatctag

SEQ ID NO: 140674 - DNA, 1155 bp, Artificial Sequence
  derived and/or modified sequence
atgaatgccaccggcacccctgtggcccctgagagctgccagcagctggccgccggcggccacagccggctgattgtgctgcactacaaccacagcggccgcctggccggccggggcggcccagaagatggcggcctgggcgccctgcggggcctgtctgtggccgccagctgcctggtggtgctggagaacctgctggtgctggccgccatcaccagccacatgaggagccgccgctgggtgtactactgcctggtgaacatcaccctgagtgacctgctgactggagctgcctacctggccaacgtgctgctgagcggggcccggaccttccggctggccccagcccagtggttcctgcgggagggcctgctcttcaccgccctggccgccagcaccttcagcctgctcttcaccgctggggagagatttgccaccatggtgcggcctgtggccgagagcggggccaccaagaccagccgggtgtatggcttcatcggcctgtgctggctgctggccgccctgctgggcatgctgcccctgctgggctggaactgcctgtgtgcctttgaccgctgcagcagcctgctgcccctgtacagcaagcgctacatcctcttctgcctggtgatctttgctggggtgctggccaccatcatgggcctgtatggagccatcttccggctggtgcaggccagcggccagaaggcccccaggcctgctgcccggaggaaggcccggcggctgctgaagacagtgctgatgatcctgctggccttcctggtgtgctggggccccctgtttggcctgctgctggctgatgtgtttggcagcaacctgtgggcccaggagtacctgcggggcatggactggatcctggccctggccgtgctgaacagcgctgtgaaccccatcatctacagcttccgcagccgggaggtgtgcagagctgtgctgtccttcctgtgctgcggctgcctgcggctgggcatgaggggccctggggactgcctggcccgggctgtggaggcccacagcggggccagcaccacagacagcagcctgcggccccgggacagcttccggggcagccgcagcctgtccttcaggatgagggagcccctgagcagcatcagctctgtgcgcagcatctag

SEQ ID NO: 140675 - DNA, 1155 bp, Artificial Sequence
  derived and/or modified sequence
atgaacgccaccggcacccccgtggcccccgagagctgccagcagctagccgcgggtggccattcacgcctcatcgtactacattataaccattctggtcggctggctggaaggggaggacctgaagacgggggcctgggcgcactccggggcctcagtgtggctgctagctgcctcgtcgtgctggagaatctgcttgtgctggccgctataacctcccacatgcggtccaggcggtgggtttactactgtctggtgaacataacattgtccgatttgctgaccggcgctgcctatttggcaaacgtcctgcttagcggcgcccgcactttcaggctggcacctgcccagtggttcctcagggaggggttgctgtttactgcccttgccgccagcaccttctcactactgttcactgcaggagagaggtttgcaacaatggtgcgcccagtggccgaaagcggagccacgaaaactagccgagtttatggttttattggtctgtgttggctgttggcggccctgttagggatgctcccactgctcggatggaattgcctgtgcgcgtttgatagatgcagttcactcctgcctctgtactcaaaacggtacatccttttttgcctggtgatttttgctggggtcttagcaaccattatgggactgtacggcgccatattcaggctggtgcaggcctctggtcaaaaagcccctaggccagctgcgagacggaaggcccgcagattactcaaaactgtgctcatgatcctcctcgccttcctggtgtgctggggtccactcttcggactcctactggctgatgtgtttggaagcaatctctgggctcaggaatacctgagaggtatggattggatcctggctctggcagttctcaattccgccgtgaaccctattatatacagctttagatcgcgggaagtgtgccgggccgtgctgtcattcctatgctgtgggtgtctgcgcctgggtatgaggggacccggggattgcctggccagggcagttgaagctcactcaggtgcaagcacaactgatagctccctgcgccctcgggactcgtttcgcggctcccggtctctgtcctttaggatgcgggagcccttatcttctatttccagcgttcgcagcatctag

SEQ ID NO: 140676 - DNA, 1155 bp, Artificial Sequence
  derived and/or modified sequence
atgaacgccacgggtactccggtggcacccgaatcatgccagcagctggctgctggtggacactcccggctgatagtactccactataaccattctgggagactagcgggacgagggggtcccgaagatggcggactgggtgcgctgcggggattgagtgtggctgccagctgtctagtggtcctggaaaatctgttggtgctggcagctataacctcccacatgcgctcaagaagatgggtttactactgtctggtcaatatcaccctgagtgacctgctgaccggtgctgcctatctagcaaatgtgctgctcagcggcgcacggaccttccggttagcccctgctcaatggtttcttcgggaggggctgctgttcacagctcttgcagcctcaaccttctctctgctgttcaccgcaggcgagcgattcgccacgatggttcggccagttgcagagagtggcgctactaagacctctagagtctatgggttcatcgggctgtgttggcttctagcagcccttctgggtatgctccccctgttgggatggaactgtttgtgtgcattcgacagatgtagcagcctgttaccgctctatagcaagcggtacatcctgttctgtcttgtgatctttgccggtgtgctagcgacaataatggggctctatggggctattttccggttggtgcaggctagcggccagaaagccccacggcctgctgctcggcgaaaggcgaggcgactgctgaagacagtccttatgattttactggcgttcctcgtctgttgggggcctttgtttggtctgcttctggcggacgtgtttggatcaaacctgtgggcccaggaatatcttcgtgggatggactggatactggccctggctgtgcttaattccgcagttaatcctattatttacagcttccggtcacgggaagtatgtcgagcagttctttcattcctgtgttgtggctgcctgcggttagggatgagggggccaggagactgcctagcccgagcagtggaggctcactctggcgcatctaccacagattcctccctacgcccaagagactcgttccgcggtagccggtccttatccttccgaatgagggagccactgtcatcaatcagtagcgtgcggtccatctag

SEQ ID NO: 140677 - DNA, 1594 bp, Artificial Sequence
  derived and/or modified sequence
gcaaggcgggtggctccaccctgcgtcgggcctcagtcagcccccgggggaggccatgaacgccacggggaccccggtggcccccgagtcctgccaacagctggcggccggcgggcacagccggctcattgttctgcactacaaccactcgggccggctggccgggcgcggggggccggaggatggcggcctgggggccctgcgggggctgtcggtggccgccagctgcctggtggtgctggagaacttgctggtgctggcggccatcaccagccacatgcggtcgcgacgctgggtctactattgcctggtgaacatcacgctgagtgacctgctcacgggcgcggcctacctggccaacgtgctgctgtcgggggcccgcaccttccgtctggcgcccgcccagtggttcctacgggagggcctgctcttcaccgccctggccgcctccaccttcagcctgctcttcactgcaggggagcgctttgccaccatggtgcggccggtggccgagagcggggccaccaagaccagccgcgtctacggcttcatcggcctctgctggctgctggccgcgctgctggggatgctgcctttgctgggctggaactgcctgtgcgcctttgaccgctgctccagccttctgcccctctactccaagcgctacatcctcttctgcctggtgatcttcgccggcgtcctggccaccatcatgggcctctatggggccatcttccgcctggtgcaggccagcgggcagaaggccccacgcccagcggcccgccgcaaggcccgccgcctgctgaagacggtgctgatgatcctgctggccttcctggtgtgctggggcccactcttcgggctgctgctggccgacgtctttggctccaacctctgggcccaggagtacctgcggggcatggactggatcctggccctggccgtcctcaactcggcggtcaaccccatcatctactccttccgcagcagggaggtgtgcagagccgtgctcagcttcctctgctgcgggtgtctccggctgggcatgcgagggcccggggactgcctggcccgggccgtcgaggctcactccggagcttccaccaccgacagctctctgaggccaagggacagctttcgcggctcccgctcgctcagctttcggatgcgggagcccctgtccagcatctccagcgtgcggagcatctgaagttgcagtcttgcgtgtggatggtgcagccaccgggtgcgtgccaggcaggccctcctggggtacaggaagctgtgtgcacgcagcctcgcctgtatggggagcagggaacgggacaggcccccatggtcttcccggtggcctctcggggcttctgacgccaaatgggcttcccatggtcaccctggacaaggaggcaaccaccccacctccccgtaggagcagagagcaccctggtgtgggggcgagtgggttccccacaaccccgcttctgtgtgattctggggaagtcccggcccctctctgggcctcagtagggctcccaggctgcaaggggtggactgtgggatgcatgccctggcaacattgaagttcgatcatggt

SEQ ID NO: 140678 - protein, 206 aa, Artificial Sequence [sequence omitted]

SEQ ID NO: 140679 - DNA, 621 bp, Artificial Sequence
  derived and/or modified sequence
atgaccgccagcgtgctgagaagcatcagcctggccctgagacccaccagcggcctgctgggcacctggcagacccagctgagagagacccaccagagagccagcctgctgagcttctgggagctgatccccatgagaagcgagcccctgagaaagaagaagaaggtggaccccaagaaggaccaggaggccaaggagagactgaagagaaagatcagaaagctggagaaggccacccaggagctgatccccatcgaggacttcatcacccccctgaagttcctggacaaggccagagagagaccccaggtggagctgaccttcgaggagaccgagagaagagccctgctgctgaagaagtggagcctgtacaagcagcaggagagaaagatggagagagacaccatcagagccatgctggaggcccagcaggaggccctggaggagctgcagctggagagccccaagctgcacgccgaggccatcaagagagaccccaacctgttccccttcgagaaggagggcccccactacaccccccccatccccaactaccagccccccgagggcagatacaacgacatcaccaaggtgtacacccaggtggagttcaagagatag

SEQ ID NO: 140680 - DNA, 1387 bp, Artificial Sequence
  derived and/or modified sequence
agttgcaacccgggccgcccgcagaggcaggcggggcccaggtggcgtggaccgcccgtcaccagctctgcctcgccagtctgagtccgacttattaactagcttccgtcattcatcaacacgcgctattgggcatcttgcgagcgccgggctccgcgccggcgccggaatgcgatccgggcttcggactcgaacgaatgcgggggacgagccaaccctggtgggggaggctggggcggacgcgtttattagaagatcggggccgtttgcctagacatgaacatttggactcggaggagcagagggacgccccctcggccgctccggctgcactgcggagccgaggcccgcgcgagggcgcagaccgaccaaccggctagggcctgactggctagactgtgcccgctgcagaggcgcgctcccagcacagggcggggacggaagggaggaccccgagccgcgtgaaacgcaaggccctcgtgtgtgcgcagctgacaccctaggcggggctgcgtcgggggcggggacaggcgcgtcccagcccacgcagccggaacgcctgagcgctgggcgcctggtctgccggacctcagcagggggcaccgcgggccggactgtggaggggcgcacgcccggaagcggcgagggtagccatgacggcctccgtgctgcgaagtatctcgctagccctgcgcccgactagcgggcttctgggaacttggcagacgcagcttagagagactcaccagcgagcgtcattgttgtctttctgggaactcattcccatgagatcagaacctcttcgaaaaaagaagaaggtagatcctaaaaaagaccaagaagcaaaggagcgcttgaaaaggaagatccgaaaactggaaaaggctactcaagagctaattcctattgaagattttattacccctctaaagttcttggataaagcaagagagcggcctcaggtggagctcacctttgaggagactgagaggagagctctgcttctgaagaagtggtccttgtacaagcagcaagagcgtaagatggagagggacaccatcagggctatgctagaagcccagcaggaagctctggaggaactgcaactggaatccccgaagctccatgctgaggccatcaagcgggatcctaacctgttcccctttgagaaggaagggccacattacacaccaccgatccctaactaccaaccccctgaaggcaggtacaatgacatcaccaaggtgtacacacaagtggagtttaagagatagacttgcaggctgctatccttaacatgctgcccctgagagtaggaatgaccagggttcaagtctgctttccacagaatcaggcatgctgttaataaatactggtttaatcaaaa

SEQ ID NO: 140681 - DNA, 621 bp, Artificial Sequence
  derived and/or modified sequence
atgactgctagcgtactgcgatccatatctctggcactgcggccgacaagcggcctgcttgggacctggcaaacccagctccgggaaacacaccagcgggcctcactgttgtcgttttgggagctaattccaatgcgctcagaacccttgcgaaaaaagaaaaaagtcgatcctaagaaagaccaggaggcgaaagagagactgaaacgaaaaatccggaagctggagaaggcaacccaagaattaatacccatcgaagactttatcaccccattgaagtttctggataaagctagggagaggccccaggtggagttgacgtttgaggagaccgagagacgcgcgttgctactgaagaaatggtcactctacaagcagcaggagaggaagatggaaagggacaccatccgcgcaatgctcgaggcacagcaggaagctctggaggagctacagcttgagtcccctaaactacatgctgaggcaattaagagagatcccaatctttttccatttgaaaaggagggaccccactatacgccccccatcccaaactaccagcctcccgagggtagatacaatgatatcacaaaggtgtacacccaggtcgagttcaagaggtag

SEQ ID NO: 140682 - DNA, 621 bp, Artificial Sequence
  derived and/or modified sequence
atgacagcctctgtgctgcggagcatcagcctggccctgcggcccaccagcggcctgctgggcacctggcagacccagctgcgggagacccaccagagggccagcctgctgtccttctgggagctgatccccatgaggtctgagcccctgaggaagaagaagaaggtggaccccaagaaggaccaggaggccaaggagcggctgaagaggaagatcaggaagctggagaaggccacccaggagctgatccccatcgaggacttcatcacccccctgaagttcctggacaaggcccgggagcggccccaggtggagctgacctttgaggagacagaaagaagagccctgctgctgaagaagtggagcctgtacaagcagcaggagaggaagatggagcgggacaccatccgggccatgctggaggcccagcaggaggccctggaggagctgcagctggagagccccaagctgcatgctgaggccatcaagagggaccccaacctcttcccctttgagaaggagggcccccactacaccccacccatccccaactaccagcccccagagggccgctacaatgacatcaccaaggtgtacacccaggtggagttcaagaggtag

SEQ ID NO: 140683 - DNA, 621 bp, Artificial Sequence
  derived and/or modified sequence
atgaccgccagcgtgctgcggagcatcagcctggccctgcggcccacatcagggctcctggggacatggcagacccagctccgcgagacccaccagagagccagcctgctatccttctgggaacttatcccaatgcggagcgaacctttacggaaaaagaagaaggtagaccccaagaaagatcaagaggcgaaagagaggctaaaaaggaagatacggaagctggaaaaggccactcaagaactgattccaattgaagactttatcacccctctcaaatttctggataaggctcgggagaggccacaggtggagctgacttttgaggaaaccgagagacgagccttgctgctaaaaaagtggtcattatacaaacagcaggagcgcaagatggaacgggataccatcagggcaatgctcgaggctcagcaggaagcattggaggagctccagctagaatcacctaaactgcacgcagaggccatcaaacgcgatcccaacttgttccctttcgagaaggaaggtccacactacacccctccaattcctaactatcagcccccagaaggaagatataacgacataactaaagtatacacccaagtggaatttaagaggtag

SEQ ID NO: 140684 - DNA, 621 bp, Artificial Sequence
  derived and/or modified sequence
atgaccgccagcgtgctccgaagcatctccctggctctgaggcccacctcaggtcttttaggcacctggcagactcagttacgcgagacccatcagcgcgcttccttgctgtcattctgggagttgattcctatgcggtctgagccactaagaaaaaaaaaaaaagtggatccaaagaaggatcaagaagcgaaagaacgtctgaaacggaagattcggaagctggaaaaggccacccaggaactgattcctatcgaagacttcataactcccctcaagtttctcgataaagcgcgagaacgccctcaagtggagctcaccttcgaagagacggagcggcgagcactattgttaaaaaaatggtcactctacaaacagcaggagcgcaagatggaacgggacacaattcgagcaatgctggaagctcagcaggaagctcttgaggaactgcagctcgagtctcctaaattgcacgccgaggccattaaacgcgatcctaaccttttcccattcgagaaagaaggtccccactatacaccccctatccccaactaccagcctcccgaaggtcgctataacgatattacaaaggtctacacccaggtggaattcaagcgatag

SEQ ID NO: 140685 - protein, 146 aa, Artificial Sequence
  derived and/or modified sequence
MLRRLLERPCTLALLVGSQLAVMMYLSLGGFRSLSALFGRDQGPTFDYSHPRDVYSNLSHLPGAPGGPPAPQGLPYCPERSPLLVGPVSVSFSPVPSLAEIVERNPRVEPGGRYRPPAALPPAPLLAAPAACLWHLCHPPGWKWNI

SEQ ID NO: 140686 - protein, 393 aa, Artificial Sequence
  derived and/or modified sequence
MLRRLLERPCTLALLVGSQLAVMMYLSLGGFRSLSALFGRDQGPTFDYSHPRDVYSNLSHLPGAPGGPPAPQGLPYCPERSPLLVGPVSVSFSPVPSLAEIVERNPRVEPGGRYRPAGCEPRSRTAIIVPHRAREHHLRLLLYHLHPFLQRQQLAYGIYVIHQAGNGTFNRAKLLNVGVREALRDEEWDCLFLHDVDLLPENDHNLYVCDPRGPRHVAVAMNKFGYSLPYPQYFGGVSALTPDQYLKMNGFPNEYWGWGGEDDDIATRVRLAGMKISRPPTSVGHYKMVKHRGDKGNEENPHRFDLLVRTQNSWTQDGMNSLTYQLLARELGPLYTNITADIGTDPRGPRAPSGPRYPPGSSQAFRQEMLQRRPPARPGPLSTANHTALRGSH

SEQ ID NO: 140687 - protein, 393 aa, Artificial Sequence
  derived and/or modified sequence
MLRRLLERPCTLALLVGSQLAVMMYLSLGGFRSLSALFGRDQGPTFDYSHPRDVYSNLSHLPGAPGGPPAPQGLPYCPERSPLLVGPVSVSFSPVPSLAEIVERNPRVEPGGRYRPAGCEPRSRTAIIVPHRAREHHLRLLLYHLHPFLQRQQLAYGIYVIHQAGNGTFNRAKLLNVGVREALRDEEWDCLFLHDVDLLPENDHNLYVCDPRGPRHVAVAMNKFGYSLPYPQYFGGVSALTPDQYLKMNGFPNEYWGWGGEDDDIATRVRLAGMKISRPPTSVGHYKMVKHRGDKGNEENPHRFDLLVRTQNSWTQDGMNSLTYQLLARELGPLYTNITADIGTDPRGPRAPSGPRYPPGSSQAFRQEMLQRRPPARPGPLSTANHTPSEVHT

SEQ ID NO: 140688 - protein, 370 aa, Artificial Sequence
  derived and/or modified sequence
MLRRLLERPCTLALFGRDQGPTFDYSHPRDVYSNLSHLPGAPGGPPAPQGLPYCPERSPLLVGPVSVSFSPVPSLAEIVERNPRVEPGGRYRPAGCEPRSRTAIIVPHRAREHHLRLLLYHLHPFLQRQQLAYGIYVIHQAGNGTFNRAKLLNVGVREALRDEEWDCLFLHDVDLLPENDHNLYVCDPRGPRHVAVAMNKFGYSLPYPQYFGGVSALTPDQYLKMNGFPNEYWGWGGEDDDIATRVRLAGMKISRPPTSVGHYKMVKHRGDKGNEENPHRFDLLVRTQNSWTQDGMNSLTYQLLARELGPLYTNITADIGTDPRGPRAPSGPRYPPGSSQAFRQEMLQRRPPARPGPLSTANHTALRGSH

SEQ ID NO: 140689 - protein, 227 aa, Artificial Sequence
  derived and/or modified sequence
MLRRLLERPCTLALLVGSQLAVMMYLSLGGFRSLSALFGRDQGPTFDYSHPRDVYSNLSHLPGAPGGPPAPQGLPYCPERSPLLVGPVSVSFSPVPSLAEIVERNPRVEPGGRYRPAGCEPRSRTAIIVPHRAREHHLRLLLYHLHPFLQRQQLAYGIYVIHQAGNGTFNRAKLLNVGVREALRDEEWDCLFLHDVDLLPENDHNLYVCDPRGPRHVAVAMNKFGYR

SEQ ID NO: 140690 - DNA, 1182 bp, Artificial Sequence
  derived and/or modified sequence
atgctgagaagactgctggagagaccctgcaccctggccctgctggtgggcagccagctggccgtgatgatgtacctgagcctgggcggcttcagaagcctgagcgccctgttcggcagagaccagggccccaccttcgactacagccaccccagagacgtgtacagcaacctgagccacctgcccggcgcccccggcggcccccccgccccccagggcctgccctactgccccgagagaagccccctgctggtgggccccgtgagcgtgagcttcagccccgtgcccagcctggccgagatcgtggagagaaaccccagagtggagcccggcggcagatacagacccgccggctgcgagcccagaagcagaaccgccatcatcgtgccccacagagccagagagcaccacctgagactgctgctgtaccacctgcaccccttcctgcagagacagcagctggcctacggcatctacgtgatccaccaggccggcaacggcaccttcaacagagccaagctgctgaacgtgggcgtgagagaggccctgagagacgaggagtgggactgcctgttcctgcacgacgtggacctgctgcccgagaacgaccacaacctgtacgtgtgcgaccccagaggccccagacacgtggccgtggccatgaacaagttcggctacagcctgccctacccccagtacttcggcggcgtgagcgccctgacccccgaccagtacctgaagatgaacggcttccccaacgagtactggggctggggcggcgaggacgacgacatcgccaccagagtgagactggccggcatgaagatcagcagaccccccaccagcgtgggccactacaagatggtgaagcacagaggcgacaagggcaacgaggagaacccccacagattcgacctgctggtgagaacccagaacagctggacccaggacggcatgaacagcctgacctaccagctgctggccagagagctgggccccctgtacaccaacatcaccgccgacatcggcaccgaccccagaggccccagagcccccagcggccccagatacccccccggcagcagccaggccttcagacaggagatgctgcagagaagaccccccgccagacccggccccctgagcaccgccaaccacaccgccctgagaggcagccactag

SEQ ID NO: 140691 - DNA, 1182 bp, Artificial Sequence
  derived and/or modified sequence
atgctgagaagactgctggagagaccctgcaccctggccctgctggtgggcagccagctggccgtgatgatgtacctgagcctgggcggcttcagaagcctgagcgccctgttcggcagagaccagggccccaccttcgactacagccaccccagagacgtgtacagcaacctgagccacctgcccggcgcccccggcggcccccccgccccccagggcctgccctactgccccgagagaagccccctgctggtgggccccgtgagcgtgagcttcagccccgtgcccagcctggccgagatcgtggagagaaaccccagagtggagcccggcggcagatacagacccgccggctgcgagcccagaagcagaaccgccatcatcgtgccccacagagccagagagcaccacctgagactgctgctgtaccacctgcaccccttcctgcagagacagcagctggcctacggcatctacgtgatccaccaggccggcaacggcaccttcaacagagccaagctgctgaacgtgggcgtgagagaggccctgagagacgaggagtgggactgcctgttcctgcacgacgtggacctgctgcccgagaacgaccacaacctgtacgtgtgcgaccccagaggccccagacacgtggccgtggccatgaacaagttcggctacagcctgccctacccccagtacttcggcggcgtgagcgccctgacccccgaccagtacctgaagatgaacggcttccccaacgagtactggggctggggcggcgaggacgacgacatcgccaccagagtgagactggccggcatgaagatcagcagaccccccaccagcgtgggccactacaagatggtgaagcacagaggcgacaagggcaacgaggagaacccccacagattcgacctgctggtgagaacccagaacagctggacccaggacggcatgaacagcctgacctaccagctgctggccagagagctgggccccctgtacaccaacatcaccgccgacatcggcaccgaccccagaggccccagagcccccagcggccccagatacccccccggcagcagccaggccttcagacaggagatgctgcagagaagaccccccgccagacccggccccctgagcaccgccaaccacacccccagcgaggtgcacacctag

SEQ ID NO: 140692 - DNA, 1113 bp, Artificial Sequence
  derived and/or modified sequence
atgctgagaagactgctggagagaccctgcaccctggccctgttcggcagagaccagggccccaccttcgactacagccaccccagagacgtgtacagcaacctgagccacctgcccggcgcccccggcggcccccccgccccccagggcctgccctactgccccgagagaagccccctgctggtgggccccgtgagcgtgagcttcagccccgtgcccagcctggccgagatcgtggagagaaaccccagagtggagcccggcggcagatacagacccgccggctgcgagcccagaagcagaaccgccatcatcgtgccccacagagccagagagcaccacctgagactgctgctgtaccacctgcaccccttcctgcagagacagcagctggcctacggcatctacgtgatccaccaggccggcaacggcaccttcaacagagccaagctgctgaacgtgggcgtgagagaggccctgagagacgaggagtgggactgcctgttcctgcacgacgtggacctgctgcccgagaacgaccacaacctgtacgtgtgcgaccccagaggccccagacacgtggccgtggccatgaacaagttcggctacagcctgccctacccccagtacttcggcggcgtgagcgccctgacccccgaccagtacctgaagatgaacggcttccccaacgagtactggggctggggcggcgaggacgacgacatcgccaccagagtgagactggccggcatgaagatcagcagaccccccaccagcgtgggccactacaagatggtgaagcacagaggcgacaagggcaacgaggagaacccccacagattcgacctgctggtgagaacccagaacagctggacccaggacggcatgaacagcctgacctaccagctgctggccagagagctgggccccctgtacaccaacatcaccgccgacatcggcaccgaccccagaggccccagagcccccagcggccccagatacccccccggcagcagccaggccttcagacaggagatgctgcagagaagaccccccgccagacccggccccctgagcaccgccaaccacaccgccctgagaggcagccactag

SEQ ID NO: 140693 - DNA, 1182 bp, Artificial Sequence
  derived and/or modified sequence
atgctcaggaggctgttagagcgcccgtgcactctcgctctgctcgtcggctcccagctggcagtgatgatgtacctgagtctgggaggctttagatcactgtcagccctgtttgggcgggatcagggacccacatttgactattcacaccccagagatgtctattctaacctctcccacttacccggggcccccggcggacctcccgcaccacaaggtctgccatactgtcccgagcgaagccctctgctggttggtcccgtctccgtcagcttttcccccgttccatccctggccgagattgtcgagcggaacccaagagtcgagcctggtgggcggtatcggcccgcaggctgcgagccccgttcacgcacagctattatcgttcctcatcgtgcacgagaacaccaccttcgcttgctcctatatcacctccatcccttcttacaacgccagcaactggcgtatgggatctacgtaatccaccaggccgggaacggcacattcaatcgggccaagctgttaaacgtgggcgtgagggaagcgctgagagacgaagagtgggattgtctgttcctccacgatgtcgatctgctcccggagaatgatcacaacctgtacgtttgtgatcctcgtggacctcgacacgttgcagtggccatgaataaatttggttactcgctcccgtacccccaatatttcgggggcgtcagcgcactcacccccgatcaatatctgaaaatgaacggatttcctaatgagtactggggttggggcggtgaggatgatgacattgccaccagggtgcgcttggcaggcatgaagatctcaagaccacccacaagtgtcgggcactacaagatggtgaaacatagaggcgataagggaaacgaagagaatccccatagatttgatttgctcgtgaggactcagaatagttggacccaggacgggatgaattcactgacctatcagctgttagccagggagttgggcccactctacaccaacattaccgctgacatcgggacagacccgcgaggcccacgggcccccagcggtccccgatatccgccgggaagtagccaggcctttagacaggagatgcttcagcgcagacctcctgccaggcccggacctttatctaccgcaaaccacacggccctcagaggatcacactag

SEQ ID NO: 140694 - DNA, 1182 bp, Artificial Sequence
  derived and/or modified sequence
atgctccgaaggttgctcgaaaggccctgcaccctggcactgctggtgggttctcaattagcagtgatgatgtatctgagcttaggtgggttccgctcattgagcgcactttttggccgtgaccaaggtcccacctttgactatagccatccacgagacgtttactcaaacctgtcccacctccccggcgcacccggaggaccgcccgctccccaggggctaccctactgcccagagagatccccactgctggtaggccctgtttctgtcagcttttcacctgtgccaagcctcgccgagattgtagaacggaatccccgcgtcgaaccgggagggagatacagacccgccggctgtgagccgaggtcgcggactgccattatcgtgccacaccgcgctagagagcatcacttgcgattactcctataccacctacatcctttcctgcagaggcagcagctggcatacggaatttatgtgatacatcaagccggcaatggcacctttaaccgcgccaagctgttaaacgtcggcgtccgggaggctttgcgcgacgaggaatgggattgtctcttcttgcatgacgtcgacctgcttccagaaaacgaccacaacttgtatgtatgtgatccgagggggcccaggcacgtcgccgtggcgatgaacaagttcgggtatagtttgccttacccacagtacttcggcggggtttcagcactgactcctgaccagtatctgaagatgaatggctttcccaacgagtactgggggtgggggggggaggacgacgatatcgccactcgcgtgaggctggcagggatgaaaataagccggcccccaacttctgttggccactacaaaatggttaaacatcggggcgataagggaaatgaggagaatcctcatcgctttgacctgctggtgcgcacacagaacagctggacgcaggatggcatgaactctctcacctaccagcttttggctcgtgaactcggaccactttacactaatatcacggccgatataggaacagaccctaggggccccagggccccttcagggcccaggtatccccctgggtcatcccaagccttcaggcaagagatgctgcagcggcgcccacccgctcgacccggacccctgtcaacagcgaatcacaccccttccgaagtgcatacttag

SEQ ID NO: 140695 - DNA, 1182 bp, Artificial Sequence
  derived and/or modified sequence
atgctgaggcggctcttggaacggccttgcactctggcgctgctcgtcggatcccagctggcagttatgatgtacctgagtttaggtggcttccggagtttgagtgctctgtttggccgcgaccagggccctactttcgattattctcatccaagggacgtctactccaacttgagtcatttacctggggctcccggaggcccgccagctcctcagggcctgccctattgccctgaaaggagcccccttctggtcggaccagtttccgtcagtttctcacctgtgccctcacttgccgaaatcgtggagcggaatccaagagtggaaccaggcggaaggtacagaccagctggatgcgagcctcgatcaaggaccgctataatcgtaccccatcgggcccgagagcatcacctgcgactgttactttatcacttacaccctttcctgcaaaggcagcagctggcgtatggtatttacgtgatccaccaggcaggtaacggtacctttaatcgggcgaagctgctgaatgtgggtgtccgggaagcgctgagagatgaagagtgggactgtttatttctccatgacgtcgatcttttacctgagaacgaccacaatttatatgtgtgtgaccctaggggtccccgccatgtggcagtcgcaatgaataaattcgggtatagtctgccatacccacaatacttcgggggcgtctccgctcttacccccgaccagtacctgaagatgaacggatttcctaacgagtactggggctggggcggcgaggatgacgacatcgccacaagggtacggctggctgggatgaaaattagccgcccacccacgtccgtcggtcattataaaatggtcaagcatcggggagacaaaggcaacgaggaaaacccacaccgcttcgatttgctggttcgtacgcaaaacagctggacgcaggatggtatgaactcccttacctatcagctgctagctcgcgagctcggacctctctacaccaacattaccgctgacatcggaaccgaccctagaggaccccgtgctccttcaggacctcgctaccctcccgggtcatctcaggcatttcggcaggaaatgcttcaacgaaggcctccggcccgccccggaccactctccactgccaaccacactgctctacgaggatcacactag

SEQ ID NO: 140696 - DNA, 1113 bp, Artificial Sequence
  derived and/or modified sequence
atgctgcggagactgctcgaacgcccctgtacattggctctctttggtcgcgatcaaggaccgacgtttgattattcacacccaagggacgtttattccaacttgagtcacttaccaggcgcacccggcggaccacctgctccccagggactgccatactgccccgagagaagcccactgcttgttggcccggtgagcgtgagtttctctccagtgcccagcctcgcagagatcgtcgaaagaaacccaagggtggagcctggaggaagatatagaccagctgggtgtgagccaaggagccgcacggcgataattgtccctcatagagctagggaacaccatttgaggcttctgctgtatcaccttcatcctttccttcagaggcagcagttggcctacgggatatacgtgatccatcaggccggtaatggaaccttcaatcgggctaagctcctcaatgtgggagttcgcgaggctctcagggacgaggagtgggactgtctgtttttacacgatgtggacctgctgccagagaacgaccacaacctttatgtgtgcgatccccgtggcccccggcacgtagccgttgcaatgaataagtttgggtattccctgccataccctcaatactttggaggcgtaagcgcgttaacccctgaccagtatctcaagatgaacggattccccaacgagtactggggctggggcggtgaagatgatgacattgctactagagtgcgcttggccgggatgaagatcagtagaccacctaccagcgtgggccactacaagatggtgaagcaccgcggggataaagggaatgaggaaaacccgcacaggttcgatctgctcgtcaggactcagaactcgtggacccaggacgggatgaattcccttacttatcaactgctagcccgtgaacttggccctttgtacaccaatatcacagctgacattggcaccgacccccgagggccccgcgcacccagtggtcctcggtatcctcccgggtcttcccaagcttttaggcaagagatgctccaacgcaggcccccggcccggccaggacccttatcaaccgccaaccacacagcattaaggggatcacactag

SEQ ID NO: 140697 - DNA, 1182 bp, Artificial Sequence
  derived and/or modified sequence
atgctgcggcggctgctggagcggccctgcaccctggccctgctggtgggcagccagctggccgtgatgatgtacctgagcctgggcggcttccgcagcctgagcgccctgtttggccgggaccagggccccacctttgactacagccaccccagagatgtgtacagcaacctgagccacctgcccggggcccctgggggccccccagccccccagggcctgccctactgcccagagaggagccccctgctggtgggccctgtgtctgtgtccttcagccctgtgcccagcctggccgagatcgtggagaggaacccccgggtggagcccggcggccgctacagacctgctggctgtgagcccaggagcaggacagccatcatcgtgccccaccgggcccgggagcaccacctgcggctgctgctgtaccacctgcaccccttcctgcagaggcagcagctggcctacggcatctacgtgatccaccaggccggaaatggcaccttcaacagagccaagctgctgaatgtgggcgtgcgggaggccctgagagatgaggagtgggactgcctcttcctgcatgatgtggacctgctgcctgaaaatgaccacaacctgtatgtgtgtgacccccggggccccaggcatgtggccgtggccatgaacaagtttggctacagcctgccctacccccagtactttggaggagtgtctgccctgaccccagaccagtacctgaagatgaatggcttccccaatgagtactggggctggggcggagaagatgatgacatcgccaccagggtgcggctggccggcatgaagatcagcaggcctcccacctctgtgggccactacaagatggtgaagcacagaggagacaagggaaatgaggagaacccccacagatttgacctgctggtgaggacccagaacagctggacccaggacggcatgaacagcctgacctaccagctgctggcccgggagctgggccccctgtacaccaacatcacagctgacatcggcacagacccccggggcccccgggcccccagcggcccccgctacccacctggcagcagccaggccttccggcaggagatgctgcagaggcggcccccagcccggcccggccccctgagcacagccaaccacacagccctgcggggcagccactag

SEQ ID NO: 140698 - DNA, 1182 bp, Artificial Sequence
  derived and/or modified sequence
atgctgcggcggctgctggagcggccctgcaccctggccctgctggtgggcagccagctggccgtgatgatgtacctgagcctgggcggcttccgcagcctgagcgccctgtttggccgggaccagggccccacctttgactacagccaccccagagatgtgtacagcaacctgagccacctgcccggggcccctgggggccccccagccccccagggcctgccctactgcccagagaggagccccctgctggtgggccctgtgtctgtgtccttcagccctgtgcccagcctggccgagatcgtggagaggaacccccgggtggagcccggcggccgctacagacctgctggctgtgagcccaggagcaggacagccatcatcgtgccccaccgggcccgggagcaccacctgcggctgctgctgtaccacctgcaccccttcctgcagaggcagcagctggcctacggcatctacgtgatccaccaggccggaaatggcaccttcaacagagccaagctgctgaatgtgggcgtgcgggaggccctgagagatgaggagtgggactgcctcttcctgcatgatgtggacctgctgcctgaaaatgaccacaacctgtatgtgtgtgacccccggggccccaggcatgtggccgtggccatgaacaagtttggctacagcctgccctacccccagtactttggaggagtgtctgccctgaccccagaccagtacctgaagatgaatggcttccccaatgagtactggggctggggcggagaagatgatgacatcgccaccagggtgcggctggccggcatgaagatcagcaggcctcccacctctgtgggccactacaagatggtgaagcacagaggagacaagggaaatgaggagaacccccacagatttgacctgctggtgaggacccagaacagctggacccaggacggcatgaacagcctgacctaccagctgctggcccgggagctgggccccctgtacaccaacatcacagctgacatcggcacagacccccggggcccccgggcccccagcggcccccgctacccacctggcagcagccaggccttccggcaggagatgctgcagaggcggcccccagcccggcccggccccctgagcacagccaaccacaccccatctgaggtgcacacctag

SEQ ID NO: 140699 - DNA, 1113 bp, Artificial Sequence
  derived and/or modified sequence
atgctgcggcggctgctggagcggccctgcaccctggccctgtttggccgggaccagggccccacctttgactacagccaccccagagatgtgtacagcaacctgagccacctgcccggggcccctgggggccccccagccccccagggcctgccctactgcccagagaggagccccctgctggtgggccctgtgtctgtgtccttcagccctgtgcccagcctggccgagatcgtggagaggaacccccgggtggagcccggcggccgctacagacctgctggctgtgagcccaggagcaggacagccatcatcgtgccccaccgggcccgggagcaccacctgcggctgctgctgtaccacctgcaccccttcctgcagaggcagcagctggcctacggcatctacgtgatccaccaggccggaaatggcaccttcaacagagccaagctgctgaatgtgggcgtgcgggaggccctgagagatgaggagtgggactgcctcttcctgcatgatgtggacctgctgcctgaaaatgaccacaacctgtatgtgtgtgacccccggggccccaggcatgtggccgtggccatgaacaagtttggctacagcctgccctacccccagtactttggaggagtgtctgccctgaccccagaccagtacctgaagatgaatggcttccccaatgagtactggggctggggcggggaggatgatgacatcgccaccagggtgcggctggccggcatgaagatcagccggccccccacctctgtgggccactacaagatggtgaagcacagaggagacaagggaaatgaggagaacccccacagatttgacctgctggtgaggacccagaacagctggacccaggacggcatgaacagcctgacctaccagctgctggcccgggagctgggccccctgtacaccaacatcacagctgacattggaacagacccccggggcccccgggcccccagcggcccccgctacccacctggcagcagccaggccttccggcaggagatgctgcagaggcggcccccagcccggcccggccccctgagcacagccaaccacacagccctgcggggcagccactag

SEQ ID NO: 140700 - DNA, 1182 bp, Artificial Sequence
  derived and/or modified sequence
atgctgcggcggctgctggagcggccctgcaccctggccctgctggtggggtcacaactggctgtgatgatgtacttaagcctcggggggttccgcagcttgagtgccctgtttggaagagaccaggggcctactttcgattattcccatccacgtgacgtttacagcaacctgtcccacctccccggagctcctggcggcccaccagccccacaagggcttccatactgccctgaaaggtctccactcctggtcgggcccgtgagtgtgtctttctctccagtgccatcattagccgagatcgtggaaaggaatccccgggtggagcccggaggcaggtatagacctgcaggctgtgaacccaggtccaggacggccatcatcgttcctcacagagccagagaacaccatttgagactccttttgtatcatctgcaccctttcctgcagcgacagcagttagcgtatggtatctacgtgattcaccaagcggggaacggaactttcaaccgcgccaaattactcaacgtcggcgtgagggaggcactgcgtgatgaggaatgggattgcctttttctccacgatgtcgacctgctaccagagaacgaccacaacttgtatgtgtgcgaccctcggggaccacgacacgtcgcagttgccatgaataaattcggttactctctgccctatccccaatatttcggaggagtgagcgcacttaccccggatcagtatctcaagatgaatggctttcccaatgaatattggggatggggtggtgaggacgatgacatcgccaccagagtgagactggccgggatgaagatatccagacctccaacatctgttggccactataaaatggtcaagcatcggggcgacaaaggcaacgaggaaaatcctcacagattcgatctactcgtgcgaactcagaatagttggacccaggacgggatgaacagtttgacgtaccagcttctggcacgcgaactaggacccctgtatacaaacatcactgcggatataggaaccgatcccaggggtccccgcgcccctagcggaccccggtacccccctggctctagtcaggcatttcgccaggaaatgctgcagcgtcggcctccagctcgtccggggcctctgtccaccgccaaccatacggctcttaggggtagtcactag

SEQ ID NO: 140701 - DNA, 1182 bp, Artificial Sequence
  derived and/or modified sequence
atgctgcggcggctgctggagcggccctgcaccctggccctgctggtcggatcgcaactggccgttatgatgtacttgagcctcggcggtttcaggagccttagcgcactattcggaagggaccaaggacccacctttgactactctcatccaagggatgtttatagcaatctgtcccaccttcctggtgccccaggcggccccccagctccacagggccttccctactgtcctgagaggtcacctctgctcgttgggcccgttagcgtctcattctcgccagtgccctcactggccgagattgttgagagaaacccccgggtggaacccggtggacggtataggcctgctggctgcgaaccccggtctcggacggccatcatagtgccgcatagagcgagggagcaccacctacggctgctgttgtatcatctgcatccgtttcttcagcgtcagcagctggcttacggaatctatgtgattcaccaggccggaaatggtaccttcaaccgggcgaagctgctgaatgtgggcgtccgggaagcattacgagatgaagagtgggattgcctcttcctgcacgacgtcgacctgttaccagagaacgatcacaacctgtacgtttgtgatccacgcggaccccggcacgtcgccgtggccatgaacaagtttggctactccttaccatatccccagtacttcggaggggtgagcgctctgaccccggaccagtacttgaaaatgaatggtttccccaacgagtactggggttgggggggcgaagatgacgacatagctacacgcgttaggcttgctgggatgaagatttcccgcccgcctactagcgtcggtcattacaagatggttaagcacagaggggacaaaggcaacgaagaaaacccacatagattcgacctgctggtccggacccaaaattcttggactcaagacgggatgaatagcctaacgtaccagctgcttgcccgcgaactgggtccactgtacaccaacatcacagctgatataggaacggatccacgaggcccaagggctcccagcggacctaggtacccccccggaagtagccaggcattcagacaggaaatgctgcaacgcaggcccccggcccgccccggacctctgagcactgcaaatcacacgccaagcgaagtacacacctag

SEQ ID NO: 140702 - DNA, 1182 bp, Artificial Sequence
  derived and/or modified sequence
atgctgcggcggctgctggagcggccctgcaccctggccctgctggtaggatcacagctggctgtgatgatgtatctttcacttggtggctttcgctcactgagcgctctgttcggtcgggatcagggtcccacgttcgactactcccacccgcgcgacgtgtacagcaaccttagccacctgcctggggcccccggaggcccaccagcccctcaggggctgccctactgccccgagagatcacccctacttgttgggccagtgagtgtctcctttagccctgtcccaagtttggctgaaatcgttgagagaaatccccgcgtggagcccggagggaggtatcggccagctggatgtgaaccacggagccgcacagctatcatcgtaccgcacagggccagagaacaccacctccggttactactttaccacctgcatccatttctgcaacgacagcagttggcctatgggatttacgtaatccaccaggctgggaacggcaccttcaacagagctaaactgttgaatgttggggtccgagaagcgctcagggacgaagagtgggactgtctcttcttacatgacgtcgatttgctgcccgaaaacgaccataatctctacgtttgcgatccacgggggccaagacatgtggctgtcgccatgaataagtttggctactcgttaccatatccgcaatactttggaggggtatcagctttgactcccgatcagtatcttaagatgaacggcttcccaaacgaatattggggttggggtggcgaggatgatgacatcgccactagagtgaggcttgctggaatgaagatctcacggcctccaacttctgtgggacactacaagatggtaaagcatcgaggggataagggaaatgaagaaaacccccaccggtttgatctgttagttagaactcagaactcatggactcaagatggtatgaattcccttacctatcagctgctcgcacgcgagctggggcccctgtacacaaatataaccgctgacatcggcacggaccctcgggggccaagagcgcctagcgggccccgataccctccaggctcgtcccaggcctttaggcaggaaatgctacagcgcaggcctcctgccagacctggccctctgagtacagcaaaccatactgctctgcgaggtagtcattag

SEQ ID NO: 140703 - DNA, 1113 bp, Artificial Sequence
  derived and/or modified sequence
atgctgcggcggctgctggagcggccctgcaccctggccctgttcggcagagaccaggggccaacttttgattacagtcaccctcgcgatgtctattctaatctgtctcatctgcccggcgcccccggagggcctccagcaccgcaaggattaccatactgccccgagcgaagccctttactggtgggtcccgtgtcagtcagtttctcacccgtcccgtctcttgcagaaatcgtggagagaaacccaagagttgagccaggcggacggtaccgacccgcaggctgtgaacctcgctctcgcaccgccatcatcgtgccacatcgtgctagggaacatcatctacgcttgcttttgtatcatctgcaccccttcctgcagcgccagcaactagcttatggaatttatgttatccaccaggctggcaacggcacttttaatagagctaaacttctcaacgtgggcgtgcgagaggcgttaagggacgaagagtgggactgcctgtttctacatgacgttgatctccttccagagaacgatcacaatctgtatgtgtgtgacccccgtgggcctcggcatgtggcggtcgccatgaataagtttggttatagcttgccatatccccagtatttcggtggtgtgagcgccctgactccagatcaatacctcaagatgaacggcttccccaatgaatactggggttggggcggcgaagacgatgacatagcaactcgggttcgactggctggaatgaaaatcagccgtccacccacttccgtgggacattataagatggttaagcaccgtggagacaagggtaacgaagagaatccccatagatttgacttacttgttcggacacagaattcatggacccaagatggaatgaattccctcacgtaccagttattagcccgcgaactgggtcccctgtacacaaacatcactgctgacataggtactgacccacgaggtcctcgcgcacccagtgggcccaggtacccgcccggtagttctcaggcttttcgtcaagaaatgttgcaaagaagaccaccagcccgacctgggccactgtctacagccaatcacactgccctgcgaggcagccattag

SEQ ID NO: 140704 - DNA, 1182 bp, Artificial Sequence
  derived and/or modified sequence
atgttaaggcgtttactggagcgcccttgtactttggctctccttgtcggctcccagttggcagttatgatgtatctctccctaggtggctttcggtccctcagcgcactgtttggacgcgaccagggcccaaccttcgactatagccaccccagagacgtttactccaatctgtcccacctgcccggagcacccggaggccctcccgctccacagggcctcccgtactgtcccgagaggtcacccctgctggttggtcccgtttctgtgagcttctcccctgttccttccctggctgagatcgtagagcgaaaccccagggttgaacctggagggcgttatcggcctgccggatgtgaaccccgtagcaggactgcaataatcgttcctcaccgggctagagaacaccacctgcgattgctactataccatttgcatccattcctgcagcggcagcagctggcctacggaatctacgtgattcaccaagcgggtaacggcacatttaatcgagcaaagctgttaaacgtcggcgtgcgtgaggcccttagagatgaagagtgggattgcctctttcttcatgatgtcgacctcctgccagaaaacgaccataacctctatgtctgcgatcccaggggccctcggcacgtcgctgtagccatgaacaaattcggatactctctcccgtacccacagtacttcgggggtgtgtcggctttgaccccagaccagtacctgaaaatgaacggattccctaacgagtattggggctggggaggtgaagacgatgatatagccaccagggtgaggctcgctggtatgaaaattagcaggccccctacctcagtgggtcattacaagatggttaagcacaggggggataagggcaatgaggagaaccctcatagatttgacctgctcgtgcggacccagaattcctggacccaggacgggatgaacagcctgacttaccagcttttggccagggaactgggtccactttacactaacatcaccgcagatatcggcactgacccgaggggcccacgggctcctagcggccctaggtatcctcccggaagcagtcaggctttccgacaggagatgctgcagagacgcccaccagccagacccggacccttgagtactgctaatcataccgcgctccgtggatcacactag

SEQ ID NO: 140705 - DNA, 1182 bp, Artificial Sequence
  derived and/or modified sequence
atgctacggaggctgctcgaacggccatgtacactggctctgctcgtcgggtcacaactggctgttatgatgtacttgtcccttggcggattccgctctctctccgcattattcggtcgggaccaaggacctactttcgactactcccacccacgcgatgtatacagcaatctgtcccacctcccaggcgctccgggaggccctccagctcctcagggactgccttattgcccggaaaggtcgcctctgctggttggaccagttagtgtgtccttcagccctgttccttcactagcagagattgtcgagcgcaacccaagggtggaacctgggggtcgatataggccagcgggttgcgagcctcgcagtcgaactgcgatcatagtcccccaccgggctagagagcaccacttacgcctgctgctgtatcatctgcatccattcttgcaaaggcaacagttggcgtacggtatctacgtcatccaccaggccggaaacgggaccttcaatagggccaagctgttgaacgtgggtgtacgggaggctcttcgtgatgaagagtgggactgcttgtttctccacgacgtcgatttgcttcctgaaaacgatcacaatctctatgtctgcgaccccagaggacctagacacgttgcagtagcaatgaataaattcgggtattcactgccctaccctcagtattttggtggggtcagtgcactcaccccagatcagtacctgaagatgaatggctttcccaacgaatactggggctggggcggagaggatgacgacatcgccacacgagtgagactggcgggtatgaagatatccaggccgcctacctcagtgggtcattacaaaatggtcaagcacagaggtgacaaagggaacgaagagaatccccatcgattcgatctgttagtacgaacccagaattcatggacacaggacggcatgaacagcctgacttaccagctgctagcaagggagctgggtcctttatatactaacattaccgccgacattggtaccgaccccagaggcccaagggctccttccggcccaaggtaccccccagggagctcacaggcctttcgccaggagatgctgcagaggaggccaccagcacgacccggaccactgagtacagccaaccacacaccgagcgaagttcacacctag

SEQ ID NO: 140706 - DNA, 1182 bp, Artificial Sequence
  derived and/or modified sequence
atgctgagaagactcctcgagcgaccttgcacactcgccctgctggtgggttcacaattagccgtaatgatgtacctgtccttggggggattccggtctttgagtgcactttttgggagggatcaggggccaacattcgattacagccatccccgtgacgtgtattccaatctgagccaccttcctggtgctccagggggtccccctgcccctcagggactgccttattgtccagagcggtctcctttgctagtgggccctgtttccgtctcattcagtcccgtgccaagtttggcagagatcgtggagagaaacccccgtgtggagcccggaggcaggtatcgaccagcaggatgcgagcctaggagccggacggctatcatcgtgcctcaccgtgcacgagagcaccatctaagattgctcttatatcacttgcatccttttcttcagcgacaacagttggcttatggcatctacgttatccatcaggccggtaacgggaccttcaacagggctaagctgctgaacgtgggcgtgagggaagcgctgagggacgaggagtgggactgcctgttcctccacgacgttgaccttctgccagaaaatgaccacaatctttacgtttgtgatcctcgaggcccacggcatgttgccgtggccatgaacaaattcggttacagcttgccttacccacagtatttcggaggagtctccgctctcacgccagaccagtacctgaaaatgaacgggttccccaacgagtattggggttggggtggtgaggacgacgatatcgcgacacgggtgcgtttagctggcatgaagataagtcgacctccaacgtctgtcggccactacaaaatggtgaaacacaggggtgataaggggaacgaagagaacccccaccgctttgatctgctggtgagaacacagaatagttggactcaggacggtatgaactcgttaacttaccaactgctcgcgagggaattggggcctctgtacacaaacataacagccgacatcgggacggaccctcgaggtcctagggcaccctcagggcctcgctatccgcctggctcctcccaagcgtttaggcaggagatgctccagagaaggccaccggcacgcccaggaccccttagtacagctaatcacacagcgctgcgcggatctcattag

SEQ ID NO: 140707 - DNA, 1113 bp, Artificial Sequence
  derived and/or modified sequence
atgctccgaagattgctcgagcgcccatgcacactcgcattgttcggcagggaccagggacccacattcgactactcccacccgagggacgtctatagcaacctgtcacatctaccgggtgccccaggagggcctcccgcaccacaggggctcccctattgccccgaaagaagccctctactggttggaccagttagcgtgtccttttccccagtcccatcactggctgagatagtagagaggaatcctcgagtcgaacccggtggacggtacagacccgctggatgcgagccaagaagccgtaccgccattatcgtgccccacagagccagggaacatcacctcagattactactctatcatctccatcccttcctccagagacagcagttggcttacggaatttacgtgattcaccaggctggaaacggcactttcaatcgggcaaagctgttaaatgtgggggttcgggaggcactgagagacgaggagtgggactgccttttcttgcatgacgtcgacctattgccagagaatgatcataatctgtacgtgtgcgatccccgaggccctaggcatgtggccgttgccatgaacaaattcggctacagcctgccttacccccagtatttcggtggggtgtcggccctgactcccgatcagtaccttaagatgaatgggtttcccaacgagtattggggttggggcggagaggatgatgatatagcaactagagtgcgtctcgctgggatgaaaatttctcggccacccacctcggtcggtcattataaaatggttaagcatcggggtgataagggcaacgaagagaaccctcaccgcttcgatctgttggtgcggactcagaattcctggactcaggatgggatgaactctttaacataccaactgctcgctcgcgagcttggacccctgtataccaatatcacggctgatattggcactgatccgcgaggtccacgggcaccctccggccctcggtatcctccaggctccagccaagctttcagacaagaaatgcttcagcgacggccacctgccaggcccggacccctttcgacagctaatcacaccgccctgcggggttctcactag

SEQ ID NO: 140708 - DNA, 1619 bp, Artificial Sequence
  derived and/or modified sequence
atgttgcggaggctgctggagcggccttgcacgctggccctgcttgtgggctcccagctggctgtcatgatgtacctgtcactggggggcttccgaagtctcagtgccctatttggccgagatcagggaccgacatttgactattctcaccctcgtgatgtctacagtaacctcagtcacctgcctggggccccagggggtcctccagctcctcaaggtctgccctactgtccagaacgatctcctctcttagtgggtcctgtgtcggtgtcctttagcccagtgccatcactggcagagattgtggagcggaatccccgggtagaaccagggggccggtaccgccctcctgctgctctaccacctgcaccccttcttgcagcgccagcagcttgcttatggcatctatgtcatccaccaggctggaaatggaacatttaacagggcaaaactgttgaacgttggggtgcgagaggccctgcgtgatgaagagtgggactgcctgttcttgcacgatgtggacctcttgccagaaaatgaccacaatctgtatgtgtgtgacccccggggaccccgccatgttgccgttgctatgaacaagtttggatacagcctcccgtacccccagtacttcggaggagtctcagcacttactcctgaccagtacctgaagatgaatggcttccccaatgaatactggggctggggtggtgaggatgacgacattgctaccagggtgcgcctggctgggatgaagatctctcggccccccacatctgtaggacactataagatggtgaagcaccgaggagataagggcaatgaggaaaatccccacagatttgacctcctggtccgtacccagaattcctggacgcaagatgggatgaactcactgacataccagttgctggctcgagagctggggcctctttataccaacatcacagcagacattgggactgaccctcggggtcctcgggctccttctgggccacgttacccacctggttcctcccaagccttccgtcaagagatgctgcaacgccggcccccagccaggcctgggcctctatctactgccaaccacacagccctccgaggttcacactgactcctccttcctgtctaccttaatcatgaaaccgaattcatggggttgtattctccccaccctcagctcctcactgttctcagagggatgtgagggaactgaactctggtgccgtgctagggggtaggggcctctccctcactgctggactggagctgggctcctgtagacctgaggggtccctctctctagggtctcctgtagggcttatgactgtgaatccttgatgtcatgattttatgtgacgattcctaggagtccctgcccctagagtaggagcagggctggaccccaagcccctccctcttccatggagagaagagtgatctggcttctcctcggacctctgtgaatatttattctatttatggttcccgggaagttgtttggtgaaggaagcccctccctgggcattttctgcctatgctggaatagctccctcttctggtcctggctcagggggctgggattttgatatattttctaataaaggactttgtctcgc

SEQ ID NO: 140709 - DNA, 1911 bp, Artificial Sequence
  derived and/or modified sequence
atggcggcagcgatgcctgcccggctgttggggtggcggtgacgacaggcagcaaaagaccagctggtcccagattcgctgctggagtgctggatggagcctttctctgccctctgtgacatttccaattttagataatgcctcacatctctgtccccccgggaccccctggagcccccatgatccctaagaagacagcttgaacctagatctcacccccaggatgttgcggaggctgctggagcggccttgcacgctggccctgcttgtgggctcccagctggctgtcatgatgtacctgtcactggggggcttccgaagtctcagtgccctatttggccgagatcagggaccgacatttgactattctcaccctcgtgatgtctacagtaacctcagtcacctgcctggggccccagggggtcctccagctcctcaaggtctgccctactgtccagaacgatctcctctcttagtgggtcctgtgtcggtgtcctttagcccagtgccatcactggcagagattgtggagcggaatccccgggtagaaccagggggccggtaccgccctgcaggttgtgagccccgctcccgaacagccatcattgtgcctcatcgtgcccgggagcaccacctgcgcctgctgctctaccacctgcaccccttcttgcagcgccagcagcttgcttatggcatctatgtcatccaccaggctggaaatggaacatttaacagggcaaaactgttgaacgttggggtgcgagaggccctgcgtgatgaagagtgggactgcctgttcttgcacgatgtggacctcttgccagaaaatgaccacaatctgtatgtgtgtgacccccggggaccccgccatgttgccgttgctatgaacaagtttggatacagcctcccgtacccccagtacttcggaggagtctcagcacttactcctgaccagtacctgaagatgaatggcttccccaatgaatactggggctggggtggtgaggatgacgacattgctaccagggtgcgcctggctgggatgaagatctctcggccccccacatctgtaggacactataagatggtgaagcaccgaggagataagggcaatgaggaaaatccccacagatttgacctcctggtccgtacccagaattcctggacgcaagatgggatgaactcactgacataccagttgctggctcgagagctggggcctctttataccaacatcacagcagacattgggactgaccctcggggtcctcgggctccttctgggccacgttacccacctggttcctcccaagccttccgtcaagagatgctgcaacgccggcccccagccaggcctgggcctctatctactgccaaccacacagccctccgaggttcacactgactcctccttcctgtctaccttaatcatgaaaccgaattcatggggttgtattctccccaccctcagctcctcactgttctcagagggatgtgagggaactgaactctggtgccgtgctagggggtaggggcctctccctcactgctggactggagctgggctcctgtagacctgaggggtccctctctctagggtctcctgtagggcttatgactgtgaatccttgatgtcatgattttatgtgacgattcctaggagtccctgcccctagagtaggagcagggctggaccccaagcccctccctcttccatggagagaagagtgatctggcttctcctcggacctctgtgaatatttattctatttatggttcccgggaagttgtttggtgaaggaagcccctccctgggcattttctgcctatgctggaatagctccctcttctggtcctggctcagggggctgggattttgatatattttctaataaaggactttgtctcgca

SEQ ID NO: 140710 - DNA, 1402 bp, Artificial Sequence
  derived and/or modified sequence
atggcggcagcgatgcctgcccggctgttggggtggcggtgacgacaggcagcaaaagaccagctggtcccagattcgctgctggagtgctggatggagcctttctctgccctctgtgacatttccaattttagataatgcctcacatctctgtccccccgggaccccctggagcccccatgatccctaagaagacagcttgaacctagatctcacccccaggatgttgcggaggctgctggagcggccttgcacgctggccctgcttgtgggctcccagctggctgtcatgatgtacctgtcactggggggcttccgaagtctcagtgccctatttggccgagatcagggaccgacatttgactattctcaccctcgtgatgtctacagtaacctcagtcacctgcctggggccccagggggtcctccagctcctcaaggtctgccctactgtccagaacgatctcctctcttagtgggtcctgtgtcggtgtcctttagcccagtgccatcactggcagagattgtggagcggaatccccgggtagaaccagggggccggtaccgccctgcaggttgtgagccccgctcccgaacagccatcattgtgcctcatcgtgcccgggagcaccacctgcgcctgctgctctaccacctgcaccccttcttgcagcgccagcagcttgcttatggcatctatgtcatccaccaggctggaaatggaacatttaacagggcaaaactgttgaacgttggggtgcgagaggccctgcgtgatgaagagtgggactgcctgttcttgcacgatgtggacctcttgccagaaaatgaccacaatctgtatgtgtgtgacccccggggaccccgccatgttgccgttgctatgaacaagtttggatacagcctcccgtacccccagtacttcggaggagtctcagcacttactcctgaccagtacctgaagatgaatggcttccccaatgaatactggggctggggtggtgaggatgacgacattgctaccagggtgcgcctggctgggatgaagatctctcggccccccacatctgtaggacactataagatggtgaagcaccgaggagataagggcaatgaggaaaatccccacagatttgacctcctggtccgtacccagaattcctggacgcaagatgggatgaactcactgacataccagttgctggctcgagagctggggcctctttataccaacatcacagcagacattgggactgaccctcggggtcctcgggctccttctgggccacgttacccacctggttcctcccaagccttccgtcaagagatgctgcaacgccggcccccagccaggcctgggcctctatctactgccaaccacacaccctccgaggttcacact

SEQ ID NO: 140711 - DNA, 1871 bp, Artificial Sequence
  derived and/or modified sequence
cccgcttccaagatggcggcagcgatgcctgcccggctgttggggtggcggtgacgacaggcagcaaaagaccagataatgcctcacatctctgtccccccgggaccccctggagcccccatgatccctaagaagacagcttgaacctagaattcccctctccctccctagatctcacccccaggatgttgcggaggctgctggagcggccttgcacgctggccctgcttgtgggctcccagctggctgtcatgatgtacctgtcactggggggcttccgaagtctcagtgccctatttggccgagatcagggaccgacatttgactattctcaccctcgtgatgtctacagtaacctcagtcacctgcctggggccccagggggtcctccagctcctcaaggtctgccctactgtccagaacgatctcctctcttagtgggtcctgtgtcggtgtcctttagcccagtgccatcactggcagagattgtggagcggaatccccgggtagaaccagggggccggtaccgccctgcaggttgtgagccccgctcccgaacagccatcattgtgcctcatcgtgcccgggagcaccacctgcgcctgctgctctaccacctgcaccccttcttgcagcgccagcagcttgcttatggcatctatgtcatccaccaggctggaaatggaacatttaacagggcaaaactgttgaacgttggggtgcgagaggccctgcgtgatgaagagtgggactgcctgttcttgcacgatgtggacctcttgccagaaaatgaccacaatctgtatgtgtgtgacccccggggaccccgccatgttgccgttgctatgaacaagtttggatacagcctcccgtacccccagtacttcggaggagtctcagcacttactcctgaccagtacctgaagatgaatggcttccccaatgaatactggggctggggtggtgaggatgacgacattgctaccagggtgcgcctggctgggatgaagatctctcggccccccacatctgtaggacactataagatggtgaagcaccgaggagataagggcaatgaggaaaatccccacagatttgacctcctggtccgtacccagaattcctggacgcaagatgggatgaactcactgacataccagttgctggctcgagagctggggcctctttataccaacatcacagcagacattgggactgaccctcggggtcctcgggctccttctgggccacgttacccacctggttcctcccaagccttccgtcaagagatgctgcaacgccggcccccagccaggcctgggcctctatctactgccaaccacacagccctccgaggttcacactgactcctccttcctgtctaccttaatcatgaaaccgaattcatggggttgtattctccccaccctcagctcctcactgttctcagagggatgtgagggaactgaactctggtgccgtgctagggggtaggggcctctccctcactgctggactggagctgggctcctgtagacctgaggggtccctctctctagggtctcctgtagggcttatgactgtgaatccttgatgtcatgattttatgtgacgattcctaggagtccctgcccctagagtaggagcagggctggaccccaagcccctccctcttccatggagagaagagtgatctggcttctcctcggacctctgtgaatatttattctatttatggttcccgggaagttgtttggtgaaggaagcccctccctgggcattttctgcctatgctggaatagctccctcttctggtcctggctcagggggctgggattttgatatattttctaataaaggactttgtctcg

SEQ ID NO: 140712 - DNA, 1875 bp, Artificial Sequence
  derived and/or modified sequence
gcgagaccccgcccccgcagcgcccgcttccaagatggcggcagcgatgcctgcccggctgttggggtggcggtgacgacaggcagcaaaagaccagctggtcccagattcgctgctggagtgctggatggagcctttctctgccctctgtgacatttccaattttagataatgcctcacatctctgtccccccgggaccccctggagcccccatgatccctaagaagacagcttgaacctagatctcacccccaggatgttgcggaggctgctggagcggccttgcacgcttgccctatttggccgagatcagggaccgacatttgactattctcaccctcgtgatgtctacagtaacctcagtcacctgcctggggccccagggggtcctccagctcctcaaggtctgccctactgtccagaacgatctcctctcttagtgggtcctgtgtcggtgtcctttagcccagtgccatcactggcagagattgtggagcggaatccccgggtagaaccagggggccggtaccgccctgcaggttgtgagccccgctcccgaacagccatcattgtgcctcatcgtgcccgggagcaccacctgcgcctgctgctctaccacctgcaccccttcttgcagcgccagcagcttgcttatggcatctatgtcatccaccaggctggaaatggaacatttaacagggcaaaactgttgaacgttggggtgcgagaggccctgcgtgatgaagagtgggactgcctgttcttgcacgatgtggacctcttgccagaaaatgaccacaatctgtatgtgtgtgacccccggggaccccgccatgttgccgttgctatgaacaagtttggatacagcctcccgtacccccagtacttcggaggagtctcagcacttactcctgaccagtacctgaagatgaatggcttccccaatgaatactggggctggggtggtgaggatgacgacattgctaccagggtgcgcctggctgggatgaagatctctcggccccccacatctgtaggacactataagatggtgaagcaccgaggagataagggcaatgaggaaaatccccacagatttgacctcctggtccgtacccagaattcctggacgcaagatgggatgaactcactgacataccagttgctggctcgagagctggggcctctttataccaacatcacagcagacattgggactgaccctcggggtcctcgggctccttctgggccacgttacccacctggttcctcccaagccttccgtcaagagatgctgcaacgccggcccccagccaggcctgggcctctatctactgccaaccacacagccctccgaggttcacactgactcctccttcctgtctaccttaatcatgaaaccgaattcatggggttgtattctccccaccctcagctcctcactgttctcagagggatgtgagggaactgaactctggtgccgtgctagggggtaggggcctctccctcactgctggactggagctgggctcctgtagacctgaggggtccctctctctagggtctcctgtagggcttatgactgtgaatccttgatgtcatgattttatgtgacgattcctaggagtccctgcccctagagtaggagcagggctggaccccaagcccctccctcttccatggagagaagagtgatctggcttctcctcggacctctgtgaatatttattctatttatggttcccgggaagttgtttggtgaaggaagcccctccctgggcattttctgcctatgctggaatagctccctcttctggtcctggctcagggggctgggattttgatatattttctaataaaggactttgtctcgc

SEQ ID NO: 140713 - DNA, 3081 bp, Artificial Sequence
  derived and/or modified sequence
atgtgcgctgggaatgcgtcgacacggaggcctgggataaaggtttgggcattcgagagagtgagaagttttgggtaacgcctggagacgagcctgagcagggacggggtcctaggtggaagtatggacgggggccgggcgggctcacgttgctagtaggtagggcaaaagcaagagactgtctctgcccctgctctccctctccctttctcttcagcagtaaccctcctccccacccccgctagaagaggggaaaggtagaaaaggtagaggacgccacccccaccctactctccgccgagctccggggctgttcgcttacagcccccaggtggtcacggtccctgcacctgaggagttggcacccaggcacatgaagaatagaaggagcctgtttcctacttcgccctgggtactccttaggccactccacggtcctgtcatgactctgtcgccacttcaactggttcttggtctgggggaaaacaatgtttccattagctgtcctgtccccactccccaatctgtcctgttggggtgggggtacgggggtggttaagtatgaacctgacacttatcattccagggtagcacgggagataggcgagggacctaccatctcctgctcctcctcttcctttccaaccactttccttcacttcgcctgctgggaaaccagcttcaccctgatcctgatctctggcggtgcaggtagctagttatcctttaccacttctgttccagctggtcccagattcgctgctggagtgctggatggagcctttctctgccctctgtgacatttccaattttagataatgcctcacatctctgtccccccgggaccccctggagcccccatgatccctaagaagacagcttgaacctaggtgagtctatctcttcccttctaaaattggaagagggggttctctagagactttctgaaatgaacatgagatttgaatgatgtaaacatttttgggggtgaggactgacagtagatggtgggagtggtttggggggaggtagaggagagcgaaacttgggctgaagtgacaggtggtagggttactggtggttacattctgtttccttgcgtgactgtgcacctgtgtgctcccttctgtgactttgttttctgctttttcctctttacccctggcatcaccttcaaccctacctactgacctctctgctggcttgctctcttcctgcctacccccagaattcccctctccctccctagatctcacccccaggatgttgcggaggctgctggagcggccttgcacgctggccctgcttgtgggctcccagctggctgtcatgatgtacctgtcactggggggcttccgaagtctcagtgccctatttggccgagatcagggaccgacatttgactattctcaccctcgtgatgtctacagtaacctcagtcacctgcctggggccccagggggtcctccagctcctcaaggtctgccctactgtccagaacgatctcctctcttagtgggtcctgtgtcggtgtcctttagcccagtgccatcactggcagagattgtggagcggaatccccgggtagaaccagggggccggtaccgccctgcaggttgtgagccccgctcccgaacagccatcattgtgcctcatcgtgcccgggagcaccacctgcgcctgctgctctaccacctgcaccccttcttgcagcgccagcagcttgcttatggcatctatgtcatccaccaggctggaaatggaacatttaacagggcaaaactgttgaacgttggggtgcgagaggccctgcgtgatgaagagtgggactgcctgttcttgcacgatgtggacctcttgccagaaaatgaccacaatctgtatgtgtgtgacccccggggaccccgccatgttgccgttgctatgaacaagtttggatacaggtagagggcatggaagggtactgggaaacagggaagcctactatcctgtggaaggaggagagccaagcggattgtggttggggatgtgtccccagaagactcggggtatgcaaggatctttctctccctagcctcccgtacccccagtacttcggaggagtctcagcacttactcctgaccagtacctgaagatgaatggcttccccaatgaatactggggctggggtggtgaggatgacgacattgctaccagggtgcgcctggctgggatgaagatctctcggccccccacatctgtaggacactataagatggtgaagcaccgaggagataagggcaatgaggaaaatccccacagatttgacctcctggtccgtacccagaattcctggacgcaagatgggatgaactcactgacataccagttgctggctcgagagctggggcctctttataccaacatcacagcagacattgggactgaccctcggggtcctcgggctccttctgggccacgttacccacctggttcctcccaagccttccgtcaagagatgctgcaacgccggcccccagccaggcctgggcctctatctactgccaaccacacagccctccgaggttcacactgactcctccttcctgtctaccttaatcatgaaaccgaattcatggggttgtattctccccaccctcagctcctcactgttctcagagggatgtgagggaactgaactctggtgccgtgctagggggtaggggcctctccctcactgctggactggagctgggctcctgtagacctgaggggtccctctctctagggtctcctgtagggcttatgactgtgaatccttgatgtcatgattttatgtgacgattcctaggagtccctgcccctagagtaggagcagggctggaccccaagcccctccctcttccatggagagaagagtgatctggcttctcctcggacctctgtgaatatttattctatttatggttcccgggaagttgtttggtgaaggaagcccctccctgggcattttctgcctatgctggaatagctccctcttctggtcctggctcagggggctgggattttgatatattttctaataaaggactttgtctcgc

SEQ ID NO: 140714 - protein, 378 aa, Artificial Sequence
  derived and/or modified sequence
MQLRLFRRLLLAALLLVIVWTLFGPSGLGEELLSLSLASLLPAPASPGPPLALPRLLIPNQEACSGPGAPPFLLILVCTAPENLNQRNAIRASWGGLREARGLRVQTLFLLGEPNAQHPVWGSQGSDLASESAAQGDILQAAFQDSYRNLTLKTLSGLNWAEKHCPMARYVLKTDDDVYVNVPELVSELVLRGGRWGQWERSTEPQREAEQEGGQVLHSEEVPLLYLGRVHWRVNPSRTPGGRHRVSEEQWPHTWGPFPPYASGTGYVLSASAVQLILKVASRAPLLPLEDVFVGVSARRGGLAPTQCVKLAGATHYPLDRCCYGKFLLTSHRLDPWKMQEAWKLVGGSDGERTAPFCSWFQGVLGILRCRAIAWLQS

SEQ ID NO: 140715 - DNA, 1137 bp, Artificial Sequence
  derived and/or modified sequence
atgcagctgagactgttcagaagactgctgctggccgccctgctgctggtgatcgtgtggaccctgttcggccccagcggcctgggcgaggagctgctgagcctgagcctggccagcctgctgcccgcccccgccagccccggcccccccctggccctgcccagactgctgatccccaaccaggaggcctgcagcggccccggcgccccccccttcctgctgatcctggtgtgcaccgcccccgagaacctgaaccagagaaacgccatcagagccagctggggcggcctgagagaggccagaggcctgagagtgcagaccctgttcctgctgggcgagcccaacgcccagcaccccgtgtggggcagccagggcagcgacctggccagcgagagcgccgcccagggcgacatcctgcaggccgccttccaggacagctacagaaacctgaccctgaagaccctgagcggcctgaactgggccgagaagcactgccccatggccagatacgtgctgaagaccgacgacgacgtgtacgtgaacgtgcccgagctggtgagcgagctggtgctgagaggcggcagatggggccagtgggagagaagcaccgagccccagagagaggccgagcaggagggcggccaggtgctgcacagcgaggaggtgcccctgctgtacctgggcagagtgcactggagagtgaaccccagcagaacccccggcggcagacacagagtgagcgaggagcagtggccccacacctggggccccttccccccctacgccagcggcaccggctacgtgctgagcgccagcgccgtgcagctgatcctgaaggtggccagcagagcccccctgctgcccctggaggacgtgttcgtgggcgtgagcgccagaagaggcggcctggcccccacccagtgcgtgaagctggccggcgccacccactaccccctggacagatgctgctacggcaagttcctgctgaccagccacagactggacccctggaagatgcaggaggcctggaagctggtgggcggcagcgacggcgagagaaccgcccccttctgcagctggttccagggcgtgctgggcatcctgagatgcagagccatcgcctggctgcagagctag

SEQ ID NO: 140716 - DNA, 1137 bp, Artificial Sequence
  derived and/or modified sequence
atgcagctgcgcttattccggcgactgctcctggcagccctattattggtgattgtctggactttattcggccccagcggcctcggcgaagaactgctgtctctgagcctggctagtctgctccccgcccctgcaagtccaggcccacccctggctctgcccaggttgctgatacccaaccaggaagcttgttcaggccccggtgcccccccgtttctgttgatcctggtatgtactgcacccgagaacctcaatcagaggaacgctattagggcgagctggggaggtttgagggaggctaggggtctgcgagtccaaaccctgttccttctcggcgagcccaatgcacaacatcctgtgtggggtagccagggttccgatttggccagtgagagtgcagcccagggcgacatccttcaagcggcctttcaagactcctaccgcaatttgaccttgaagaccctgtccggacttaactgggccgaaaagcactgtccaatggctcgctacgtgctgaagaccgacgatgacgtgtatgtgaatgtgcctgaattagtcagcgaactggtgctgagaggcggaagatggggccagtgggaaagaagcaccgagccccaacgagaggcagaacaggagggcggccaggtgctgcactcagaagaagtaccacttctgtacctagggagggtgcactggagagtaaatcctagccgcactcctggtggcagacaccgcgtgagcgaagagcagtggccacatacttggggaccttttcccccttacgcttcaggcactggttacgtgctgagtgcctccgcagttcagcttatactcaaagtcgccagccgcgccccacttcttccactcgaagatgtgttcgtaggggtaagtgcccggcgcgggggccttgcacccacacagtgcgtgaagcttgccggagccacccactatcctctggatcggtgctgttacgggaaattcttgctcacaagtcatcgcctggatccttggaagatgcaagaagcgtggaagcttgttggcgggtctgatggagaacgaaccgcacctttttgctcttggttccagggggtgctcggaatcctgcgttgccgcgctattgcatggttgcagtcctag

SEQ ID NO: 140717 - DNA, 1137 bp, Artificial Sequence
  derived and/or modified sequence
atgcagttaaggcttttcaggaggttattacttgcggcacttttactcgtgatcgtgtggactctattcggcccatctgggctgggagaagaacttctgtccctaagtctggctagcctgctcccggccccagcctctccaggcccccctttggctctgccccgacttctcatccctaatcaagaagcttgctccggccctggggcccctcctttcctcctaatcctcgtgtgcaccgccccggaaaacttaaaccaacggaacgcgatccgcgcaagctggggcgggctgagagaggcacgaggcctgcgggtgcagacactgtttctccttggggaacccaacgcccaacaccctgtctgggggtctcaaggtagcgacctcgcctcagagagtgctgctcagggagatattcttcaagcagccttccaagacagctacagaaacctcacattaaaaaccctgtcagggttaaactgggccgagaaacactgtcctatggcccgctatgtcctaaaaacggacgatgacgtttacgtcaatgtcccagagttggtcagtgagctcgtgctgcgcggaggtcggtggggacaatgggagcgcagcacagaaccccagagagaagcagagcaggagggaggacaggtcctgcatagcgaggaggtccctctcctctacctaggacgggtgcactggcgggtgaatccgtctaggactcctgggggccgtcatcgcgtcagcgaggaacagtggcctcacacctggggaccctttcctccctacgccagtggaaccgggtatgtgcttagtgccagcgccgtgcaattgattcttaaggtcgctagtcgcgccccactgctccctcttgaggacgtgttcgtaggggtgagcgctagacgcggaggcctggccccgacccagtgtgtgaaactcgccggagccactcactaccctctggacagatgctgctatggtaagttcctcttaacctcacatcgcttggacccttggaaaatgcaggaggcttggaagctggttggagggtccgatggggaacgtacagctcctttttgctcttggtttcagggcgtgctcggaattctgcgctgtcgggcaatcgcatggctgcagagttag

SEQ ID NO: 140718 - DNA, 1137 bp, Artificial Sequence
  derived and/or modified sequence
atgcagttgcggttattccgtcggctgctgctggctgcgcttcttttagtgatagtgtggactctgttcggcccttcggggctgggcgaggaactcctgagcttatcactcgctagcttacttccagctccagcaagccccgggcctccactggcactgcctcgcctgctcatacccaaccaggaggcatgtagtggccctggagcccctcccttcctcctgatactggtgtgtaccgccccggaaaacctcaaccagaggaatgctatcagggcttcatggggtgggctccgggaggctcgcgggctacgtgtgcaaaccttattcttacttggggagcctaatgcacagcatccagtatgggggagccagggttctgatctcgcttcggaatcagctgctcagggggacattttacaggccgcttttcaggatagttatcggaacctcacgttgaaaacactttctggcttaaactgggccgaaaaacactgtccaatggccaggtatgtgttgaaaacggacgacgatgtttacgtgaacgtgccagaacttgtctccgaattggtgctcaggggcggtagatggggccagtgggaacggtctactgagcctcagagagaggcagaacaagaaggcggacaggtcttgcattctgaggaggtgccactcctctacctgggcagagtgcattggcgtgtcaatccttcacggacccccggcggccgacaccgcgttagtgaagagcagtggccacacacctggggccccttcccaccatatgcatcaggcaccgggtacgtgttgtcagcctccgcagtccagctgatccttaaagtggcttcacgagcaccactgctaccactggaggatgtcttcgtgggggtgtccgctcgccgcggaggcctggcgccaacccagtgtgtgaaactggccggtgcaactcattatcctttagatcggtgttgctacgggaagttccttctgacctctcacagactcgacccctggaaaatgcaagaagcgtggaagctggtgggagggagcgacggagaacgcacggcccccttctgtagctggtttcaaggagttctggggattctacgctgcagggccatcgcttggctgcaatcttag

SEQ ID NO: 140719 - DNA, 1137 bp, Artificial Sequence
  derived and/or modified sequence
atgcagctgagactgtttagacggctgctactcgccgcccttctgctggtcattgtctggaccctcttcggccccagcggtcttggggaggaacttctaagcctcagtctcgcgtcattactgcccgccccagcatcacctgggccccccctggccctgcctcgtttgttaattccgaaccaagaggcctgtagcggccccggagccccgcctttcttacttatactggtgtgcaccgcccccgagaatctgaaccaaaggaacgccattcgcgcctcctggggaggccttagagaggcccgcggattgagggtccagacactcttcctcttgggggagccgaacgcccagcatcccgtatggggcagccaaggatcagatctggcctctgagagtgccgcccaaggcgatatcctgcaggccgcatttcaggacagctatcgtaatctgactctgaaaacactgtctggactcaattgggccgagaaacattgtcccatggcccgttacgtgctgaagactgacgatgatgtctatgtcaatgttcccgaactggtgtccgaactggtcctccgcgggggccgctggggccagtgggaacgtagtaccgagccacaacgggaggccgagcaagagggcgggcaagtgttgcactccgaagaggtccctcttctttacctcggaagagtccactggcgagttaacccaagtagaacacctggaggacgccatcgcgtaagcgaggaacagtggccgcacacctggggtccctttcccccctacgccagtggaaccggctatgttctctcagcatctgctgtgcagctgattctcaaggtggccagccgtgcgcccttgctccctttagaggacgttttcgtgggcgtttctgcgcggagaggtgggctggcaccaactcagtgcgttaagctggctggagctacccattacccactggaccgatgttgttatggaaagttcctcctcacaagtcacaggctcgatccatggaagatgcaagaggcctggaagctggtcgggggatccgatggcgagcggaccgcacccttctgcagctggtttcagggggtcctgggtatcctacgctgccgggcgatcgcctggctccagtcctag

SEQ ID NO: 140720 - DNA, 1137 bp, Artificial Sequence
  derived and/or modified sequence
atgcaactccgtctgttccggcgtctcctgttggccgctcttctgcttgtcatagtgtggacacttttcgggcccagtggtttaggtgaggagttgctgtccctgtctcttgctagcctcttgcccgctcctgcctcacctggaccgccactggccttgccaagactactgattcccaatcaagaggcgtgctccggccccggtgcccctccttttctcttgatcctcgtgtgtacagcacccgaaaatctaaaccagcggaatgccataagagcttcttgggggggactgagggaggctagaggcctaagagttcaaacactgtttctcctgggtgaaccaaatgcccagcacccagtgtggggctcccagggctcagacctcgcatcggagtctgccgctcagggagatattctccaggcagccttccaggactcttatcggaatctgacactgaaaaccctctcaggattgaattgggcagagaagcactgccccatggcgcgatacgtgctaaagactgatgatgatgtgtatgtgaacgttccggaactggtcagcgagctggtgttgcgggggggacgttgggggcagtgggagcggagcaccgagcctcaacgcgaagcggagcaggaaggcggtcaggtgctgcactcagaggaagtacctctgctatatcttggccgagtgcactggcgcgttaacccttccaggactcccggcggtaggcacagagtgagcgaagaacagtggccacatacctggggtccttttcccccatacgcatctgggaccggatatgtcttatctgcaagcgcggtccagttgattctgaaggtcgcttctagggcccctctgctgcctttagaggacgtttttgtgggggtaagcgcaaggagaggcggcctggcacccacccaatgtgtgaagctggcgggggccacacattaccccctggataggtgctgttacggaaagtttcttttgacgtcacatcggctggatccttggaagatgcaggaggcatggaaattagtcggggggagtgatggcgagcgcacggcccccttctgcagttggttccagggtgtgctgggcattctccggtgtagggctatcgcatggctccagtcctag

SEQ ID NO: 140721 - DNA, 1137 bp, Artificial Sequence
  derived and/or modified sequence
atgcagctgcggctcttccggcggctgctgctggccgccctgctgctggtgattgtgtggaccctgtttggccccagcggcctgggggaggagctgctgagcctgagcctggccagcctgctgcctgccccagccagccctggcccccccctggccctgccccggctgctgatccccaaccaggaggcctgcagcggccctggggccccacccttcctgctgatcctggtgtgcacagcccctgagaacctgaaccagagaaatgccatccgggcctcctggggcggcctgcgggaggcccggggcctgcgggtgcagaccctcttcctgctgggggagcccaatgcccagcaccctgtgtggggcagccagggcagtgacctggccagcgagagcgctgcccagggcgacatcctgcaggccgccttccaggacagctacagaaacctgaccctgaagaccctgagcggcctgaactgggccgagaagcactgccccatggcccgctacgtgctgaagacagatgatgatgtgtatgtgaatgtgcctgagctggtgtctgagctggtgctgcggggcggccgctggggccagtgggagaggagcacagagccccagcgggaggccgagcaggagggcggccaggtgctgcacagcgaggaggtgcccctgctgtacctgggccgggtgcactggagggtgaaccccagcaggacccctgggggccgccaccgggtgtctgaggagcagtggccccacacctggggccccttccccccctatgccagcggcaccggctacgtgctgagcgccagcgctgtgcagctgatcctgaaggtggccagccgggcccccctgctgcccctggaggatgtgtttgtgggcgtgtctgccaggagaggaggcctggcccccacccagtgtgtgaagctggccggggccacccactaccccctggaccgctgctgctacggcaagttcctgctgaccagccaccggctggacccctggaagatgcaggaggcctggaagctggtgggcggcagtgatggagagaggacagcccccttctgctcctggttccagggcgtgctgggcatcctgcgctgccgggccatcgcctggctgcagagctag

SEQ ID NO: 140722 - DNA, 1137 bp, Artificial Sequence
  derived and/or modified sequence
atgcagctgcggctgttccggcggctgctgctggccgccctgctgctggtgatagtgtggactctctttggtccatctgggctcggcgaggaattactctcactcagtctggccagcctgctacccgctcctgctagcccaggccccccccttgccctacccagactgctcattcccaaccaggaggcgtgttccggaccaggtgcgcctcccttcctgttgatacttgtgtgtaccgctcctgaaaacctaaatcaacgaaatgccattcgggcctcatggggcgggctgcgtgaggcccgcggtctccgggtccagaccctgttcctccttggggagccaaacgctcagcaccccgtttgggggtcacagggtagcgacctggcctcagagagcgccgctcagggggacatactgcaagctgcctttcaggacagctacaggaacctaacacttaaaacactgtccggtctcaattgggctgaaaagcattgccccatggcaaggtacgtcctgaaaacagacgacgatgtgtatgttaatgtgcctgaactcgtatccgagcttgtcctgcggggtgggagatggggccagtgggagcgctcaacagagccccagcgcgaagcagagcaggagggcgggcaggtcctacactctgaggaggtgcctttactatatctcggtagagtccattggcgggtgaacccctctagaacccctgggggcaggcacagagtctctgaggagcagtggcctcacacatgggggcccttccccccttatgcctcgggtacaggctatgtgctgtcagcctccgccgtgcaacttattctgaaggtcgcatcacgagctcctctgttgccactggaagatgttttcgtgggggttagtgctcgtcgggggggcttagctcctactcagtgcgtgaagctcgcaggggcgactcactaccccttggatcgctgttgttatggcaaattccttctgacaagtcatcgtctcgatccatggaaaatgcaggaagcgtggaaactggttggtggctctgatggcgagaggaccgcccctttctgcagttggttccagggggtgttaggaattctgagatgtcgggcaatcgcctggctgcaatcctag

SEQ ID NO: 140723 - DNA, 1137 bp, Artificial Sequence
  derived and/or modified sequence
atgcagctgcggctgttccggcggctgctgctggccgccctgctgctcgtgatcgtctggacactctttggcccctctggattaggagaggagctcctcagcctcagtcttgcaagcttgttacccgctccggcctcccctggaccacctttggcactaccacggctgctaatccctaaccaagaggcgtgttccggtcctggggcaccacctttcctcttgatactggtctgcaccgcgcctgaaaacttgaaccagcggaacgcaataagagcttcctggggaggccttcgggaggcgaggggcctcagagtgcagacgttgtttctccttggagaacccaacgctcagcatcctgtctgggggtctcaaggatcagacttagcatcggagagcgcagcccagggggatatactgcaggctgcattccaggacagctacaggaacctgacactgaaaactttgtccggcctaaattgggccgaaaaacattgtcctatggctaggtacgtcctcaagacagatgacgacgtgtatgttaacgtgccagagctggtgtcagaactggtgctcaggggtggaagatggggccaatgggaaagaagcacagagccgcagcgcgaggccgaacaagaaggagggcaggtcctccactcagaagaagtgcctctattgtacctaggacgcgtgcactggcgtgtgaacccctctcgtacgcctggtggccggcaccgcgtaagcgaagagcagtggccacatacttggggcccgttccccccatacgcttccggcactggctatgtcctgtctgcatctgccgtgcaacttatcctgaaggtcgcttctagagcacccctccttccccttgaagacgttttcgtgggagtatccgcacggaggggaggcctggcaccaacccaatgcgtgaagttggccggcgctactcactatcccctcgacaggtgttgctatgggaaatttttgctaacgagccaccgcctggacccgtggaagatgcaagaggcttggaagttggtgggcggttccgatggcgaacggaccgcgcctttttgcagctggttccaaggcgtcctgggtatcctcagatgccgggccatcgcgtggcttcagtcatag

SEQ ID NO: 140724 - DNA, 1137 bp, Artificial Sequence
  derived and/or modified sequence
atgcagctgcggctgttccggcggctgctgctggccgccctgctgcttgtaatcgtatggacactgtttggaccaagcggcctcggagaagagctgctatccctgtcccttgcctccctgctgcccgcaccagcatctccaggaccgcccctagcgctgccacggttactaatcccaaaccaggaagcctgttcaggccctggcgccccacccttcttactaatcctggtctgtacggcgccagagaatctcaaccaaaggaatgctatcagggcaagttggggcggactccgcgaagccagaggtctcagggtgcagaccctctttctgcttggcgaaccgaacgcacagcatccggtctggggtagtcaagggtcagatctggcgtccgaaagcgcagcacagggggatatcctacaggctgctttccaggactcctatagaaacctgaccttgaagacactatctggattaaattgggctgagaaacactgcccaatggcaagatacgtgctgaagacggatgacgatgtctacgtcaatgtcccagagctggtctcggaattggtgttacgcggaggccggtggggacagtgggagagatccacagagccgcagagagaggccgagcaggagggcggccaggtattgcattctgaggaagtgcctttgctttacttggggagagtgcactggcgcgttaatcctagcagaacgccgggcggccgccacagggtgtcagaggagcagtggcctcacacttgggggccgtttcccccctacgcctctggaacagggtatgtcctcagcgcatctgccgttcagctaatattaaaggttgctagcagggctcctctgctgccattagaagatgtgttcgtcggtgtctccgctcggaggggcgggctcgcccctacacaatgcgtaaagttggccggcgcgacgcattaccctctggacagatgttgttatggaaagtttctgttgacatcacatcggctcgacccttggaagatgcaagaggcctggaagttggtggggggctccgatggggagcgcacagccccattctgctcttggttccaaggagttttaggcattctgcgctgcagagccatagcttggctgcagtcatag

SEQ ID NO: 140725 - DNA, 1137 bp, Artificial Sequence
  derived and/or modified sequence
atgcagctgcggctgttccggcggctgctgctggccgccctgctgctggttatagtttggactctgttcggtccctctggcttaggagaagaactgctgagtttgtctctggcttcgctgctcccggcacctgcctcacccggtcctcctttagccctccctcgacttctcatacctaatcaagaagcttgctccgggcctggcgcgcccccttttctcctgattctggtgtgtactgcacccgaaaatcttaaccagagaaacgctataagagcttcctggggcgggcttcgggaggctcgtggcctgagggtgcagacgcttttcctgctgggcgagcccaatgcacaacatccagtatgggggtctcagggttcagatctggctagcgagtctgccgcccagggcgacatactccaggcggcattccaagattcataccgtaatctgacactcaagacacttagtggtttgaactgggctgagaagcactgcccaatggcccgctatgtgctgaagactgacgacgatgtgtatgtgaatgttccggagttggtgagtgaactcgtgctgagagggggccggtgggggcagtgggaaagaagcactgagccccagcgtgaggccgagcaggaagggggccaggtcctccatagcgaggaagtgcctctgctctatctgggaagagtacattggcgcgtgaacccttctcggactcctgggggtcgccaccgcgtcagcgaagagcagtggccacatacctggggtccttttcccccctatgcgagcggaacaggctacgtcctcagtgcctctgccgtgcagctaatactgaaggtcgcaagcagagcccctttgctgcctctggaggacgtgttcgttggcgtgtcagctcgccggggcggactggctcctacccaatgcgtgaagctagccggggcgactcattacccattggaccggtgctgctatggcaagttcctcctgacttctcacagactggatccctggaagatgcaggaggcatggaaacttgtgggggggtccgatggtgagcgcaccgctcccttttgttcgtggtttcagggtgtattagggatcctcaggtgtcgtgctatcgcatggctgcagtcttag

SEQ ID NO: 140726 - DNA, 1137 bp, Artificial Sequence
  derived and/or modified sequence
atgcagctgcggctgttccggcggctgctgctggccgccctgctgctagtgatcgtctggaccttgtttggtccctctgggctcggagaagagctcctgtcactgtcgttggcctcgctcctgcctgcaccagctagccctggacctcctcttgctcttcccagactcctcataccaaatcaggaagcttgttccggaccaggggcgccgccgttcctgctgattctggtgtgcacagctccggaaaatcttaaccagagaaacgctatccgcgcctcttggggcggattaagggaagcaagagggttacgcgtccagaccttgttccttctcggggagcctaatgctcaacacccagtttggggtagccaaggaagtgatttggctagcgagtcagcagcccagggagatattctccaggctgccttccaggacagctaccgaaacctgactctgaagaccctgagtggtctaaactgggccgagaagcattgtcccatggctcggtacgtgctgaaaacagacgatgacgtctatgtcaacgtccctgaactggtttccgagctggtgcttcggggaggccgatggggccagtgggagcggagcacagagccccagcgcgaggccgagcaggaaggtgggcaggtcctacacagcgaggaagtgcccctgctgtaccttggtcgcgttcactggcgggtaaacccctctaggacacctggtgggagacacagggtgtctgaagaacagtggcctcatacatggggcccctttccaccctacgcctccggtacggggtacgtcttatcagcctctgccgtgcagctcattttaaaagttgctagcagagcgcctctgctgcccctagaggatgtgtttgtgggtgtcagcgccagaagaggcggattagcacctacgcagtgtgtgaaactggcgggggccacccattaccctcttgaccgatgctgctatggaaagtttctgctcacttcacatcggttggatccgtggaagatgcaagaggcttggaagttagttggcggctcggacggagaaaggactgcaccattctgtagctggttccaaggcgtcctcggcattctgagatgtagggcgatcgcatggcttcagtcctag

SEQ ID NO: 140727 - DNA, 1137 bp, Artificial Sequence
  derived and/or modified sequence
atgcagctgaggctttttagaaggctgttacttgcggctctgctgctggtcatcgtatggacactttttggcccttccggccttggagaggaattgctgagcctttcattagccagccttctgccggctcctgcttctcccggtccacctcttgccctccccaggttgttgatcccgaatcaagaggcctgcagtggcccaggagcccctccgttcctgctgatactagtctgtaccgcacccgaaaatttgaatcagcggaatgcaattcgtgcatcatggggcggtctccgcgaagctaggggattgagggtgcagacactgtttctgctgggcgagcccaacgcccagcaccccgtgtggggctcccagggctcagatctcgcaagcgagagcgcagcgcagggggacatcttgcaagcagcctttcaagatagttataggaatctgactctgaagacattgtcaggcctgaactgggccgagaaacattgcccgatggccagatatgtcttaaaaaccgatgacgatgtttatgtgaacgtaccagaacttgtatccgagttggtcctgcgcggtgggagatgggggcagtgggagcgctctacagagccccagcgagaagccgaacaggagggcggacaggtcctgcattcagaagaagttccactcctatatctggggcgagtccattggcgcgtgaacccctcacgaacgcccggaggacgccaccgcgtgtccgaggagcagtggcctcacacctgggggccttttcctccctatgctagtggaactggatatgtgctgtctgcatccgccgtccagctaatcctaaaggtggctagcagagctcccttgttacctctggaggatgtttttgtaggtgtttcagctcgcaggggcggactcgcccctacacaatgtgttaagctggcgggagcaacccactacccactcgaccggtgttgctacggcaagtttttactcacgagccacagactagatccatggaaaatgcaggaggcctggaagttggttggcggtagcgacggcgagcgcacagccccattctgcagctggttccagggcgtgctggggattctgagatgtcgcgctatcgcatggctccagagttag

SEQ ID NO: 140728 - DNA, 1137 bp, Artificial Sequence
  derived and/or modified sequence
atgcagctgcggctcttcaggcgtttactgctcgccgctctgcttctggtgatcgtctggactttgttcggaccatccggactgggggaggagttgctgtccctgagccttgcctcgctgctccccgctcctgcttctcccggaccaccgctggctttgcccagactcttaattcccaatcaggaggcctgctctggccctggggcacccccattcctgctcattctggtctgtacagcaccagagaatctcaatcaacggaatgctatacgggcatcatggggaggtctccgcgaagctcggggtctccgggtccaaaccctgttcttgctgggcgagccaaacgcacagcaccctgtatggggcagccagggctcggacctcgcaagtgagtctgccgcacaaggcgatattctgcaggctgctttccaagattcatatcggaatctaacgctgaagaccctttccgggctaaattgggctgagaagcattgtccaatggctcgctacgtccttaaaaccgacgatgacgtgtacgtcaacgtccccgagctggtcagtgaactcgtgctccgcggtggcagatggggccaatgggaaaggtctacagagccccagcgcgaagctgagcaggagggcggacaggtgttgcactctgaagaagtgccactgttgtacttggggagagtgcattggagagtaaacccgtcgcgcacgccaggaggccgacacagggtgagcgaggaacagtggccccacacgtggggtccctttcccccatacgcgtcaggaactggctacgtcctaagcgcttccgccgtccaactgatcctgaaggtagcttccagggccccactgctgccacttgaagacgtgtttgtgggtgtgagtgcccgacgtggcggtctggcaccaactcagtgcgtcaagctggcaggtgccactcattacccactagataggtgttgctacggcaagtttctgttgacttcgcatcgtctggatccttggaagatgcaagaagcgtggaaactcgtgggcggaagcgatggcgagagaaccgccccattctgctcatggtttcagggcgtgctcggaatcttgcgctgccgtgcgatagcctggcttcaatcgtag

SEQ ID NO: 140729 - DNA, 1137 bp, Artificial Sequence
  derived and/or modified sequence
atgcaactgcgcttatttcgcaggcttctgctggccgcactgcttttagtgatcgtttggaccctcttcggacctagcggcctgggcgaggaactcctgtctctctccttggctagtcttctgccagcccctgcaagtcccggacctcctttggctcttcccaggctgttgattcccaatcaggaggcatgttcaggtccaggagctcccccattcctcttaatcctggtgtgcacagctcccgagaatcttaaccagcgcaacgccattagggccagctggggaggtttgcgggaagctcggggtctgcgcgtgcagaccctgttcttgctcggggaaccgaatgcccaacaccccgtttggggatcccaaggcagcgacctggcctcagagtctgcagcccagggcgacatcctgcaggccgctttccaggactcatatcgcaatctgaccctgaaaactttgtccggcctcaattgggccgagaaacattgtcccatggccagatatgtgctgaagaccgacgacgacgtgtatgtgaatgtgcctgagttggtttctgaactggtgctgcgcggaggacgctggggccagtgggagaggtccaccgaaccccagagagaagctgagcaggaagggggtcaggttctgcattctgaagaagtgcctctcctgtatctgggcagagtgcactggagagtgaacccaagccgcactccgggagggagacaccgtgtgtctgaggaacagtggccgcacacctggggaccttttcctccctacgcttctgggactggatacgtcctcagtgccagcgccgtgcagcttatcttaaaggtcgcctctagagccccactcctgccactcgaggacgtgtttgtaggcgtgtctgctcggaggggcggtctggctccaacacagtgcgtgaaacttgccggagcgacccactaccctctcgatcgctgttgttatggtaaatttctattgacttcccacaggctcgatccctggaaaatgcaggaggcctggaaattggtgggcggatccgatggcgaaaggacagcccctttctgctcgtggttccagggcgtcctcggcatccttaggtgccgggctatcgcatggctgcaatcatag

SEQ ID NO: 140730 - DNA, 1137 bp, Artificial Sequence
  derived and/or modified sequence
atgcagttgcgcctgtttagacggttgctgctcgccgcattgcttcttgtgattgtgtggacattgttcgggccttccggcctcggagaggagctgctcagcctaagtctcgctagcctgctgccagccccagcgagtccgggacctcccttggccttaccgaggctgttaatccccaaccaagaggcctgttctggcccaggagcccctccctttctgttgatcttggtgtgcacggcccctgaaaatctgaatcagcgcaacgccatacgcgcaagttggggaggtctaagagaagctagaggattaagggtgcagactctcttcctgctgggggaaccgaatgctcaacacccggtttggggaagccagggaagtgacctggcatccgaaagcgctgctcaaggagacatcctccaagctgctttccaggactcatacagaaacctgaccctcaagacactttccgggctcaactgggctgagaagcactgtcccatggcgcgttatgtgctgaaaacagatgatgacgtgtacgtcaacgtccccgagctcgtgtccgagctggtgctgagagggggaagatggggacaatgggagaggtcaaccgaacctcagcgcgaggctgagcaagagggcggacaagtcttgcatagtgaggaggtgccattgctgtacctgggacgcgtgcactggcgcgttaacccgtcacggacgcctggaggacgccaccgtgtttccgaagagcaatggccccacacatggggcccttttccaccttacgcaagtgggaccggatatgtgctctctgccagcgctgtccaattgatcctgaaggttgcgtctagggccccactcttacccctcgaagacgtctttgttggtgtctctgcgaggcgcggaggcctggccccaacccaatgcgtcaagctcgctggtgccacacattaccctctagaccggtgctgttacggaaaatttctcctgaccagccatcgcttggatccctggaagatgcaagaggcctggaaactcgtgggaggaagcgacggggaacgtacagcaccgttctgctcttggtttcagggcgtactgggcatactgagatgtagagccattgcttggcttcagagctag

SEQ ID NO: 140731 - DNA, 1137 bp, Artificial Sequence
  derived and/or modified sequence
atgcagctgcgactgttccggcgtctattactggccgctctgctactggtgattgtttggactctctttggaccaagtggcctgggggaggagttgctttccctcagcctggcttccttactgcccgcacccgctagccccggacctccattagcccttccgcgactcctaattccaaatcaagaagcatgcagcgggcctggagcgccacccttcctgctgatcctcgtatgtacagccccagaaaatttaaatcaaaggaacgctattcgcgcatcttggggaggcctccgcgaggctaggggactgcgggtgcagactctgttcctccttggggagccaaatgcccaacaccctgtttggggctctcaggggtccgatttagcttctgagagtgctgcccagggagacattctgcaggccgcatttcaagactcttacagaaacttgactctgaaaaccttgtccggcctcaactgggctgagaagcactgtcccatggccagatatgtgctgaagaccgacgatgacgtgtacgtcaatgtgcctgagctggtgagcgagctcgttctgagagggggacggtggggccagtgggagaggagcaccgagccccagagagaggcagagcaggaaggaggacaggtgctgcactccgaggaagtgccactgctgtatctcggccgagttcactggagagtcaacccatcaaggacccccggtggccgtcacagggtgagtgaagagcagtggcctcacacatggggaccgtttcccccttacgctagcggtacagggtacgttctgagtgcgagcgctgtgcagttgatactgaaagtcgcatccagggcccctctcctgcccttggaggatgtctttgtgggcgtctccgccaggagggggggtctggctcccacacagtgcgttaaactggccggagccactcattatcccctagacagatgctgctatggaaagtttctcttaacgtcccataggctcgatccttggaagatgcaggaggcctggaagctggtgggcggaagtgatggcgaaaggaccgcccctttctgcagttggtttcagggggtgcttgggatcctgcggtgtcgcgctattgcttggctgcagtcatag

SEQ ID NO: 140732 - DNA, 1686 bp, Artificial Sequence
  derived and/or modified sequence
gaggcgggggaggggccgtgagtgccgcagtcggccagccatggagcggagcttgctggcggcgaggccgcggcgacaaggtagccacccccgcagcatgcctcgaccgcggtccgcagctgcaccgcctctccccgccccccagggtgcgctggtcccggtcgcgcgctcagacctccgcatcccgggcgtggtcggttaagtccccggccgtgacccaggcccggggagctagtctccgcccttcgctcttacggatcccctcggagtacgccgcaccatgcagctcaggctcttccggcgcctccttctcgccgctttgctgctggtgatcgtctggaccctcttcgggccttcggggttgggggaggagctgctgagcctctcactagcctccctgctcccagcccccgcctcaccggggccgcccctggccctgccccgcctcttgatccccaaccaggaagcttgcagtggtcccggggcccctcccttcctgctcatcctggtgtgcacggctccggagaacctgaaccagagaaacgccattcgggcttcgtggggcgggctgcgcgaggcccgggggctcagggtacagacgctattcttgctgggagagccgaacgcacagcaccccgtgtggggttcccaggggagtgacctggcctcggagtcagcagcccagggggatatcttgcaggccgccttccaggactcctaccgcaacctcaccctaaagaccctcagcgggctgaactgggctgagaaacactgccccatggcccgatacgtcctcaagacggacgatgatgtgtatgtcaacgtccctgaactggtatcagagctggtcttgcgagggggccgttgggggcaatgggagagaagcacggaaccccagagagaggctgagcaggaaggaggccaggttttgcacagcgaggaagtgcctcttctgtacttgggccgggtgcactggcgcgtgaacccctctcggacaccggggggcaggcaccgcgtatcagaggagcagtggcctcacacctggggcccctttccaccctatgcctcaggcacggggtatgtgctgtcagcgtctgctgtgcagctcattctcaaggtggccagccgggcaccccttctcccattagaggatgtctttgtgggggtaagtgcccgacgaggaggcctcgccccaacacagtgtgtcaagctggctggtgccacccactacccgctagaccggtgctgctatgggaaattcctgctgacgtcccacaggctggacccctggaagatgcaggaagcctggaagctggtgggtggctctgacggggaaaggactgcgcccttttgctcctggttccagggagtcctgggcatcctgcggtgtcgagcaatagcctggcttcagagctgagagtgcctggggccacaggaaaggcaggaacaggaccttctctctcccaggcccaacgcaggggccctcactggctgcagctgatctgtttccttataccagatcctcagtctcactaaagacagcgatatgggagacacccaggggcctggcccgccagcccaaaagatggtcatcgggaagaaaaaaagaaaaaaatgctgcagttgttctctcaagctagggcagaagaggggtgtcaagctcctcaataaacttgtctccacttc

SEQ ID NO: 140733 - DNA, 1686 bp, Artificial Sequence
  derived and/or modified sequence
gaggcgggggaggggccgtgagtgccgcagtcggccagccatggagcggagcttgctggcggcgaggccgcggcgacaaggtagccacccccgcagcatgcctcgaccgcggtccgcagctgcaccgcctctccccgccccccagggtgcgctggtcccggtcgcgcgctcagacctccgcatcccgggcgtggtcggttaagtccccggccgtgacccaggcccggggagctagtctccgcccttcgctcttacggatcccctcggagtacgccgcaccatgcagctcaggctcttccggcgcctccttctcgccgctttgctgctggtgatcgtctggaccctcttcgggccttcggggttgggggaggagctgctgagcctctcactagcctccctgctcccagcccccgcctcaccggggccgcccctggccctgccccgcctcttgatccccaaccaggaagcttgcagtggtcccggggcccctcccttcctgctcatcctggtgtgcacggctccggagaacctgaaccagagaaacgccattcgggcttcgtggggcgggctgcgcgaggcccgggggctcagggtacagacgctattcttgctgggagagccgaacgcacagcaccccgtgtggggttcccaggggagtgacctggcctcggagtcagcagcccagggggatatcttgcaggccgccttccaggactcctaccgcaacctcaccctaaagaccctcagcgggctgaactgggctgagaaacactgccccatggcccgatacgtcctcaagacggacgatgatgtgtatgtcaacgtccctgaactggtatcagagctggtcttgcgagggggccgttgggggcaatgggagagaagcacggaaccccagagagaggctgagcaggaaggaggccaggttttgcacagcgaggaagtgcctcttctgtacttgggccgggtgcactggcgcgtgaacccctctcggacaccggggggcaggcaccgcgtatcagaggagcagtggcctcacacctggggcccctttccaccctatgcctcaggcacggggtatgtgctgtcagcgtctgctgtgcagctcattctcaaggtggccagccgggcaccccttctcccattagaggatgtctttgtgggggtaagtgcccgacgaggaggcctcgccccaacacagtgtgtcaagctggctggtgccacccactacccgctagaccggtgctgctatgggaaattcctgctgacgtcccacaggctggacccctggaagatgcaggaagcctggaagctggtgggtggctctgacggggaaaggactgcgcccttttgctcctggttccagggagtcctgggcatcctgcggtgtcgagcaatagcctggcttcagagctgagagtgcctggggccacaggaaaggcaggaacaggaccttctctctcccaggcccaacgcaggggccctcactggctgcagctgatctgtttccttataccagatcctcagtctcactaaagacagcgatatgggagacacccaggggcctggcccgccagcccaaaagatggtcatcgggaagagaaaaagaaaaaaatgctgcagttgttctctcaagctagggcagaagaggggtgtcaagctcctcaataaacttgtctccacttc

SEQ ID NO: 140734 - protein, 422 aa, Artificial Sequence
  derived and/or modified sequence
MLQWRRRHCCFAKMTWNAKRSLFRTHLIGVLSLVFLFAMFLFFNHHDWLPGRAGFKENPVTYTFRGFRSTKSETNHSSLRNIWKETVPQTLRPQTATNSNNTDLSPQGVTGLENTLSANGSIYNEKGTGHPNSYHFKYIINEPEKCQEKSPFLILLIAAEPGQIEARRAIRQTWGNESLAPGIQITRIFLLGLSIKLNGYLQRAILEESRQYHDIIQQEYLDTYYNLTIKTLMGMNWVATYCPHIPYVMKTDSDMFVNTEYLINKLLKPDLPPRHNYFTGYLMRGYAPNRNKDSKWYMPPDLYPSERYPVFCSGTGYVFSGDLAEKIFKVSLGIRRLHLEDVYVGICLAKLRIDPVPPPNEFVFNHWRVSYSSCKYSHLITSHQFQPSELIKYWNHLQQNKHNACANAAKEKAGRYRHRKLH

SEQ ID NO: 140735 - DNA, 1269 bp, Artificial Sequence
  derived and/or modified sequence
atgctgcagtggagaagaagacactgctgcttcgccaagatgacctggaacgccaagagaagcctgttcagaacccacctgatcggcgtgctgagcctggtgttcctgttcgccatgttcctgttcttcaaccaccacgactggctgcccggcagagccggcttcaaggagaaccccgtgacctacaccttcagaggcttcagaagcaccaagagcgagaccaaccacagcagcctgagaaacatctggaaggagaccgtgccccagaccctgagaccccagaccgccaccaacagcaacaacaccgacctgagcccccagggcgtgaccggcctggagaacaccctgagcgccaacggcagcatctacaacgagaagggcaccggccaccccaacagctaccacttcaagtacatcatcaacgagcccgagaagtgccaggagaagagccccttcctgatcctgctgatcgccgccgagcccggccagatcgaggccagaagagccatcagacagacctggggcaacgagagcctggcccccggcatccagatcaccagaatcttcctgctgggcctgagcatcaagctgaacggctacctgcagagagccatcctggaggagagcagacagtaccacgacatcatccagcaggagtacctggacacctactacaacctgaccatcaagaccctgatgggcatgaactgggtggccacctactgcccccacatcccctacgtgatgaagaccgacagcgacatgttcgtgaacaccgagtacctgatcaacaagctgctgaagcccgacctgccccccagacacaactacttcaccggctacctgatgagaggctacgcccccaacagaaacaaggacagcaagtggtacatgccccccgacctgtaccccagcgagagataccccgtgttctgcagcggcaccggctacgtgttcagcggcgacctggccgagaagatcttcaaggtgagcctgggcatcagaagactgcacctggaggacgtgtacgtgggcatctgcctggccaagctgagaatcgaccccgtgcccccccccaacgagttcgtgttcaaccactggagagtgagctacagcagctgcaagtacagccacctgatcaccagccaccagttccagcccagcgagctgatcaagtactggaaccacctgcagcagaacaagcacaacgcctgcgccaacgccgccaaggagaaggccggcagatacagacacagaaagctgcactag

SEQ ID NO: 140736 - DNA, 1269 bp, Artificial Sequence
  derived and/or modified sequence
atgctccagtggcgaaggcgccactgttgctttgccaagatgacttggaatgctaagagaagcctctttcggacacatctgatcggggtcctgagtctcgtgttcttgtttgccatgttccttttttttaatcaccacgattggctccctggacgggcggggtttaaggaaaatccagtgacctacactttccggggtttccggagcactaaatccgagacgaaccattcctccttgcgcaacatatggaaggagacagtgccgcagaccctgcgccctcagacagcaaccaacagtaataacaccgatctttcgccccaaggagtgactggactcgagaacaccttgtccgccaacggaagcatctataacgaaaaaggaacgggccaccccaattcctatcactttaaatacatcattaatgagcctgagaagtgtcaggagaagtcacctttcttaatcctgcttatcgccgcagagcccggacaaattgaggcccggcgtgcaatcaggcagacctggggaaatgagtccctagctcccggaatacaaattaccagaattttccttctcggtctgtcgataaagctcaacgggtatctccagcgtgcaatactggaagagtcacgtcagtaccacgatattatccagcaggaatatcttgacacctattacaacctgacaatcaaaaccttgatggggatgaactgggttgccacttattgtccacatattccttatgtcatgaagacagacagtgatatgttcgtcaacaccgagtatttgatcaataagttgctgaagccagatttgccccccaggcataactattttacggggtacctaatgcgaggctatgcccctaatcgcaacaaggattccaaatggtacatgccaccggacttgtatccttcagaaaggtatccagttttttgtagtgggactggttacgtcttttctggtgatctagcagagaagatattcaaggtgagcctcggaattcgacgacttcacctcgaggacgtatacgtgggaatttgtctcgccaagctccgcatcgaccctgtccctccccccaatgaatttgtgttcaaccactggagggtcagttacagctcttgtaagtactctcacctgatcacgtcccaccagtttcagccctccgagctaataaagtactggaatcacctgcagcaaaacaagcacaacgcatgtgccaacgccgcaaaggaaaaggcgggtagatatagacacaggaagctgcactag

SEQ ID NO: 140737 - DNA, 1269 bp, Artificial Sequence
  derived and/or modified sequence
atgctgcagtggaggcggcggcactgctgctttgccaagatgacctggaatgccaagaggagcctcttccgcacccacctgattggagtgctgagcctggtgttcctgtttgccatgttcctgttcttcaaccaccacgactggctgcccggccgggccggcttcaaggaaaatcctgtgacctacaccttccggggcttccgcagcaccaagtctgagaccaaccacagcagcctgaggaacatctggaaggagaccgtgccccagaccctgcggccccagacagccaccaacagcaacaacacagacctgagcccccagggcgtgacaggcctggagaacaccctgagcgccaacggcagcatctacaatgagaagggcaccggccaccccaacagctaccacttcaagtacatcatcaatgaacctgagaagtgccaggagaagagccccttcctgatcctgctgattgctgctgagcccggccagatcgaggcccggcgggccatccggcagacctggggcaatgaaagcctggcccctggcatccagatcacccgcatcttcctgctgggcctgagcatcaagctgaatggctacctgcagagggccatcctggaggagagccggcagtaccatgacatcatccagcaggagtacctggacacctactacaacctgaccatcaagaccctgatgggcatgaactgggtggccacctactgcccccacatcccctacgtgatgaagacagacagcgacatgtttgtgaacacagagtacctgatcaacaagctgctgaagccagacctgccccccaggcacaactacttcaccggctacctgatgaggggctacgcccccaacagaaacaaggacagcaagtggtacatgcccccagacctgtaccccagcgagcgctaccctgtgttctgcagcggcaccggctacgtgttcagcggggacctggccgagaagatcttcaaggtgtccctgggcatccggcggctgcacctggaggatgtgtatgtgggcatctgcctggccaagctgagaattgatcctgtgcccccaccaaatgaatttgtgttcaaccactggagggtgtcctacagcagctgcaagtacagccacctgatcaccagccaccagttccagcccagcgagctgatcaagtactggaaccacctgcagcagaacaagcacaatgcctgtgccaatgctgccaaggagaaggccggccgctaccgccacaggaagctgcactag

SEQ ID NO: 140738 - DNA, 1269 bp, Artificial Sequence
  derived and/or modified sequence
atgctgcagtggcggcggcggcactgctgcttcgccaagatgacctggaacgcaaagcggagcctgttccgcacccatctgataggagtgctgagcttggtgttcctttttgccatgtttctattctttaaccaccatgattggttaccagggagggctggctttaaagagaacccagtgacttacactttccgaggatttaggtcaacaaagagcgaaactaatcactctagcctccgaaacatctggaaagagacagttcctcagacacttcggccacagactgccactaactctaataacacggacctgtctccccagggtgtcacagggctggagaatactttgtccgcaaacggaagcatttataacgagaaaggtacaggtcaccccaactcctatcacttcaaatatattattaatgaacccgaaaaatgccaagagaagtccccttttctcatattgctgattgctgctgagccaggccaaatagaggcccgcagggcgattcggcaaacttggggtaacgagtctttggccccagggattcagatcacgcgtatatttttactcggacttagcattaagctgaacggctatctgcaaagggctattttggaggaatctcgccagtatcacgatataatacagcaagaatacctggacacgtattataacttaactataaagactctcatggggatgaactgggtagctacttactgcccacacatcccatacgtgatgaagacagacagcgatatgttcgtcaataccgagtacctgataaacaaactcctgaagccagatctgccccccagacataactacttcacagggtatctgatgcgagggtatgccccaaatagaaacaaagactccaagtggtacatgccaccagacttatatccttctgagagatacccagtgttctgctctggaaccggatatgtctttagtggggacctcgctgagaaaatcttcaaagtttctcttgggatccggcggcttcaccttgaagatgtgtacgtgggcatctgcttggccaaattgaggattgaccccgtgccacctccaaatgagtttgtcttcaatcactggagggtgtcatatagtagttgtaaatacagtcatctgattactagtcaccagtttcagccttcagaacttattaagtattggaaccacttgcagcagaataaacataacgcttgtgccaatgctgcaaaggagaaggctggccgctataggcatcgcaaacttcattag

SEQ ID NO: 140739 - DNA, 1269 bp, Artificial Sequence
  derived and/or modified sequence
atgctccagtggaggagacgccattgttgtttcgccaagatgacttggaacgccaaaaggtctctgttccggacacacctgataggcgttctttctttggtgttcctcttcgccatgtttctattctttaatcatcatgattggttgcctgggagggcgggatttaaggagaaccccgtcacctacacattcagaggcttccgctcgacaaaatcggagactaaccacagtagcctgcggaatatttggaaggagaccgtgccccaaaccctgagaccacaaacggcaacaaattccaacaataccgatctttctccgcagggcgtgacaggactcgaaaacactttgagtgcaaatggaagcatttataacgagaaggggacaggacatcctaactcgtatcactttaagtacatcattaatgagccagagaagtgccaggaaaagtccccgtttctgatcttgttgattgccgctgagccgggtcagattgaagctcggagggcgattagacagacttggggcaatgaatctctggccccaggcatccagatcacaagaatttttcttctgggactgtcaattaagctgaacggttacttgcaacgggctatcctcgaagagtctcggcagtaccacgacattatacagcaggaatatctggacacatattataatctgaccatcaagaccctgatggggatgaactgggtggctacgtattgccctcatatcccgtatgtgatgaaaaccgacagcgatatgtttgtcaatacagaatacctcattaacaagctgctcaaacccgacctgccacctagacacaactacttcacaggatacttgatgcgcggatacgcccctaatcgtaataaggactctaagtggtatatgcccccagacttgtacccaagcgaacgctatccggtattctgctccggaacagggtacgtcttctcgggggacctcgctgaaaagatctttaaagtgtctcttggaatcagaaggctgcacctcgaggatgtctatgtcggaatctgtctcgctaaacttaggatagacccagtaccccctcccaatgagtttgtgttcaatcattggagggtttcgtactcctcctgtaaatactcgcatcttattaccagccaccagttccagccaagcgagctgataaagtattggaaccacctgcagcaaaacaaacacaacgcttgcgcaaatgcagccaaagagaaagccggaagatataggcacagaaagctccattag

SEQ ID NO: 140740 - DNA, 3274 bp, Artificial Sequence
  derived and/or modified sequence
cgttaaattctgctctgtcagagagagcatctgtcaagcccacatttaaactgctgcctgcctgtgcagcagctgaggaaccgtggatttcatattatagactaaaaccccattaaaactgctcaaaatccttcctgcagctgccaggcaacaacgaaagaagagaggtaaatcctattcttttccaatacaactgaagcactacattttagctctggctgctttacattgcagctcagtgttattagtagaaatatggatactgagacgagaacacagcactgcattgtccagccaggaaaatagcagatgtaaaaagcttcaatgcatcaactgtcgggaagagtcaacagtgctacaagcagaacgggcaactacagctcttttgtttaacgaaagagagaaaatgaaagaaagggaaaatttcagaagactaggacccatatgaacaaggagggtaactcgaagacaagcagacagatggacactttggatactgtgaaaagcaatcgcaggaggcagactgttgggggatgtgcgcatgttcgatagcatcttttttgctgaagtgatggcgtgccaaaagtattttcagtgggcataatcctcttcacataaatggcctgaccaaggaagaatgactacaagagagacaatgtgactgaattagaaaatgattgccaaagaatagtattaaggagaagaaaacatttttggtcaccaatctctcatataccactactggatatttacaacatgcttcagtggaggagaagacactgctgctttgcaaagatgacctggaatgccaaaaggtctctgttccgcactcatcttattggagtactttctctagtgtttctttttgctatgtttttgtttttcaatcatcatgactggctgccaggcagagctggattcaaagaaaaccctgtgacatacactttccgaggatttcggtcaacaaaaagtgagacaaaccacagctcccttcggaacatttggaaagaaacagtccctcaaaccctgaggcctcaaacagcaactaactctaataacacagacctgtcaccacaaggagttacaggcctggagaatacacttagtgccaatggaagtatttacaatgaaaaaggtactggacatccaaattcttaccatttcaaatatattattaatgagcctgaaaaatgccaagagaaaagtccttttttaatactactaatagctgcagagcctggacaaatagaagctagaagagctattcggcaaacttggggcaatgaaagtctagcacctggtattcaaatcacaagaatatttttgttgggcttaagtattaagctaaatggctaccttcaacgtgcaatactggaagaaagcagacaatatcatgatataattcaacaggaatacttagatacgtactataatttgaccattaaaacactaatgggcatgaactgggttgcaacatactgtccacatattccatatgttatgaaaactgacagtgacatgtttgtcaacactgaatatttaatcaataagttactgaagccagatctgcctcccagacataactatttcactggttacctaatgcgaggatatgcacccaatcgaaacaaagatagcaagtggtacatgccaccagacctctacccaagtgagcgttatcctgtcttctgttctggaactggttatgttttttctggagatctggcagaaaagatttttaaagtttctttaggtatccgccgtttgcacttggaagatgtatatgtagggatctgtcttgccaagttgagaattgatcctgtaccccctcccaatgagtttgtgttcaatcactggcgagtctcttattcgagctgtaaatacagccacctaattacctctcatcagttccagcctagtgaactgataaaatactggaaccatttacaacaaaataagcacaatgcctgtgccaacgcagcaaaagaaaaggcaggcaggtatcgccaccgtaaactacattagaaaagacaattttttttcaaatgtgcaatttgtaaatattgctaaaagcatgtatagttagaactgattacatccgtaggacaagttttagttaaaactcatcacataaagaaattcaagaagtatttttttaatttctgaagaagttaattcttaaaactataacattatataacaaaaaaggtttcccaaaacaatctatttaaaaaactgtataaggagattctgtgtattaacatgcaataacaagcatgcataaatcaatggttcaagtcttctgttaggggccaataaaatgtatctgcatatgttttccacataaattttaattcaagaaatgacagtcaaaagatccttcattttagattaagcttttcattttaatatataatttaatgtaaataaaacatcactatcaattttaaggaaactttttaattgtgcaaaggataaattttttgacctattttagggttctaaatgcaataagatttagttgagttattccacaaacacattataaagttcagatgtttcatcaatgcagttctcacgaaagtatttactttttaaaaataactgagatattattttaaatttcttttattaatactttcttttattaatatatgggggaaaattattttgacatgacgtggtaaaatgtgaaaaactaatgtgtctcaggctcaagtttttatagttattaaatgtttcaaaatagacaagttttgtttcctcattgatgttaagaaccaaactcctatttcaatgagttattggattagaccaattactgcactcttaaacagcaccaccatttaatttcatgtatatctaacttcgaatatatctgtaaagataatcgaagcaaaagtaatcacttaaaggcacaaataggatgtactgttgaaaaagataaagagtgcaggtgcagtttcattcaacacatttttaagatgcatgtctgccaaaatgcaacatacgggaagtttatttcctgacagcaggtgtacacatgccaacacttaatcattttatggcacctatttctttcttggagtgccaagtttgcaaacctgcagtttttaatttggtagatgacaaatattctgaatcaccaattaaaaacctttttgggagggatggggaaaactacaaacgtttgacaaacacaattctaggatgaacaatgtatacaatgcacttttatgaagtttttaaaaataaaggaaaacaaaaaacttta

SEQ ID NO: 140741 - protein, 146 aa, Artificial Sequence
  derived and/or modified sequence
MGFLRRLIYRRRPMIYVESSEESSDEQPDEVESPTQSQDSTPAEEREDEGASAAQGQEPEADSQELVQPKTGCELGDGPDTKRVCLRNEEQMKLPAEGPEPEADSQEQVHPKTGCERGDGPDVQELGLPNPEEVKTPEEDEGQSQP

SEQ ID NO: 140742 - DNA, 441 bp, Artificial Sequence
  derived and/or modified sequence
atgggctttctccgcaggctgatctatcgaagacgtcccatgatatacgtggagtctagcgaagaaagcagcgacgagcagccagacgaggtggagagtcccactcagtctcaggattcaactcccgctgaagaacgggaggatgaaggagcgtcagccgctcagggacaggagcccgaagctgactcacaagagctcgtccagccaaagaccggctgtgagttaggtgacggcccggatactaagcgggtgtgccttaggaatgaggagcagatgaagttgccagcagaagggcctgaaccggaggccgattcccaggagcaggtacatcctaagactggctgtgagcgcggggatgggcccgatgtgcaagaactgggacttccaaaccccgaagaggttaagaccccagaagaggacgagggacaaagtcaaccgtag

SEQ ID NO: 140743 - DNA, 441 bp, Artificial Sequence
  derived and/or modified sequence
atgggcttcctgcggcggctcatctacagaagaagacccatgatctacgtggagagcagcgaggagagcagtgatgagcagccagatgaggtggagagccccacccagagccaggacagcaccccagctgaggagagagaagatgagggcgccagcgctgcccagggccaggagcctgaggccgacagccaggagctggtgcagcccaagacaggctgtgagctgggagatggccctgacaccaagagggtgtgcctgagaaatgaggagcagatgaagctgcctgctgagggccctgagcctgaggccgacagccaggagcaggtgcaccccaagacaggctgtgaaagaggagatggcccagatgtgcaggagctgggcctgcccaaccctgaggaggtgaagaccccagaagaagatgagggccagagccagccctag

SEQ ID NO: 140744 - DNA, 441 bp, Artificial Sequence
  derived and/or modified sequence
atgggcttcctgcggcggctgatctaccggcggcggcccatgatctacgtcgagtctagcgaggagtcctcagacgaacagcctgacgaagttgaatctccaacccaaagccaggattctactcctgccgaggaacgcgaggatgagggcgcctcggcagcgcagggccaggagcctgaagctgactcgcaggaattggtgcagccaaaaacagggtgtgaactaggcgacggacccgacaccaagcgcgtttgtttacgcaatgaggagcagatgaaacttcccgcagagggacccgagcccgaagccgacagccaggagcaggtccatccaaaaaccggatgcgagcgtggcgacgggccagatgtccaggagttgggcctccccaacccggaggaagttaaaactcccgaagaagacgagggacagagccagccatag

SEQ ID NO: 140745 - DNA, 665 bp, Artificial Sequence
  derived and/or modified sequence
gcccacgtggagaacgccagggagctgtgagagtgtgcagtcgcgttcctgctgtccggacacttttttcctctactgagactcatctggtagatccgcaggccagtcctcccaggggctgaagttgtgaaatatgggttttctaagaagattaatctatcggcgtagaccaatgatctatgtagaatcttctgaggagtccagtgatgagcaacctgacgaagtggaatcaccaactcaaagtcaggattctacacctgctgaagagagagaggatgagggagcatctgcagctcaagggcaggagcctgaagctgatagccaggaactggttcagccaaagactgggtgtgagcttggagatggtcctgataccaagagggtgtgcctgcgaaatgaagagcagatgaaactgcccgcagaagggccagagcctgaagcggatagccaggaacaggttcacccgaagactgggtgtgagcgcggagatggtcctgatgtccaggagttgggcctgccaaatccagaggaggtgaaaacacctgaggaagatgaagggcaatcacagccttaaaagaagacacgctgaaatggttcaggctgctcctgtgttggaaatttgaccattaaaattctcccaataaagctttacagccttctgcaaa

SEQ ID NO: 140746 - DNA, 441 bp, Artificial Sequence
  derived and/or modified sequence
atgggattcctgagaagactgatctatagaagaagacccatgatttacgtggagtcctccgaagagtcaagcgatgaacaacctgatgaagtggagtctccaacccagtcccaggatagtaccccagcagaagagagggaggacgagggcgcttccgctgctcagggacaggaaccggaggccgattcacaggaattggtgcaaccgaagacaggatgtgaactcggtgatgggcctgacacgaagcgtgtatgtctgaggaatgaagaacagatgaagttgccagcagaaggacctgagccagaggctgacagccaggaacaggtgcatccaaaaactggctgcgaacgcggagatggcccagatgtgcaggagcttggactccccaaccctgaggaagttaagacgccagaagaagacgaaggccagtcccagccgtag

SEQ ID NO: 140747 - DNA, 441 bp, Artificial Sequence
  derived and/or modified sequence
atgggcttcctgagaagactgatctacagaagaagacccatgatctacgtggagagcagcgaggagagcagcgacgagcagcccgacgaggtggagagccccacccagagccaggacagcacccccgccgaggagagagaggacgagggcgccagcgccgcccagggccaggagcccgaggccgacagccaggagctggtgcagcccaagaccggctgcgagctgggcgacggccccgacaccaagagagtgtgcctgagaaacgaggagcagatgaagctgcccgccgagggccccgagcccgaggccgacagccaggagcaggtgcaccccaagaccggctgcgagagaggcgacggccccgacgtgcaggagctgggcctgcccaaccccgaggaggtgaagacccccgaggaggacgagggccagagccagccctag

SEQ ID NO: 140748 - protein, 1527 aa, Artificial Sequence
  derived and/or modified sequence
MDALCGSGELGSKFWDSNLSVHTENPDLTPCFQNSLLAWVPCIYLWVALPCYLLYLRHHCRGYIILSHLSKLKMVLGVLLWCVSWADLFYSFHGLVHGRAPAPVFFVTPLVVGVTMLLATLLIQYERLQGVQSSGVLIIFWFLCVVCAIVPFRSKILLAKAEGEISDPFRFTTFYIHFALVLSALILACFREKPPFFSAKNVDPNPYPETSAGFLSRLFFWWFTKMAIYGYRHPLEEKDLWSLKEEDRSQMVVQQLLEAWRKQEKQTARHKASAAPGKNASGEDEVLLGARPRPRKPSFLKALLATFGSSFLISACFKLIQDLLSFINPQLLSILIRFISNPMAPSWWGFLVAGLMFLCSMMQSLILQHYYHYIFVTGVKFRTGIMGVIYRKALVITNSVKRASTVGEIVNLMSVDAQRFMDLAPFLNLLWSAPLQIILAIYFLWQNLGPSVLAGVAFMVLLIPLNGAVAVKMRAFQVKQMKLKDSRIKLMSEILNGIKVLKLYAWEPSFLKQVEGIRQGELQLLRTAAYLHTTTTFTWMCSPFLVTLITLWVYVYVDPNNVLDAEKAFVSVSLFNILRLPLNMLPQLISNLTQASVSLKRIQQFLSQEELDPQSVERKTISPGYAITIHSGTFTWAQDLPPTLHSLDIQVPKGALVAVVGPVGCGKSSLVSALLGEMEKLEGKVHMKGSVAYVPQQAWIQNCTLQENVLFGKALNPKRYQQTLEACALLADLEMLPGGDQTEIGEKGINLSGGQRQRVSLARAVYSDADIFLLDDPLSAVDSHVAKHIFDHVIGPEGVLAGKTRVLVTHGISFLPQTDFIIVLADGQVSEMGPYPALLQRNGSFANFLCNYAPDEDQGHLEDSWTALEGAEDKEALLIEDTLSNHTDLTDNDPVTYVVQKQFMRQLSALSSDGEGQGRPVPRRHLGPSEKVQVTEAKADGALTQEEKAAIGTVELSVFWDYAKAVGLCTTLAICLLYVGQSAAAIGANVWLSAWTNDAMADSRQNNTSLRLGVYAALGILQGFLVMLAAMAMAAGGIQAARVLHQALLHNKIRSPQSFFDTTPSGRILNCFSKDIYVVDEVLAPVILMLLNSFFNAISTLVVIMASTPLFTVVILPLAVLYTLVQRFYAATSRQLKRLESVSRSPIYSHFSETVTGASVIRAYNRSRDFEIISDTKVDANQRSCYPYIISNRWLSIGVEFVGNCVVLFAALFAVIGRSSLNPGLVGLSVSYSLQVTFALNWMIRMMSDLESNIVAVERVKEYSKTETEAPWVVEGSRPPEGWPPRGEVEFRNYSVRYRPGLDLVLRDLSLHVHGGEKVGIVGRTGAGKSSMTLCLFRILEAAKGEIRIDGLNVADIGLHDLRSQLTIIPQDPILFSGTLRMNLDPFGSYSEEDIWWALELSHLHTFVSSQPAGLDFQCSEGGENLSVGQRQLVCLARALLRKSRILVLDEATAAIDLETDNLIQATIRTQFDTCTVLTIAHRLNTIMDYTRVLVLDKGVVAEFDSPANLIAARGIFYGMARDAGLA

SEQ ID NO: 140749 - protein, 1238 aa, Artificial Sequence
  derived and/or modified sequence
MDALCGSGELGSKFWDSNLSVHTENPDLTPCFQNSLLAWVPCIYLWVALPCYLLYLRHHCRGYIILSHLSKLKMVLGVLLWCVSWADLFYSFHGLVHGRAPAPVFFVTPLVVGVTMLLATLLIQYERLQGVQSSGVLIIFWFLCVVCAIVPFRSKILLAKAEGEISDPFRFTTFYIHFALVLSALILACFREKPPFFSAKNVDPNPYPETSAGFLSRLFFWWFTKMAIYGYRHPLEEKDLWSLKEEDRSQMVVQQLLEAWRKQEKQTARHKASAAPGKNASGEDEVLLGARPRPRKPSFLKALLATFGSSFLISACFKLIQDLLSFINPQLLSILIRFISNPMAPSWWGFLVAGLMFLCSMMQSLILQHYYHYIFVTGVKFRTGIMGVIYRKALVITNSVKRASTVGEIVNLMSVDAQRFMDLAPFLNLLWSAPLQIILAIYFLWQNLGPSVLAGVAFMVLLIPLNGAVAVKMRAFQVKQMKLKDSRIKLMSEILNGIKVLKLYAWEPSFLKQVEGIRQGELQLLRTAAYLHTTTTFTWMCSPFLVTLITLWVYVYVDPNNVLDAEKAFVSVSLFNILRLPLNMLPQLISNLTQASVSLKRIQQFLSQEELDPQSVERKTISPGYAITIHSGTFTWAQDLPPTLHSLDIQVPKGALVAVVGPVGCGKSSLVSALLGEMEKLEGKVHMKGSVAYVPQQAWIQNCTLQENVLFGKALNPKRYQQTLEACALLADLEMLPGGDQTEIGEKGINLSGGQRQRVSLARAVYSDADIFLLDDPLSAVDSHVAKHIFDHVIGPEGVLAGKTRVLVTHGISFLPQTDFIIVLADGQVSEMGPYPALLQRNGSFANFLCNYAPDEDQGHLEDSWTALEGAEDKEALLIEDTLSNHTDLTDNDPVTYVVQKQFMRQLSALSSDGEGQGRPVPRRHLGPSEKVQVTEAKADGALTQEEKAAIGTVELSVFWDYAKAVGLCTTLAICLLYVGQSAAAIGANVWLSAWTNDAMADSRQNNTSLRLGVYAALGILQGFLVMLAAMAMAAGGIQAARVLHQALLHNKIRSPQSFFDTTPSGRILNCFSKDIYVVDEVLAPVILMLLNSFFNAISTLVVIMASTPLFTVVILPLAVLYTLVQRFYAATSRQLKRLESVSRSPIYSHFSETVTGASVIRAYNRSRDFEIISDTKVDANQRSCYPYIISNRSEAASLAPCSSRNSQQALWCSGSLSLLSPKQKTGPALPLPHFLLI

SEQ ID NO: 140750 - DNA, 4584 bp, Artificial Sequence
  derived and/or modified sequence
atggacgccctctgtgggtccggagaactggggagtaaattctgggattcaaacttaagtgtgcacaccgaaaatcctgacctcactccgtgttttcagaatagcctactcgcttgggtgccgtgtatctatctgtgggtcgccctcccatgttaccttctttatctgagacaccactgccgggggtacattatcctgtctcatctgtccaaattgaaaatggtactaggcgtgctgctgtggtgtgtcagctgggcggacctgttctactctttccacggactcgttcacgggcgagctcctgccccagtgttctttgtcaccccgctggtcgtgggagtgaccatgctcctcgccaccctgctgatacagtatgagcgcttacaaggggtccagagctcaggagtgctcatcattttctggtttctctgtgttgtgtgtgcaattgtgccgtttagaagcaaaattttgctggccaaagctgagggcgaaatcagcgacccgttccgtttcaccacgttctatatccacttcgcccttgtgctcagcgccctcatcttggcctgcttcagagagaaaccccctttcttcagtgccaagaatgtggacccgaacccctaccctgaaacctccgctggatttttatcccggctttttttttggtggtttacaaagatggccatctatggctatcggcatcctctcgaggagaaagacttgtggtccctgaaggaggaggaccgaagccagatggtagtccagcagctccttgaggcatggaggaaacaggagaagcagaccgcccgccacaaggcctccgctgctcccgggaaaaacgccagcggagaagatgaggtgctgctaggtgcacggccaaggcccaggaaaccctcctttttgaaagccctgctggctaccttcggatcttcgtttttgatctccgcttgtttcaagttaatccaggatcttctgtccttcatcaatcctcaactgctgagcatattgatccgttttatctcaaaccctatggccccttcatggtggggcttcctggtcgccggacttatgtttttatgttccatgatgcaatcactgatactccagcattattaccactacatattcgtgacgggggttaaatttagaaccggaataatgggcgttatttacagaaaggccctggtgatcaccaacagtgtcaaacgcgcgtccaccgtcggcgaaatcgttaatctgatgagcgtagatgcgcagagatttatggatctggcccccttcctgaatctcttgtggtctgctcctcttcagataatcctggcaatctacttcttatggcagaacctgggaccgtctgttctcgcaggagtcgcattcatggtgctcctcataccacttaacggcgccgttgctgtcaagatgcgagctttccaggtcaaacagatgaagctgaaggactcgaggattaaattgatgagcgagattctcaacgggattaaagttctgaaactgtacgcctgggaacccagtttcttgaaacaagttgagggtattcgccagggcgagctgcaactgctcaggacggccgcttacctgcacaccacaacaacctttacctggatgtgttcccccttccttgtgactcttatcacactgtgggtctacgtgtatgtggatcctaacaacgtattagacgcagagaaagcgttcgtgagtgtgagcctgttcaacattctgagattacctctgaacatgttacctcagttaatttcaaacctaacccaggccagcgtgtccctcaagcggatacaacagttcctgtctcaagaagaactcgacccccagtcagttgagcgcaagactatctcacctggctacgccattacaatccacagtggtacgtttacatgggcccaggatctgccgccaactctgcactcgttggacatccaggtgccgaagggggccttagtcgcagtggtggggcccgtgggctgcggcaaaagcagccttgtctcagcactgctcggcgagatggagaaacttgaaggaaaagtccacatgaaaggcagtgtcgcctatgtccctcagcaggcatggatccagaattgcaccctacaggaaaatgtgctgtttggaaaagccctcaatcccaagcgctatcaacagaccctggaggcatgtgccctcctggctgacttggagatgctccccggcggtgatcagaccgagatcggggaaaaagggatcaatctgagcggaggccagcggcagcgggtgagcttggctcgggcagtgtactccgatgccgatatcttcctgctggatgacccactgagcgccgtcgattctcacgtagcaaaacacatatttgatcacgttattgggcctgagggggtgttagccgggaaaacgagggtcttagtgacccacgggatttcatttctcccccagaccgatttcattattgtgttggccgatggacaagtgagtgagatgggtccgtaccctgccctcctgcagcgcaatgggtcctttgcaaattttctctgcaactatgcgccggatgaagaccaaggccatttggaggacagctggacagcgctcgaaggggccgaagacaaagaagctctgctgattgaagataccctgagcaaccatacggacttaaccgacaatgatcccgtgacatatgtcgttcaaaaacagttcatgcggcaactctcggcactcagttctgacggcgaggggcagggaagacctgtgccgcgccggcacctggggccctccgaaaaagtgcaggtcacggaggccaaggcagatggggccctaacgcaggaggagaaggctgcaattggtaccgtcgaattgtccgtcttctgggactacgccaaagctgtgggattgtgtaccaccctggcgatttgtctcctgtatgtgggacagagcgcggccgccataggggccaacgtttggctgtctgcttggaccaatgacgccatggctgactctaggcagaacaacacttcactccgattaggggtatacgccgcgctggggatactccaagggtttctcgttatgttggccgcaatggccatggcagcaggcggtatacaggcggcacgggtgcttcaccaggccctgttgcataacaagatccgaagcccccagtcttttttcgatacaaccccctctgggagaattctcaactgtttttcgaaagacatctacgttgtcgacgaggtgttagcccccgtgattttgatgctgctcaactctttctttaacgctatctcaacccttgttgtgatcatggcaagcacaccactctttacagtagtgatcctgcccctcgcagtgctgtacactctggtacagaggttctacgctgccacctctcgccaactaaaacggcttgagtcagtgagccgttcacctatttactctcattttagcgaaacagttaccggcgcctctgtcatccgggcctacaacaggtcgcgcgattttgaaattatttccgacacgaaagtggacgccaaccagaggagttgttacccatacataatttctaaccggtggctgtcgatcggtgtggagtttgtagggaactgcgtggttctcttcgccgctttgtttgcagttattggcaggtcctcacttaacccagggctggtggggctcagtgtgagttactctttacaggtcaccttcgctttaaattggatgatccggatgatgagcgatctcgaaagtaatatcgtcgctgtggaacgcgtgaaggagtacagtaaaaccgagacagaagcaccatgggtagtcgagggctcaaggccgcccgaagggtggcctcccaggggcgaagtggagttccgtaattacagcgttcgctacagacctgggctcgaccttgtacttagggatctgagtttacacgtgcatggcggggagaaagttgggatagtcgggcgtacaggcgccggaaaatcaagcatgacactctgcctgttccggatcttggaagcagccaagggggaaatccgcatcgatggacttaatgtggcagatatcggtttacacgacctgcggagccagctgaccatcattccacaggatccaattcttttcagcggaacactgcgtatgaatttagacccattcgggtcttattcagaagaggatatttggtgggctctcgagttgagccatctacacacattcgttagttcacagcctgccgggctggactttcagtgttctgaaggaggggaaaatctgtcggtagggcagaggcagttagtctgcctggctcgcgctttgttacgcaaaagtcgaatactggtcctggatgaggctaccgccgctattgacctggaaacagacaacctcatccaggccactatcaggacccaattcgatacctgcactgttcttacaattgctcacaggctgaatactattatggactacacccgggtcctcgttctggacaaaggggttgtggctgagtttgattctccagcgaacctcattgccgcacgtggaatcttttatggcatggcgcgtgacgccggtcttgcttag

SEQ ID NO: 140751 - DNA, 3717 bp, Artificial Sequence
  derived and/or modified sequence
atggacgccctctgcggttccggcgagctcggatctaaattttgggactcgaatctcagtgtgcacacggagaatccggatctgactccgtgctttcaaaacagcctgttagcctgggtgccatgtatatacttgtgggtggctctgccttgctacctgctgtatctgagacatcactgtcgaggatacatcattttgagccatcttagtaagctgaagatggtcctcggtgtgctgctatggtgcgtgtcttgggcagacctgttttatagcttccatggcctagtgcatggtagggctcccgcaccagtcttctttgtcactccgctggttgtgggagtcacaatgctattagcaaccttgcttatccagtacgagcgcctgcagggagtgcagtcgtctggggtgctgattattttttggttcctgtgtgtagtgtgcgctattgtgcctttccgttcgaagatactcttggctaaggctgaaggagaaatttcagacccattcagatttacaaccttttacatacacttcgccctggtgctgtcagcattgatactggcgtgtttcagagagaagcccccattctttagcgctaagaacgtagaccccaatccataccctgagacctctgccgggttcctttcccgcctgtttttctggtggtttacgaaaatggctatctacgggtaccgtcaccccctcgaggagaaggatctgtggtcgctcaaagaagaagatagatcacagatggtagtgcaacagttgctggaggcttggcggaagcaggaaaaacagactgctcggcacaaggcttctgccgctcccggaaaaaacgcttcgggggaggacgaggttttgttgggggcaagaccaaggcccagaaaaccttcttttctgaaggccctcctggcgaccttcggctcttctttcttaataagcgcttgcttcaagctcatccaggacctgctgagctttatcaacccccaactgttgagcatcttaattagatttatttcaaatcccatggctccttcatggtggggatttttagttgctggcttaatgtttctgtgttccatgatgcaatccctgatactgcagcactactaccactatattttcgttacgggtgtgaaatttaggacagggatcatgggcgttatttatcggaaggctctcgtgattaccaactcagttaagagggccagtaccgttggagaaatcgtgaatttgatgtctgtggatgcacagaggttcatggatcttgccccgttcctgaacctgctgtggagtgcacccctgcagataattctcgccatatactttctgtggcaaaatctggggcctagcgtcctggcgggcgtggccttcatggtgttgctcatccccctgaatggggctgtggcggtcaaaatgagggccttccaggttaaacagatgaaactaaaagacagccgaattaagctgatgagtgagatcttgaatgggatcaaggtcctgaagctgtacgcctgggagccatcttttcttaagcaagtcgagggcatccgccaaggtgagctccagctcttgaggaccgcagcttatctccacacaactacaaccttcacctggatgtgcagtccttttcttgtgactctcattacgctctgggtgtatgtctacgtggaccctaacaacgtgctggacgctgagaaggctttcgtttcggttagtctgttcaacattctgcgactccccctgaacatgttgcctcagctgatctcaaacttaacccaggcatctgtcagcctgaagcgtattcaacagttcctgtctcaggaggaactcgacccccagagtgtggaacggaaaactatttcacctggttacgccattacgattcacagcggaacattcacttgggcccaggatctccctcccactcttcatagcctggatattcaggtccccaagggcgccttggtggccgttgtaggaccagttgggtgtgggaagagctccctggtcagtgcactgctcggcgaaatggaaaaattggaaggcaaggtccatatgaagggatcagtggcttatgttccccagcaagcctggattcaaaactgtaccctgcaggagaatgtgttattcgggaaagccttaaacccaaagaggtatcagcagaccctggaggcttgtgccctactggccgacctagagatgctgccagggggcgatcaaacagagatcggggagaaaggcattaatctttcaggagggcagcgacagagagtgtccctggcgcgggcggtgtattcagatgcagacattttcctcctagatgaccccctcagcgcggtagactcccatgttgccaaacacatttttgatcacgttattggaccagaaggcgtgctcgcaggcaaaactagagtactcgtgacccatggaattagctttcttccccaaaccgactttatcatcgtgctggcagatggacaggttagcgaaatgggcccttaccctgctctgctccagaggaatggaagcttcgccaacttcctttgtaattacgcccccgacgaggatcagggccaccttgaagattcatggacggccttggagggggcagaggacaaagaggcactgttgatcgaggatacgctgagcaaccatactgaccttaccgataacgacccagtcacctatgttgtccagaaacaattcatgcggcagttgagcgccctgagctctgacggcgaggggcagggcaggcccgtgccgaggcgccacctcggaccgtccgagaaggtccaggtaaccgaggcaaaagctgacggggctttgacacaggaagagaaagctgcaattggcactgtagaactctcggtgttctgggactatgcgaaggctgtcggattgtgcactacactggccatatgcctgctgtacgtcgggcaatccgccgctgctattggagcaaatgtttggcttagcgcctggacgaatgatgccatggccgatagtcggcagaataataccagtctgagactgggtgtttacgcagccttgggtattctccaaggttttttggtcatgctcgcggcaatggctatggctgccggggggattcaggccgcccgggtcctccatcaggctttgctgcacaacaaaatccggtccccacagagtttctttgatacgacgccatcagggcgcatcctgaactgctttagtaaggacatatatgtcgtggacgaggtacttgcacctgtgattttgatgcttttaaattcattctttaacgcaatcagtacgctggttgtaatcatggcttccactcctctctttaccgtcgtgatcttgcctcttgcggtgttgtatactctcgtgcagaggttttatgccgcaacgtcgcgccaattgaagcggctggagtccgtgagcaggtctcctatatattcacatttcagcgaaaccgtaactggtgcctctgtcatccgcgcttacaataggagcagagacttcgagataatctctgacaccaaggttgacgctaaccagcggtcctgctatccctacatcatttcgaatagatccgaggccgctagtcttgctccgtgttcttcgcgcaactcccaacaggccctctggtgcagtgggtcactgtccctgctctccccgaagcaaaaaaccggaccagctctccctctcccacacttcctgttgatttag

SEQ ID NO: 140752 - DNA, 4584 bp, Artificial Sequence
  derived and/or modified sequence
atggatgccctgtgtggcagcggggagctgggcagcaagttctgggacagcaacctgtctgtgcacacagagaacccagacctgaccccctgcttccagaacagcctgctggcctgggtgccctgcatctacctgtgggtggccctgccctgctacctgctgtacctgcggcaccactgccggggctacatcatcctgagccacctgagcaagctgaagatggtgctgggcgtgctgctgtggtgtgtgtcctgggccgacctcttctacagcttccacggcctggtgcacggccgggccccagcccctgtgttctttgtgacccccctggtggtgggcgtgaccatgctgctggccaccctgctgatccagtatgagcggctgcagggcgtgcagagcagcggcgtgctgatcatcttctggttcctgtgtgtggtgtgtgccatcgtgcccttccgcagcaagatcctgctggccaaggccgagggggagatcagtgaccccttccgcttcaccaccttctacatccactttgccctggtgctgagcgccctgatcctggcctgcttccgggagaagccacccttcttcagcgccaagaatgtggaccccaacccctacccagagaccagcgctggcttcctgagccgcctcttcttctggtggttcaccaagatggccatctacggctaccgccaccccctggaggagaaggacctgtggagcctgaaggaggaggacaggagccagatggtggtgcagcagctgctggaggcctggaggaagcaggagaagcagacagcccggcacaaggccagcgctgcccctgggaagaatgccagcggagaagatgaggtgctgctgggcgcccggccccggcccaggaagcccagcttcctgaaggccctgctggccaccttcggcagcagcttcctgatcagcgcctgcttcaagctgatccaggacctgctgtccttcatcaacccccagctgctgagcatcctgatccgcttcatcagcaaccccatggcccccagctggtggggcttcctggtggccggcctgatgttcctgtgcagcatgatgcagagcctcatcctgcagcactactaccactacatctttgtgactggagtgaagttcagaacaggcatcatgggcgtcatctacaggaaggccctggtgatcaccaacagcgtgaagagggccagcacagtgggggagatcgtgaacctgatgtctgtggatgcccagcgcttcatggacctggcccccttcctgaacctgctgtggagcgcccccctgcagatcatcctggccatctacttcctgtggcagaacctgggccccagcgtgctggccggcgtggccttcatggtgctgctgatccccctgaatggagctgtggccgtgaagatgagggccttccaggtgaagcagatgaagctgaaggacagccgcatcaagctgatgtctgagatcctgaatggcatcaaggtgctgaagctgtatgcctgggagcccagcttcctgaagcaggtggagggcatccggcagggcgagctgcagctgctgaggacagctgcctacctgcacaccaccaccaccttcacctggatgtgcagccccttcctggtgaccctcatcaccctgtgggtgtatgtgtatgtggaccccaacaacgtgctggatgctgagaaggcctttgtgtctgtgtccctcttcaacatcctgcggctgcccctgaacatgctgccccagctgatcagcaacctgacccaggcctctgtgtccctgaagaggatccagcagttcctgagccaggaggagctggacccccagagcgtggagaggaagaccatcagccctggctacgccatcaccatccacagcggcaccttcacctgggcccaggacctgccccccaccctgcacagcctggacatccaggtgcccaagggggccctggtggccgtggtgggccctgtgggctgcggcaagagcagcctggtgtctgccctgctgggggagatggagaagctggagggcaaggtgcacatgaagggctctgtggcctacgtgccccagcaggcctggatccagaactgcaccctgcaggagaatgtgctgtttgggaaggccctgaaccccaagcgctaccagcagaccctggaggcctgtgccctgctggccgacctggagatgctgcctggaggagaccagacagagatcggggagaagggcatcaacctgagcggcggccagaggcagagggtgtccctggcccgggctgtgtacagtgatgctgacatcttcctgctggatgaccccctgtctgctgtggacagccacgtggccaagcacatctttgaccacgtgattggccctgagggcgtgctggccggcaagaccagggtgctggtgacccacggcatctccttcctgccccagacagacttcatcatcgtgctggctgatggccaggtgtctgagatgggcccctacccagccctgctgcagagaaatggcagctttgccaacttcctgtgcaactatgccccagatgaggaccagggccacctggaggacagctggacagccctggagggcgctgaggacaaggaggccctgctgattgaggacaccctgagcaaccacacagacctgacagacaatgaccctgtgacctacgtggtgcagaagcagttcatgaggcagctgagcgccctgagcagtgatggagagggccagggccggcctgtgcccaggaggcacctgggccccagcgagaaggtgcaggtgacagaggccaaggcagatggagccctgacccaggaggagaaggccgccatcggcaccgtggagctgtctgtgttctgggactatgccaaggctgtgggcctgtgcaccaccctggccatctgcctgctgtatgtgggccagagcgctgctgccatcggggccaacgtgtggctgagcgcctggaccaatgatgccatggctgacagccggcagaacaacaccagcctgcggctgggcgtgtatgctgccctgggcatcctgcagggcttcctggtgatgctggccgccatggccatggctgctgggggcatccaggccgcccgggtgctgcaccaggccctgctgcacaacaagatccgcagcccccagagcttctttgacaccaccccatctggccgcatcctgaactgcttcagcaaggacatctacgtggtggatgaggtgctggcccctgtgatcctgatgctgctgaacagcttcttcaatgccatcagcaccctggtggtgatcatggccagcacccccctcttcaccgtggtgatcctgcccctggccgtgctgtacaccctggtgcagcgcttctacgccgccaccagccggcagctgaagaggctggagagcgtgagccgcagccccatctacagccacttcagcgagaccgtgactggagccagcgtcatccgggcctacaacagaagccgggactttgagatcatcagtgacaccaaggtggatgccaaccagaggagctgctacccctacatcatcagcaaccgctggctgagcattggagtggagtttgtgggcaactgtgtggtgctgtttgctgccctgtttgctgtgattggccgcagcagcctgaaccctggcctggtgggcctgtctgtgtcctacagcctgcaggtgacctttgccctgaactggatgatccgcatgatgtctgacctggagagcaacatcgtggccgtggagcgggtgaaggagtacagcaagacagaaacagaggccccctgggtggtggagggcagcaggcctcctgagggctggcccccaagaggagaggtggagttcaggaactacagcgtgcgctaccggcccggcctggacctggtgctgcgggacctgagcctgcacgtgcacggcggggagaaggtgggcatcgtgggccgcactggagctgggaagagctccatgaccctgtgcctcttccgcatcctggaggccgccaagggggagatcagaattgatggcctgaatgtggccgacatcggcctgcatgacctgcggagccagctgaccatcatcccccaggaccccatcctcttcagcggcaccctgaggatgaacctggaccccttcggcagctacagcgaggaggacatctggtgggccctggagctgagccacctgcacacctttgtgagcagccagcctgctggcctggacttccagtgcagcgagggcggggagaacctgtctgtgggccagaggcagctggtgtgcctggcccgggccctgctgaggaagagccgcatcctggtgctggatgaggccacagctgccatcgacctggagacagacaacctgatccaggccaccatccgcacccagtttgacacctgcaccgtgctgaccatcgcccaccggctgaacaccatcatggactacaccagggtgctggtgctggacaagggcgtggtggccgagtttgacagccctgccaacctgattgctgcccggggcatcttctacggcatggccagagatgctggcctggcctag

SEQ ID NO: 140753 - DNA, 3717 bp, Artificial Sequence
  derived and/or modified sequence
atggatgccctgtgtggcagcggggagctgggcagcaagttctgggacagcaacctgtctgtgcacacagagaacccagacctgaccccctgcttccagaacagcctgctggcctgggtgccctgcatctacctgtgggtggccctgccctgctacctgctgtacctgcggcaccactgccggggctacatcatcctgagccacctgagcaagctgaagatggtgctgggcgtgctgctgtggtgtgtgtcctgggccgacctcttctacagcttccacggcctggtgcacggccgggccccagcccctgtgttctttgtgacccccctggtggtgggcgtgaccatgctgctggccaccctgctgatccagtatgagcggctgcagggcgtgcagagcagcggcgtgctgatcatcttctggttcctgtgtgtggtgtgtgccatcgtgcccttccgcagcaagatcctgctggccaaggccgagggggagatcagtgaccccttccgcttcaccaccttctacatccactttgccctggtgctgagcgccctgatcctggcctgcttccgggagaagccacccttcttcagcgccaagaatgtggaccccaacccctacccagagaccagcgctggcttcctgagccgcctcttcttctggtggttcaccaagatggccatctacggctaccgccaccccctggaggagaaggacctgtggagcctgaaggaggaggacaggagccagatggtggtgcagcagctgctggaggcctggaggaagcaggagaagcagacagcccggcacaaggccagcgctgcccctgggaagaatgccagcggagaagatgaggtgctgctgggcgcccggccccggcccaggaagcccagcttcctgaaggccctgctggccaccttcggcagcagcttcctgatcagcgcctgcttcaagctgatccaggacctgctgtccttcatcaacccccagctgctgagcatcctgatccgcttcatcagcaaccccatggcccccagctggtggggcttcctggtggccggcctgatgttcctgtgcagcatgatgcagagcctcatcctgcagcactactaccactacatctttgtgactggagtgaagttcagaacaggcatcatgggcgtcatctacaggaaggccctggtgatcaccaacagcgtgaagagggccagcacagtgggggagatcgtgaacctgatgtctgtggatgcccagcgcttcatggacctggcccccttcctgaacctgctgtggagcgcccccctgcagatcatcctggccatctacttcctgtggcagaacctgggccccagcgtgctggccggcgtggccttcatggtgctgctgatccccctgaatggagctgtggccgtgaagatgagggccttccaggtgaagcagatgaagctgaaggacagccgcatcaagctgatgtctgagatcctgaatggcatcaaggtgctgaagctgtatgcctgggagcccagcttcctgaagcaggtggagggcatccggcagggcgagctgcagctgctgaggacagctgcctacctgcacaccaccaccaccttcacctggatgtgcagccccttcctggtgaccctcatcaccctgtgggtgtatgtgtatgtggaccccaacaacgtgctggatgctgagaaggcctttgtgtctgtgtccctcttcaacatcctgcggctgcccctgaacatgctgccccagctgatcagcaacctgacccaggcctctgtgtccctgaagaggatccagcagttcctgagccaggaggagctggacccccagagcgtggagaggaagaccatcagccctggctacgccatcaccatccacagcggcaccttcacctgggcccaggacctgccccccaccctgcacagcctggacatccaggtgcccaagggggccctggtggccgtggtgggccctgtgggctgcggcaagagcagcctggtgtctgccctgctgggggagatggagaagctggagggcaaggtgcacatgaagggctctgtggcctacgtgccccagcaggcctggatccagaactgcaccctgcaggagaatgtgctgtttgggaaggccctgaaccccaagcgctaccagcagaccctggaggcctgtgccctgctggccgacctggagatgctgcctggaggagaccagacagagatcggggagaagggcatcaacctgagcggcggccagaggcagagggtgtccctggcccgggctgtgtacagtgatgctgacatcttcctgctggatgaccccctgtctgctgtggacagccacgtggccaagcacatctttgaccacgtgattggccctgagggcgtgctggccggcaagaccagggtgctggtgacccacggcatctccttcctgccccagacagacttcatcatcgtgctggctgatggccaggtgtctgagatgggcccctacccagccctgctgcagagaaatggcagctttgccaacttcctgtgcaactatgccccagatgaggaccagggccacctggaggacagctggacagccctggagggcgctgaggacaaggaggccctgctgattgaggacaccctgagcaaccacacagacctgacagacaatgaccctgtgacctacgtggtgcagaagcagttcatgaggcagctgagcgccctgagcagtgatggagagggccagggccggcctgtgcccaggaggcacctgggccccagcgagaaggtgcaggtgacagaggccaaggcagatggagccctgacccaggaggagaaggccgccatcggcaccgtggagctgtctgtgttctgggactatgccaaggctgtgggcctgtgcaccaccctggccatctgcctgctgtatgtgggccagagcgctgctgccatcggggccaacgtgtggctgagcgcctggaccaatgatgccatggctgacagccggcagaacaacaccagcctgcggctgggcgtgtatgctgccctgggcatcctgcagggcttcctggtgatgctggccgccatggccatggctgctgggggcatccaggccgcccgggtgctgcaccaggccctgctgcacaacaagatccgcagcccccagagcttctttgacaccaccccatctggccgcatcctgaactgcttcagcaaggacatctacgtggtggatgaggtgctggcccctgtgatcctgatgctgctgaacagcttcttcaatgccatcagcaccctggtggtgatcatggccagcacccccctcttcaccgtggtgatcctgcccctggccgtgctgtacaccctggtgcagcgcttctacgccgccaccagccggcagctgaagaggctggagagcgtgagccgcagccccatctacagccacttcagcgagaccgtgactggagccagcgtcatccgggcctacaacagaagccgggactttgagatcatcagtgacaccaaggtggatgccaaccagaggagctgctacccctacatcatcagcaacagaagtgaggccgccagcctggccccctgcagcagcaggaacagccagcaggccctgtggtgcagcggcagcctgagcctgctgagccccaagcagaagacaggccctgccctgcccctgccccacttcctgctgatctag

SEQ ID NO: 140754 - DNA, 4584 bp, Artificial Sequence
  derived and/or modified sequence
atggacgccctgtgcggcagcggcgagctgggcagcaagttctgggattcaaacctcagtgtgcacaccgagaatcctgaccttactccttgttttcagaacagcctgctggcctgggtcccctgcatctacctgtgggtggctctgccctgctatttgctctatctccggcaccactgtcgtgggtacattatattgtcccatttgagcaagctgaaaatggtcctgggggttctcttgtggtgtgtctcctgggccgacttgttttatagcttccatggtctggtccatggccgggccccagccccggtgttcttcgtcaccccactagtggtgggcgtgaccatgttgctagctactttactgatccagtatgaacggctgcagggcgtccaatcaagcggcgtcctcattatcttctggttcctgtgcgttgtgtgtgctattgtccccttccggtcaaaaattctgctcgctaaggcggagggggaaataagtgaccctttcaggttcacaactttttacattcacttcgccctggtgctcagtgccctgattttggcctgtttcagggagaagccaccgttcttctctgccaaaaatgtggatcctaatccttacccggagactagcgcggggtttttgtccaggctttttttctggtggtttacaaagatggctatctatggatatcgtcaccctctagaggaaaaagatctgtggtcactgaaggaagaagacagatctcagatggtggtgcagcagttgctggaggcctggcggaaacaagaaaagcagacagcacggcacaaggcatcagctgccccaggcaagaacgctagtggcgaggatgaagtgctcctcggggctcgccctagacccaggaaaccgtcatttctgaaggccttactcgcaaccttcggctcctcattcctcataagcgcatgcttcaagttgatccaggacctgctgtcgttcataaacccacaactgctgtcgattctgattcggtttatttctaaccctatggccccatcttggtggggattcctggtcgctggactgatgtttttatgctcaatgatgcaatcgctcatattgcagcactattatcattatatttttgtaacgggggtgaaattcagaactggtatcatgggcgtgatttacagaaaggcattggtaatcactaattctgtgaagagagcaagcactgtgggcgaaatagtgaacctcatgagcgtcgatgcacagaggttcatggacctcgcgccctttctaaacctgctgtggagtgcgccgcttcagattattcttgccatctacttcctgtggcagaatttgggcccttctgtgctggctggggtggccttcatggttctccttatcccccttaacggcgccgttgccgtgaagatgagagcttttcaggtgaagcagatgaagctcaaggattctcgtattaagctcatgtctgagatcctcaacgggataaaggtcctaaagctttacgcttgggagccctctttcctcaagcaggttgagggtatccgccagggtgagctccagctgctaaggacagccgcctatttacatacgaccacgacgtttacctggatgtgtagcccattcttggtgaccctcatcacgctgtgggtctacgtgtatgttgaccctaacaatgtgctggatgctgagaaggcctttgtcagtgtgagtctctttaacatcctaagactacccctgaatatgctcccccagctgatttctaatctgactcaggcttctgtgtccctcaaaagaattcagcagttcttgtctcaggaagagctagaccctcaatcagtagagagaaaaactatctctccggggtacgcaataaccattcacagcgggaccttcacctgggcccaagatctgccacccaccctccatagcctcgatatccaagtacccaaaggtgcattggtggcagttgtcggtcctgtgggctgtgggaaatcttcgctggtgagcgctctattgggagaaatggaaaaactcgaaggcaaagttcacatgaaaggttctgtcgcttatgtgccacaacaggcctggatccagaattgtaccttacaggagaatgtgttgttcggaaaagcactcaacccaaagaggtaccaacaaacactcgaagcgtgcgccctactcgccgaccttgagatgctgcctgggggtgatcaaaccgagataggggagaaaggaattaatcttagtggcgggcagagacaaagagtcagcctggctagagccgtgtatagcgatgcggatatcttcttgctcgatgaccccctgtccgccgtcgattcccacgtcgcgaagcacattttcgaccatgtgattggtcctgagggagtgcttgccggtaagaccagagtcttggttacccatggcataagcttcctgccccagaccgattttattatcgtcctggcagatggccaagtttcagagatgggcccatacccagccttgctgcagcggaacggttcctttgccaacttcctttgcaattacgcccctgatgaggaccaaggtcatctggaggattcctggaccgccctggaaggagccgaagacaaggaggcgttactaattgaggataccctgtcgaatcacaccgatttgaccgataatgaccccgtgacgtatgttgtacagaagcagtttatgagacagctgtctgccctgagttcagatggggaaggccaggggagacctgtgcctcggcgccacctgggaccctcggaaaaggtacaggtgaccgaagcaaaagccgacggggctctgacccaggaggaaaaagccgccattgggacagtagagctgagcgttttctgggattacgcgaaggccgtgggcctatgcaccacactggccatctgtctgctctacgtcggtcagtcggctgccgctattggagcgaatgtctggctgtctgcctggactaatgatgccatggcggattctagacagaacaacacatctcttcgactcggtgtgtatgcagctctcgggattctgcaaggcttcctggtgatgttagccgccatggcaatggcggctggtgggattcaggcggctcgggtcctgcaccaggcgttactgcacaacaaaatcaggagccctcagtcattttttgatactactccaagtggtaggatcctgaactgcttctccaaagacatctacgtggtggatgaagttcttgcacccgtgatcttaatgcttctgaactcgttctttaacgccattagtaccctggtggtgatcatggcatccactcctctctttactgtggtgatccttcccctggccgtgttatatacactggtacagagattttacgccgccacttccaggcagttaaagaggctggaatctgtctcacgaagccctatttactcccacttctcagaaacagtgactggagcctccgtgatccgtgcgtacaatagaagtagagatttcgagattatctccgacaccaaggtagatgccaaccagcgtagctgctatccctatattattagcaaccgctggctctccatcggcgtggagtttgtcgggaattgtgttgtactatttgcagcactgttcgcagtgattgggagatcctccctgaatcccggattggtcggcctttccgtatcctattctctccaggtcacattcgctctgaattggatgatccggatgatgtcagatcttgagtctaacattgtggctgttgagagggtaaaggaatactctaagactgagacggaggctccatgggtggtggagggctctagaccccctgagggatggccaccaagaggagaggtagaattcagaaactacagtgtacggtatcgaccaggcctggacctcgtcctgagggatttaagtctgcacgtgcatggtggcgagaaagttggcattgtgggcagaacaggagcaggaaagtcctccatgactctgtgcctttttagaattctggaagctgctaagggagagatcagaatcgatgggttgaacgtggccgacatcggcctccatgatctgagaagtcagctgacaataattccacaggacccaattctgttttccggcactctgcgaatgaatctcgaccccttcggctcctactcagaggaggatatttggtgggccctggaactttcacacctccacactttcgtgtctagccaaccagccggcctggacttccagtgttctgaaggtggggaaaatttaagtgtcggccagcggcaactcgtgtgcttggctagggccctgctgcgcaagtccaggatcctggtcttagacgaggccactgccgcaattgatctagaaactgacaacctgatccaggcaactatacgcacccaattcgacacgtgtactgtactgacaatcgctcaccggttgaacaccatcatggactatacccgtgttttggtactggacaagggcgtagttgccgagttcgactccccagccaatttgatcgcggccagaggcattttttatgggatggcccgggacgcagggctcgcctag

SEQ ID NO: 140755 - DNA, 3717 bp, Artificial Sequence
  derived and/or modified sequence
atggacgccctgtgcggcagcggcgagctgggcagcaagttctgggactctaatttgtctgtccatacagaaaatcccgatctcacaccgtgctttcagaacagccttctcgcctgggtgccctgtatttatctctgggtggcactgccatgctacctgctgtatctgcgacatcattgccggggatacataatcctgtctcacttatctaaactcaagatggtactaggggttttgctgtggtgcgttagttgggccgatctgttctattcctttcacggacttgtgcacgggcgggcgccagcccctgtgttcttcgtgaccccactcgtggtgggggttaccatgctcctcgccactctgcttatccaatatgaacgtttgcaaggagttcagagctctggcgtgctcattattttctggttcttatgcgtagtttgcgccatagtccctttcaggagtaaaattttattggcgaaggctgaaggggagatctcagatccatttagatttacaacattttacattcacttcgcgctcgtcctgtcggcactgatcctcgcctgttttcgagagaagccccccttcttttcagccaagaatgtagatcccaacccgtacccggagacatctgcaggcttcttgtcgcggctgttcttctggtggttcacaaagatggcaatttacgggtaccgccacccacttgaggagaaagacttgtggagcctgaaggaggaggaccggagccagatggtagtccagcaactcttggaagcgtggaggaaacaggaaaagcagacggccaggcataaggcgtccgcagccccagggaaaaatgctagcggagaagatgaggtacttctgggcgcacggcctaggcctcgcaaacccagttttctaaaagccctgctcgccacgttcggttcctcgttcctgatatccgcttgctttaagctcatccaagacctactgagcttcatcaacccacagctgttatcgatcctcattcgcttcataagcaaccccatggccccttcgtggtggggatttctcgtggccggattgatgtttctgtgctcaatgatgcagtccctgattttgcaacactactatcactatatcttcgtcaccggagtcaagtttcgcaccggcattatgggggtgatctatcgcaaggccttggttattaccaatagcgtcaagcgggccagcacagtgggcgagattgtgaatctgatgagcgtcgacgctcagcggtttatggacctggctccctttctgaacttgttatggtccgcccctctgcagattatactggctatctatttcctgtggcagaatctgggccccagcgtgttggcaggagtcgcgttcatggtgttgctaattcccctgaatggtgctgtggccgttaaaatgcgggcctttcaggttaagcaaatgaaactgaaagactcacggataaaattgatgtccgagatcctaaacggaatcaaggtgctgaagttatacgcttgggagccttcattcctcaagcaagtcgagggtatcaggcagggagaactgcagttactcaggactgccgcctacctccacacaactacgacatttacatggatgtgttcccctttcctcgtcacgctgatcacgctgtgggtatacgtatacgtggaccctaacaacgtgctggacgctgagaaggctttcgtgtctgtctccctgtttaacatattaaggctgccccttaacatgctcccccagctgattagcaacctgacacaggcctctgtgagtttgaaacgaattcagcagttcttatcacaggaagaattggacccacagtctgtcgaacggaaaaccatctccccgggctatgctataacaatccacagtggtacatttacgtgggctcaggacctgcctccaacattacacagcctagacatccaggtgccaaagggggcactggtcgccgtcgttgggccagtaggctgcgggaagagctctctcgtcagtgccttgttaggggaaatggaaaagctggagggcaaagtccacatgaaagggagtgtggcatatgtgccacagcaagcgtggatccaaaactgtacactgcaggagaacgtactgttcggcaaagctctgaaccctaagcggtaccagcagacgctggaggcatgcgccttgctcgccgacctggagatgttgcctggcggcgaccagacggaaatcggcgagaagggcataaacttgagcggtggccagcggcaacgagtatccttggcccgcgcagtgtactctgatgccgatatctttctcctcgatgatccactgtctgccgttgactctcatgtggccaagcacatattcgaccatgtgataggcccagagggcgtgcttgccgggaagactagagtgctcgtgacacatggcatctcattcctgcctcaaaccgacttcatcattgttctggccgatgggcaagtctcagaaatggggccatatcccgcgctgttacagcgtaatggctctttcgctaattttctgtgcaactacgctccggatgaagaccagggccatttggaggactcatggactgccttggagggagccgaagataaggaagccctgcttatcgaagacacgttgagcaaccatacagaccttacggacaatgatcccgtcacctatgttgtgcaaaaacagtttatgcggcagctgagtgctctgagttcggacggtgagggtcagggcagaccagttccaagaaggcaccttggaccatcggagaaggtgcaagtgactgaggctaaagctgacggcgccctaacccaagaagagaaggccgccatcggaactgtagagctgagcgtgttctgggactatgccaaagccgttggcctgtgcactactcttgcgatctgtctactgtatgtaggccaatcggcagccgctatcggtgctaatgtgtggctcagcgcatggacaaacgatgcaatggccgattcaaggcaaaacaatacatctctccggctgggcgtttatgccgccttgggcattcttcagggttttttagtaatgctggcagccatggcaatggctgccggcggaatacaggctgcacgcgtgttgcatcaggcactgttgcataacaagatccgcagcccgcagtcctttttcgacacaaccccttctggcaggatcctcaactgcttttcgaaggacatctacgtggtcgacgaggttctcgccccagtgattttaatgctcttgaactccttttttaacgccatcagcactctagtcgtgattatggcctccacaccactatttactgttgtcattctgcccctggcagttctctacactctcgtgcagcgattttacgcagctaccagccgacagctgaaacgcttggaatctgtcagcagaagccccatctactctcacttctcagagactgtgacaggcgcctccgtgatccgcgcttataatcgatctcgcgattttgaaattatctctgatactaaggtggacgccaatcagcggtcttgctacccgtatatcattagcaaccgctccgaggcagcgtctctcgcgccctgctcctcgcgcaatagccagcaagctctttggtgtagcgggtctttaagcctgctaagcccaaagcagaagacgggccctgcgctccccctgccacattttctcctcatatag

SEQ ID NO: 140756 - DNA, 4584 bp, Artificial Sequence
  derived and/or modified sequence
atggatgctctttgtggttctggggagctcgggtccaagttctgggattccaacctctccgtgcatacggagaatccagacttgaccccttgttttcagaactcgttactggcgtgggtcccatgcatttacctctgggtcgcgctcccctgctatctcctgtacttaaggcaccactgtcggggttacattattctctctcacctcagtaaactaaaaatggtccttggagtattgttgtggtgcgtaagttgggctgatttattctacagtttccacggactggttcacggcagagcacccgctcccgtgttctttgttactcccctggtggtcggcgtcaccatgttactggccaccctccttatccaatatgagcggcttcagggtgtgcagtcatcaggcgtgcttataatcttctggttcttgtgcgtcgtctgtgctatcgtgcctttcagaagcaagatcctgttagccaaggccgagggggagattagcgacccattcagattcactacattttacatccatttcgcgctcgttctctcagcgctgattctggcctgtttccgcgaaaagccacccttcttcagtgctaagaacgtcgatcccaatccttacccagaaacttcagcaggattcttgtcgcggctttttttctggtggtttacgaagatggccatctatggctatcggcatccgcttgaggaaaaggatctgtggtcccttaaggaagaagacaggtcgcaaatggtcgtccaacagctcttagaggcttggcgcaagcaggaaaagcaaaccgcacgccacaaagctagcgccgctccaggaaaaaacgctagtggagaggatgaagtgctgcttggcgcacgcccacgaccccgaaagccaagtttcctgaaggctctacttgcaacgttcggaagctccttcctcatatctgcctgctttaaattaatccaggaccttttatcgtttattaatcctcagctgttaagcatactgatcagatttatcagcaatcccatggcgccttcgtggtggggattcctggtggcgggactgatgttcctgtgttcaatgatgcaatctcttatcctccagcactactatcattacatatttgtgactggcgtgaaatttcggacaggtattatgggtgttatctatcggaaggcactggtgataactaacagcgtgaaacgtgccagcaccgttggggagattgtcaacctgatgtccgtggatgcccagcggtttatggacctggcaccctttctgaacctgctatggagcgcaccactacagatcattctagcaatctactttctgtggcagaatctgggaccatctgtcctcgctggggtggcatttatggtgttgctgattccactcaacggggcagtggcggtcaagatgagagcatttcaggttaagcagatgaaactgaaggatagccgcattaagctcatgtccgaaatccttaacggcatcaaagtcctgaaactatacgcatgggagccctcctttctgaaacaagtagagggaatccggcagggagagctccagctgctgagaacagctgcctacctgcataccacaaccacgtttacatggatgtgtagccctttcttagtcacccttataactttatgggtgtacgtctatgtggatcccaacaatgtcttggatgctgaaaaagcatttgtgtcggtgtctttgtttaacatcttgcgactccccctgaatatgctgcctcagctgataagtaaccttactcaagcctccgtcagcctcaaacggatacaacagttcctgagccaagaagagctggacccacaaagtgtggaacgcaaaaccatcagtcctggatatgccatcaccatccactctgggaccttcacatgggctcaggacctcccaccaacactgcatagcctcgatatccaggtgccaaaaggcgcacttgttgcagtagtcgggccagtggggtgcgggaaatcaagtctggtgtcagctcttctgggggagatggagaaactcgagggcaaggtgcacatgaaaggttctgtagcctatgtgccccagcaggcatggatacagaattgtacattgcaggagaatgtgctttttggcaaggccctcaacccaaagcgataccagcagactcttgaggcctgtgcactgctggccgatctcgaaatgctgccaggcggagatcagactgagattggtgagaaaggtattaatttatctggcggtcagagacagagagtcagtctcgcgagagccgtgtattcagacgctgatatatttctccttgatgatccgttatcggcagtggattcccacgtcgccaaacatatctttgaccacgttatcggaccggaaggcgtgctggccggaaaaacccgagtcttggtaacgcatggaatctcctttcttccacagactgacttcatcattgtcctcgcagatggacaggtttccgaaatggggccatatccggctctgctgcagagaaatggatccttcgctaacttcctgtgtaactatgcacctgatgaggatcagggccatctagaggatagctggactgctttagagggcgcagaggacaaagaagcactgttgatcgaagatacccttagtaaccatacagacctcactgataacgatcctgtgacatatgtcgttcaaaaacagtttatgcgtcagctcagcgcactgtcatccgacggcgaaggccaaggcagaccagtccccagaaggcatctgggccctagcgagaaagttcaggtgactgaggcaaaggccgacggagctctgacccaggaagagaaagctgctatcggtactgtggagctttcagtgttttgggactacgccaaggcagtggggctttgcacaaccctggccatctgtttgctgtacgtcggacagtctgcagcagccatcggcgcaaatgtgtggctaagtgcctggactaatgacgccatggccgatagccgacagaacaatacaagcctgaggctgggcgtgtacgctgctctaggcattctgcaaggatttcttgtgatgctcgctgccatggccatggccgcaggaggtattcaggcagcccgtgtgctacatcaggccctgctgcataataagattcgttctccccagtcatttttcgataccactccatcagggaggattctaaattgtttctctaaggatatatatgtggttgacgaagtcctcgcgcctgtgattctgatgctgctaaatagcttttttaatgctatctcaaccctggtcgtgattatggcctcaacccctctgtttacggttgtaattctgcccttagcggtcctgtatacccttgtccaaagattttatgcagcaaccagtaggcaattaaagcgcctggagtccgtcagtcgctcccccatatattcccacttctctgagactgtgacaggggcaagcgtgatcagggcttataaccggagtcgggactttgagatcatctccgacacaaaggtggacgctaatcaacgctcctgctacccctatattatcagcaatcgatggcttagtatcggcgtggaattcgtcgggaactgtgtggtgctctttgcagccttgttcgctgtgataggaaggtcctcccttaatccaggcctggttggactgagcgtcagctattccctgcaggtgactttcgccctaaattggatgataagaatgatgagcgatctcgagagtaacattgttgctgtcgagagagtcaaagaatattccaaaactgaaacggaggccccttgggtagtggagggctccaggcctcctgagggctggcctccccgtggggaagtagagtttagaaattattccgtcagataccgccctggactggacctcgtgctacgcgatttatctctgcatgtgcacgggggagaaaaggttggaatagttggtagaactggggctggaaagtccagcatgacactgtgtctgtttcgaatattggaggccgctaagggggaaattcggatagatggactgaatgtcgcagacatcggccttcacgacctgaggtcccaactgactattatcccccaagatcccatactcttttctggcacgttgagaatgaatctcgacccatttgggtcgtactccgaggaggacatctggtgggccctggagttatcacacctgcatacatttgtctcaagtcaacctgcaggattggatttccaatgcagcgaagggggagaaaatctgagtgtcggacagaggcagctggtttgcctggctcgcgcactgttgcgaaagtcccgtattttggtgctggacgaggctaccgcagcgattgatctggagactgacaatttaattcaggctacaattagaacccagttcgacacatgtaccgtcctaaccatcgcccaccgcctcaatacaatcatggattatacaagagttcttgtcctggataagggagttgtggcagagtttgacagccccgcaaaccttatcgccgcaaggggtattttctatggaatggctcgagacgcgggactggcatag

SEQ ID NO: 140757 - DNA, 3717 bp, Artificial Sequence
  derived and/or modified sequence
atggacgcactctgcggatctggagagctcggctccaagttctgggactctaacctttctgttcataccgaaaatcccgatctgactccgtgctttcaaaacagcctgctggcctgggtgccatgtatctatctctgggtcgcactaccctgttatttgctgtacctacgacaccattgccgaggctacattattctgtctcatctgagcaaacttaaaatggtgttgggtgtactcctgtggtgtgtgagttgggccgacctgttctactcttttcatgggcttgtgcacgggcgagcaccagcacccgtattttttgttacccctctggtcgtcggtgtgacaatgctcttagcgaccctgttaattcagtatgagagactacagggcgtgcaatcttcgggcgtgcttattatcttttggtttctctgcgtcgtgtgtgcaatagtcccgtttcgctcaaaaattctcctcgccaaggcagagggggagatttcggacccctttcggttcacaacattttacatccattttgcactggtgctcagtgctctcatactggcgtgttttcgggagaagccaccttttttttcggccaaaaacgtggacccaaatccctatcctgagactagtgcaggcttcctgtctcggctgtttttttggtggtttaccaaaatggcgatatacggctatcggcaccctctggaagagaaggatttgtggagtctgaaagaagaggatcggtcccaaatggtcgtacagcagctccttgaagcatggaggaaacaggaaaaacagacggccaggcataaggcctcagctgccccagggaaaaacgcttctggagaggatgaagtccttctgggagcaagaccaagacccagaaagccctccttcctcaaggctctccttgcaacttttgggagctctttcttaatatccgcctgcttcaaactaatccaggatttgctgtcctttatcaacccacaactgttgtccattttgatcagatttatcagcaaccctatggctccttcttggtggggcttcctggtggccggtctgatgttcctctgttccatgatgcaaagcctgatcctgcagcattattatcattatattttcgttacaggggttaaattccgaacaggcataatgggggttatctataggaaagcgctcgtgatcacaaatagcgtgaagcgggcatcaaccgtgggcgaaatcgttaatttaatgagcgtggatgcccagcggtttatggacctggcccctttcctgaatctgctgtggagcgcacccctccagataatcctcgccatctacttcctgtggcagaacctggggccatccgtgctagccggtgtcgcttttatggttttgctgattccactgaacggtgctgtggctgttaagatgcgtgcttttcaagtaaaacaaatgaagttgaaggatagccgaattaaactgatgtccgagattctcaatggcataaaggtcttgaagctatatgcatgggagccctcattcctgaagcaggtcgagggcattcgccaaggggagctgcagctcctgagaactgcagcctacctgcacacaactaccaccttcacctggatgtgtagcccctttctggtaacattaattacgctatgggtgtacgtgtacgtggatcctaataacgtcctggacgcggagaaagcattcgtcagcgtgtccctgttcaacatcctccggctgcctctgaatatgctgccccagttgatttcaaatctcacccaggcgtccgtgagccttaagcggatccaacaattcctgagccaagaggagctcgacccccagtcagttgagcggaagacaatcagccccggttacgcaataactattcattccggcacatttacttgggcgcaggatctcccccctactctgcacagcctggatatccaggtgccaaaaggggctttggtcgctgtcgttggccctgtgggctgtgggaaatcctctttggtctctgcactcttgggcgaaatggaaaagcttgagggaaaggtccatatgaaagggtctgtagcatatgtccctcagcaggcctggatccaaaattgcaccctccaggaaaacgtcctgttcgggaaggctttgaatccaaagcgatatcagcagacactagaagcttgtgctctgttggcagacctggagatgctgcccggaggagaccagactgagattggcgaaaagggaataaacctgagtggaggacagcggcagcgtgtctccttggctcgcgctgtttacagcgacgccgatatcttcctcctggatgatccattgtctgccgtcgactcccatgttgccaaacatatctttgaccacgtcataggccctgagggtgtactggccggaaaaacacgcgtcttagttacacacggcattagcttcctgcctcagactgacttcatcatagtcctagccgatggacaggtaagcgaaatgggtccttatcccgctcttttgcagagaaatgggagcttcgccaatttcctctgtaactacgctcccgatgaagaccaaggccacctggaagactcttggacggcactcgagggtgcagaggataaggaagcactcttgatcgaagataccttaagcaatcacacagatctcacagacaacgacccggtgacatacgtcgtgcagaagcagtttatgaggcagttgtccgctctttctagcgacggggagggtcagggcaggccagtgcctcgcagacacctgggcccaagtgagaaggtgcaggtgacagaagctaaagcggatggggctctgacccaggaagagaaggcagctatcggaactgtggaactgagcgttttctgggactacgcaaaggctgtagggctgtgcactaccctcgcaatctgtctgctctatgttggccagtccgcagcagccatcggggctaacgtgtggctcagtgcttggacgaacgacgcaatggctgacagccgacaaaataatactagcctaagattgggagtatatgccgcactggggattctgcagggattcctggtcatgctggctgctatggctatggccgcaggcggtatccaggctgccagggttctgcaccaggccctcctgcacaataagatcaggagcccgcagagcttttttgatactactccctcgggacgcatattaaactgtttcagtaaagacatatacgttgttgacgaggtgcttgcacctgtaatcttgatgttactcaacagtttttttaatgccatctccaccctcgtcgtcatcatggctagcactcctttgtttactgtggttattctgcctttggctgttctttatacactcgttcagaggttttatgcagctacatctaggcaactgaagcggctggaaagtgtgagccgttcccccatttatagtcacttttccgaaaccgtcaccggcgcttccgtgatccgagcttacaatcgttcccgggatttcgagataatctcagataccaaggtggatgccaaccagcgctcatgctatccttatattattagcaatcggagcgaagctgccagtctcgccccttgtagttcccgaaactcccaacaggccctctggtgttctggctcactatcattactgagtcccaagcagaaaacaggacccgctctgcccctccctcacttccttctgatctag

SEQ ID NO: 140758 - DNA, 5166 bp, Artificial Sequence
  derived and/or modified sequence
gcggaggcggctccggcgcccgctctgcccgccgctgggtccgaccgcgctcgccttccttgcagccgcgcctcggccccatggacgccctgtgcggttccggggagctcggctccaagttctgggactccaacctgtctgtgcacacagaaaacccggacctcactccctgcttccagaactccctgctggcctgggtgccctgcatctacctgtgggtcgccctgccctgctacttgctctacctgcggcaccattgtcgtggctacatcatcctctcccacctgtccaagctcaagatggtcctgggtgtcctgctgtggtgcgtctcctgggcggaccttttttactccttccatggcctggtccatggccgggcccctgcccctgttttctttgtcacccccttggtggtgggggtcaccatgctgctggccaccctgctgatacagtatgagcggctgcagggcgtacagtcttcgggggtcctcattatcttctggttcctgtgtgtggtctgcgccatcgtcccattccgctccaagatccttttagccaaggcagagggtgagatctcagaccccttccgcttcaccaccttctacatccactttgccctggtactctctgccctcatcttggcctgcttcagggagaaacctccatttttctccgcaaagaatgtcgaccctaacccctaccctgagaccagcgctggctttctctcccgcctgtttttctggtggttcacaaagatggccatctatggctaccggcatcccctggaggagaaggacctctggtccctaaaggaagaggacagatcccagatggtggtgcagcagctgctggaggcatggaggaagcaggaaaagcagacggcacgacacaaggcttcagcagcacctgggaaaaatgcctccggcgaggacgaggtgctgctgggtgcccggcccaggccccggaagccctccttcctgaaggccctgctggccaccttcggctccagcttcctcatcagtgcctgcttcaagcttatccaggacctgctctccttcatcaatccacagctgctcagcatcctgatcaggtttatctccaaccccatggccccctcctggtggggcttcctggtggctgggctgatgttcctgtgctccatgatgcagtcgctgatcttacaacactattaccactacatctttgtgactggggtgaagtttcgtactgggatcatgggtgtcatctacaggaaggctctggttatcaccaactcagtcaaacgtgcgtccactgtgggggaaattgtcaacctcatgtcagtggatgcccagcgcttcatggaccttgcccccttcctcaatctgctgtggtcagcacccctgcagatcatcctggcgatctacttcctctggcagaacctaggtccctctgtcctggctggagtcgctttcatggtcttgctgattccactcaacggagctgtggccgtgaagatgcgcgccttccaggtaaagcaaatgaaattgaaggactcgcgcatcaagctgatgagtgagatcctgaacggcatcaaggtgctgaagctgtacgcctgggagcccagcttcctgaagcaggtggagggcatcaggcagggtgagctccagctgctgcgcacggcggcctacctccacaccacaaccaccttcacctggatgtgcagccccttcctggtgaccctgatcaccctctgggtgtacgtgtacgtggacccaaacaatgtgctggacgccgagaaggcctttgtgtctgtgtccttgtttaatatcttaagacttcccctcaacatgctgccccagttaatcagcaacctgactcaggccagtgtgtctctgaaacggatccagcaattcctgagccaagaggaacttgacccccagagtgtggaaagaaagaccatctccccaggctatgccatcaccatacacagtggcaccttcacctgggcccaggacctgccccccactctgcacagcctagacatccaggtcccgaaaggggcactggtggccgtggtggggcctgtgggctgtgggaagtcctccctggtgtctgccctgctgggagagatggagaagctagaaggcaaagtgcacatgaagggctccgtggcctatgtgccccagcaggcatggatccagaactgcactcttcaggaaaacgtgcttttcggcaaagccctgaaccccaagcgctaccagcagactctggaggcctgtgccttgctagctgacctggagatgctgcctggtggggatcagacagagattggagagaagggcattaacctgtctgggggccagcggcagcgggtcagtctggctcgagctgtttacagtgatgccgatattttcttgctggatgacccactgtccgcggtggactctcatgtggccaagcacatctttgaccacgtcatcgggccagaaggcgtgctggcaggcaagacgcgagtgctggtgacgcacggcattagcttcctgccccagacagacttcatcattgtgctagctgatggacaggtgtctgagatgggcccgtacccagccctgctgcagcgcaacggctcctttgccaactttctctgcaactatgcccccgatgaggaccaagggcacctggaggacagctggaccgcgttggaaggtgcagaggataaggaggcactgctgattgaagacacactcagcaaccacacggatctgacagacaatgatccagtcacctatgtggtccagaagcagtttatgagacagctgagtgccctgtcctcagatggggagggacagggtcggcctgtaccccggaggcacctgggtccatcagagaaggtgcaggtgacagaggcgaaggcagatggggcactgacccaggaggagaaagcagccattggcactgtggagctcagtgtgttctgggattatgccaaggccgtggggctctgtaccacgctggccatctgtctcctgtatgtgggtcaaagtgcggctgccattggagccaatgtgtggctcagtgcctggacaaatgatgccatggcagacagtagacagaacaacacttccctgaggctgggcgtctatgctgctttaggaattctgcaagggttcttggtgatgctggcagccatggccatggcagcgggtggcatccaggctgcccgtgtgttgcaccaggcactgctgcacaacaagatacgctcgccacagtccttctttgacaccacaccatcaggccgcatcctgaactgcttctccaaggacatctatgtcgttgatgaggttctggcccctgtcatcctcatgctgctcaattccttcttcaacgccatctccactcttgtggtcatcatggccagcacgccgctcttcactgtggtcatcctgcccctggctgtgctctacaccttagtgcagcgcttctatgcagccacatcacggcaactgaagcggctggaatcagtcagccgctcacctatctactcccacttttcggagacagtgactggtgccagtgtcatccgggcctacaaccgcagccgggattttgagatcatcagtgatactaaggtggatgccaaccagagaagctgctacccctacatcatctccaaccggtggctgagcatcggagtggagttcgtggggaactgcgtggtgctctttgctgcactatttgccgtcatcgggaggagcagcctgaacccggggctggtgggcctttctgtgtcctactccttgcaggtgacatttgctctgaactggatgatacgaatgatgtcagatttggaatctaacatcgtggctgtggagagggtcaaggagtactccaagacagagacagaggcgccctgggtggtggaaggcagccgccctcccgaaggttggcccccacgtggggaggtggagttccggaattattctgtgcgctaccggccgggcctagacctggtgctgagagacctgagtctgcatgtgcacggtggcgagaaggtggggatcgtgggccgcactggggctggcaagtcttccatgaccctttgcctgttccgcatcctggaggcggcaaagggtgaaatccgcattgatggcctcaatgtggcagacatcggcctccatgacctgcgctctcagctgaccatcatcccgcaggaccccatcctgttctcggggaccctgcgcatgaacctggaccccttcggcagctactcagaggaggacatttggtgggctttggagctgtcccacctgcacacgtttgtgagctcccagccggcaggcctggacttccagtgctcagagggcggggagaatctcagcgtgggccagaggcagctcgtgtgcctggcccgagccctgctccgcaagagccgcatcctggttttagacgaggccacagctgccatcgacctggagactgacaacctcatccaggctaccatccgcacccagtttgatacctgcactgtcctgaccatcgcacaccggcttaacactatcatggactacaccagggtcctggtcctggacaaaggagtagtagctgaatttgattctccagccaacctcattgcagctagaggcatcttctacgggatggccagagatgctggacttgcctaaaatatattcctgagatttcctcctggcctttcctggttttcatcaggaaggaaatgacaccaaatatgtccgcagaatggacttgatagcaaacactgggggcaccttaagattttgcacctgtaaagtgccttacagggtaactgtgctgaatgctttagatgaggaaatgatccccaagtggtgaatgacacgcctaaggtcacagctagtttgagccagttagactagtccccggtctcccgattcccaactgagtgttatttgcacactgcactgttttcaaataacgattttatgaaatgacctctgtcctccctctgatttttcatattttctaaagtttcgtttctgttttttaataaaaagctttttcctcctggaacagaagacagctgctgggtcaggccacccctaggaactcagtcctgtactctggggtgctgcctgaatccattaaaaatgggagtactgatgaaataaaactacatggtcaacagta

SEQ ID NO: 140759 - DNA, 5271 bp, Artificial Sequence
  derived and/or modified sequence
ccgcgctcgccttccttgcagccgcgcctcggccccatggacgccctgtgcggttccggggagctcggctccaagttctgggactccaacctgtctgtgcacacagaaaacccggacctcactccctgcttccagaactccctgctggcctgggtgccctgcatctacctgtgggtcgccctgccctgctacttgctctacctgcggcaccattgtcgtggctacatcatcctctcccacctgtccaagctcaagatggtcctgggtgtcctgctgtggtgcgtctcctgggcggaccttttttactccttccatggcctggtccatggccgggcccctgcccctgttttctttgtcacccccttggtggtgggggtcaccatgctgctggccaccctgctgatacagtatgagcggctgcagggcgtacagtcttcgggggtcctcattatcttctggttcctgtgtgtggtctgcgccatcgtcccattccgctccaagatccttttagccaaggcagagggtgagatctcagaccccttccgcttcaccaccttctacatccactttgccctggtactctctgccctcatcttggcctgcttcagggagaaacctccatttttctccgcaaagaatgtcgaccctaacccctaccctgagaccagcgctggctttctctcccgcctgtttttctggtggttcacaaagatggccatctatggctaccggcatcccctggaggagaaggacctctggtccctaaaggaagaggacagatcccagatggtggtgcagcagctgctggaggcatggaggaagcaggaaaagcagacggcacgacacaaggcttcagcagcacctgggaaaaatgcctccggcgaggacgaggtgctgctgggtgcccggcccaggccccggaagccctccttcctgaaggccctgctggccaccttcggctccagcttcctcatcagtgcctgcttcaagcttatccaggacctgctctccttcatcaatccacagctgctcagcatcctgatcaggtttatctccaaccccatggccccctcctggtggggcttcctggtggctgggctgatgttcctgtgctccatgatgcagtcgctgatcttacaacactattaccactacatctttgtgactggggtgaagtttcgtactgggatcatgggtgtcatctacaggaaggctctggttatcaccaactcagtcaaacgtgcgtccactgtgggggaaattgtcaacctcatgtcagtggatgcccagcgcttcatggaccttgcccccttcctcaatctgctgtggtcagcacccctgcagatcatcctggcgatctacttcctctggcagaacctaggtccctctgtcctggctggagtcgctttcatggtcttgctgattccactcaacggagctgtggccgtgaagatgcgcgccttccaggtaaagcaaatgaaattgaaggactcgcgcatcaagctgatgagtgagatcctgaacggcatcaaggtgctgaagctgtacgcctgggagcccagcttcctgaagcaggtggagggcatcaggcagggtgagctccagctgctgcgcacggcggcctacctccacaccacaaccaccttcacctggatgtgcagccccttcctggtgaccctgatcaccctctgggtgtacgtgtacgtggacccaaacaatgtgctggacgccgagaaggcctttgtgtctgtgtccttgtttaatatcttaagacttcccctcaacatgctgccccagttaatcagcaacctgactcaggccagtgtgtctctgaaacggatccagcaattcctgagccaagaggaacttgacccccagagtgtggaaagaaagaccatctccccaggctatgccatcaccatacacagtggcaccttcacctgggcccaggacctgccccccactctgcacagcctagacatccaggtcccgaaaggggcactggtggccgtggtggggcctgtgggctgtgggaagtcctccctggtgtctgccctgctgggagagatggagaagctagaaggcaaagtgcacatgaagggctccgtggcctatgtgccccagcaggcatggatccagaactgcactcttcaggaaaacgtgcttttcggcaaagccctgaaccccaagcgctaccagcagactctggaggcctgtgccttgctagctgacctggagatgctgcctggtggggatcagacagagattggagagaagggcattaacctgtctgggggccagcggcagcgggtcagtctggctcgagctgtttacagtgatgccgatattttcttgctggatgacccactgtccgcggtggactctcatgtggccaagcacatctttgaccacgtcatcgggccagaaggcgtgctggcaggcaagacgcgagtgctggtgacgcacggcattagcttcctgccccagacagacttcatcattgtgctagctgatggacaggtgtctgagatgggcccgtacccagccctgctgcagcgcaacggctcctttgccaactttctctgcaactatgcccccgatgaggaccaagggcacctggaggacagctggaccgcgttggaaggtgcagaggataaggaggcactgctgattgaagacacactcagcaaccacacggatctgacagacaatgatccagtcacctatgtggtccagaagcagtttatgagacagctgagtgccctgtcctcagatggggagggacagggtcggcctgtaccccggaggcacctgggtccatcagagaaggtgcaggtgacagaggcgaaggcagatggggcactgacccaggaggagaaagcagccattggcactgtggagctcagtgtgttctgggattatgccaaggccgtggggctctgtaccacgctggccatctgtctcctgtatgtgggtcaaagtgcggctgccattggagccaatgtgtggctcagtgcctggacaaatgatgccatggcagacagtagacagaacaacacttccctgaggctgggcgtctatgctgctttaggaattctgcaagggttcttggtgatgctggcagccatggccatggcagcgggtggcatccaggctgcccgtgtgttgcaccaggcactgctgcacaacaagatacgctcgccacagtccttctttgacaccacaccatcaggccgcatcctgaactgcttctccaaggacatctatgtcgttgatgaggttctggcccctgtcatcctcatgctgctcaattccttcttcaacgccatctccactcttgtggtcatcatggccagcacgccgctcttcactgtggtcatcctgcccctggctgtgctctacaccttagtgcagcgcttctatgcagccacatcacggcaactgaagcggctggaatcagtcagccgctcacctatctactcccacttttcggagacagtgactggtgccagtgtcatccgggcctacaaccgcagccgggattttgagatcatcagtgatactaaggtggatgccaaccagagaagctgctacccctacatcatctccaaccggtcagaagccgcctccctcgctccctgctcctccaggaattcccagcaggctctctggtgttcagggtccttgtccctcctttcccctaagcagaaaactggccctgccctgcccctgccccatttcctcctcatctgatcccccataggtggctgagcatcggagtggagttcgtggggaactgcgtggtgctctttgctgcactatttgccgtcatcgggaggagcagcctgaacccggggctggtgggcctttctgtgtcctactccttgcaggtgacatttgctctgaactggatgatacgaatgatgtcagatttggaatctaacatcgtggctgtggagagggtcaaggagtactccaagacagagacagaggcgccctgggtggtggaaggcagccgccctcccgaaggttggcccccacgtggggaggtggagttccggaattattctgtgcgctaccggccgggcctagacctggtgctgagagacctgagtctgcatgtgcacggtggcgagaaggtggggatcgtgggccgcactggggctggcaagtcttccatgaccctttgcctgttccgcatcctggaggcggcaaagggtgaaatccgcattgatggcctcaatgtggcagacatcggcctccatgacctgcgctctcagctgaccatcatcccgcaggaccccatcctgttctcggggaccctgcgcatgaacctggaccccttcggcagctactcagaggaggacatttggtgggctttggagctgtcccacctgcacacgtttgtgagctcccagccggcaggcctggacttccagtgctcagagggcggggagaatctcagcgtgggccagaggcagctcgtgtgcctggcccgagccctgctccgcaagagccgcatcctggttttagacgaggccacagctgccatcgacctggagactgacaacctcatccaggctaccatccgcacccagtttgatacctgcactgtcctgaccatcgcacaccggcttaacactatcatggactacaccagggtcctggtcctggacaaaggagtagtagctgaatttgattctccagccaacctcattgcagctagaggcatcttctacgggatggccagagatgctggacttgcctaaaatatattcctgagatttcctcctggcctttcctggttttcatcaggaaggaaatgacaccaaatatgtccgcagaatggacttgatagcaaacactgggggcaccttaagattttgcacctgtaaagtgccttacagggtaactgtgctgaatgctttagatgaggaaatgatccccaagtggtgaatgacacgcctaaggtcacagctagtttgagccagttagactagtccccggtctcccgattcccaactgagtgttatttgcacactgcactgttttcaaataacgattttatgaaatgacctctgtcctccctctgatttttcatattttctaaagtttcgtttctgttttttaataaaaagctttttcctcctggaacagaagacagctgctgggtcaggccacccctaggaactcagtcctgtactctggggtgctgcctgaatccattaaaaatgggagtactgatgaaataaaactacatggtcaacagta

SEQ ID NO: 140760 - DNA, 4584 bp, Artificial Sequence
  derived and/or modified sequence
atggacgccctgtgcggcagcggcgagctgggcagcaagttctgggacagcaacctgagcgtgcacaccgagaaccccgacctgaccccctgcttccagaacagcctgctggcctgggtgccctgcatctacctgtgggtggccctgccctgctacctgctgtacctgagacaccactgcagaggctacatcatcctgagccacctgagcaagctgaagatggtgctgggcgtgctgctgtggtgcgtgagctgggccgacctgttctacagcttccacggcctggtgcacggcagagcccccgcccccgtgttcttcgtgacccccctggtggtgggcgtgaccatgctgctggccaccctgctgatccagtacgagagactgcagggcgtgcagagcagcggcgtgctgatcatcttctggttcctgtgcgtggtgtgcgccatcgtgcccttcagaagcaagatcctgctggccaaggccgagggcgagatcagcgaccccttcagattcaccaccttctacatccacttcgccctggtgctgagcgccctgatcctggcctgcttcagagagaagccccccttcttcagcgccaagaacgtggaccccaacccctaccccgagaccagcgccggcttcctgagcagactgttcttctggtggttcaccaagatggccatctacggctacagacaccccctggaggagaaggacctgtggagcctgaaggaggaggacagaagccagatggtggtgcagcagctgctggaggcctggagaaagcaggagaagcagaccgccagacacaaggccagcgccgcccccggcaagaacgccagcggcgaggacgaggtgctgctgggcgccagacccagacccagaaagcccagcttcctgaaggccctgctggccaccttcggcagcagcttcctgatcagcgcctgcttcaagctgatccaggacctgctgagcttcatcaacccccagctgctgagcatcctgatcagattcatcagcaaccccatggcccccagctggtggggcttcctggtggccggcctgatgttcctgtgcagcatgatgcagagcctgatcctgcagcactactaccactacatcttcgtgaccggcgtgaagttcagaaccggcatcatgggcgtgatctacagaaaggccctggtgatcaccaacagcgtgaagagagccagcaccgtgggcgagatcgtgaacctgatgagcgtggacgcccagagattcatggacctggcccccttcctgaacctgctgtggagcgcccccctgcagatcatcctggccatctacttcctgtggcagaacctgggccccagcgtgctggccggcgtggccttcatggtgctgctgatccccctgaacggcgccgtggccgtgaagatgagagccttccaggtgaagcagatgaagctgaaggacagcagaatcaagctgatgagcgagatcctgaacggcatcaaggtgctgaagctgtacgcctgggagcccagcttcctgaagcaggtggagggcatcagacagggcgagctgcagctgctgagaaccgccgcctacctgcacaccaccaccaccttcacctggatgtgcagccccttcctggtgaccctgatcaccctgtgggtgtacgtgtacgtggaccccaacaacgtgctggacgccgagaaggccttcgtgagcgtgagcctgttcaacatcctgagactgcccctgaacatgctgccccagctgatcagcaacctgacccaggccagcgtgagcctgaagagaatccagcagttcctgagccaggaggagctggacccccagagcgtggagagaaagaccatcagccccggctacgccatcaccatccacagcggcaccttcacctgggcccaggacctgccccccaccctgcacagcctggacatccaggtgcccaagggcgccctggtggccgtggtgggccccgtgggctgcggcaagagcagcctggtgagcgccctgctgggcgagatggagaagctggagggcaaggtgcacatgaagggcagcgtggcctacgtgccccagcaggcctggatccagaactgcaccctgcaggagaacgtgctgttcggcaaggccctgaaccccaagagataccagcagaccctggaggcctgcgccctgctggccgacctggagatgctgcccggcggcgaccagaccgagatcggcgagaagggcatcaacctgagcggcggccagagacagagagtgagcctggccagagccgtgtacagcgacgccgacatcttcctgctggacgaccccctgagcgccgtggacagccacgtggccaagcacatcttcgaccacgtgatcggccccgagggcgtgctggccggcaagaccagagtgctggtgacccacggcatcagcttcctgccccagaccgacttcatcatcgtgctggccgacggccaggtgagcgagatgggcccctaccccgccctgctgcagagaaacggcagcttcgccaacttcctgtgcaactacgcccccgacgaggaccagggccacctggaggacagctggaccgccctggagggcgccgaggacaaggaggccctgctgatcgaggacaccctgagcaaccacaccgacctgaccgacaacgaccccgtgacctacgtggtgcagaagcagttcatgagacagctgagcgccctgagcagcgacggcgagggccagggcagacccgtgcccagaagacacctgggccccagcgagaaggtgcaggtgaccgaggccaaggccgacggcgccctgacccaggaggagaaggccgccatcggcaccgtggagctgagcgtgttctgggactacgccaaggccgtgggcctgtgcaccaccctggccatctgcctgctgtacgtgggccagagcgccgccgccatcggcgccaacgtgtggctgagcgcctggaccaacgacgccatggccgacagcagacagaacaacaccagcctgagactgggcgtgtacgccgccctgggcatcctgcagggcttcctggtgatgctggccgccatggccatggccgccggcggcatccaggccgccagagtgctgcaccaggccctgctgcacaacaagatcagaagcccccagagcttcttcgacaccacccccagcggcagaatcctgaactgcttcagcaaggacatctacgtggtggacgaggtgctggcccccgtgatcctgatgctgctgaacagcttcttcaacgccatcagcaccctggtggtgatcatggccagcacccccctgttcaccgtggtgatcctgcccctggccgtgctgtacaccctggtgcagagattctacgccgccaccagcagacagctgaagagactggagagcgtgagcagaagccccatctacagccacttcagcgagaccgtgaccggcgccagcgtgatcagagcctacaacagaagcagagacttcgagatcatcagcgacaccaaggtggacgccaaccagagaagctgctacccctacatcatcagcaacagatggctgagcatcggcgtggagttcgtgggcaactgcgtggtgctgttcgccgccctgttcgccgtgatcggcagaagcagcctgaaccccggcctggtgggcctgagcgtgagctacagcctgcaggtgaccttcgccctgaactggatgatcagaatgatgagcgacctggagagcaacatcgtggccgtggagagagtgaaggagtacagcaagaccgagaccgaggccccctgggtggtggagggcagcagaccccccgagggctggccccccagaggcgaggtggagttcagaaactacagcgtgagatacagacccggcctggacctggtgctgagagacctgagcctgcacgtgcacggcggcgagaaggtgggcatcgtgggcagaaccggcgccggcaagagcagcatgaccctgtgcctgttcagaatcctggaggccgccaagggcgagatcagaatcgacggcctgaacgtggccgacatcggcctgcacgacctgagaagccagctgaccatcatcccccaggaccccatcctgttcagcggcaccctgagaatgaacctggaccccttcggcagctacagcgaggaggacatctggtgggccctggagctgagccacctgcacaccttcgtgagcagccagcccgccggcctggacttccagtgcagcgagggcggcgagaacctgagcgtgggccagagacagctggtgtgcctggccagagccctgctgagaaagagcagaatcctggtgctggacgaggccaccgccgccatcgacctggagaccgacaacctgatccaggccaccatcagaacccagttcgacacctgcaccgtgctgaccatcgcccacagactgaacaccatcatggactacaccagagtgctggtgctggacaagggcgtggtggccgagttcgacagccccgccaacctgatcgccgccagaggcatcttctacggcatggccagagacgccggcctggcctag

SEQ ID NO: 140761 - DNA, 3717 bp, Artificial Sequence
  derived and/or modified sequence
atggacgccctgtgcggcagcggcgagctgggcagcaagttctgggacagcaacctgagcgtgcacaccgagaaccccgacctgaccccctgcttccagaacagcctgctggcctgggtgccctgcatctacctgtgggtggccctgccctgctacctgctgtacctgagacaccactgcagaggctacatcatcctgagccacctgagcaagctgaagatggtgctgggcgtgctgctgtggtgcgtgagctgggccgacctgttctacagcttccacggcctggtgcacggcagagcccccgcccccgtgttcttcgtgacccccctggtggtgggcgtgaccatgctgctggccaccctgctgatccagtacgagagactgcagggcgtgcagagcagcggcgtgctgatcatcttctggttcctgtgcgtggtgtgcgccatcgtgcccttcagaagcaagatcctgctggccaaggccgagggcgagatcagcgaccccttcagattcaccaccttctacatccacttcgccctggtgctgagcgccctgatcctggcctgcttcagagagaagccccccttcttcagcgccaagaacgtggaccccaacccctaccccgagaccagcgccggcttcctgagcagactgttcttctggtggttcaccaagatggccatctacggctacagacaccccctggaggagaaggacctgtggagcctgaaggaggaggacagaagccagatggtggtgcagcagctgctggaggcctggagaaagcaggagaagcagaccgccagacacaaggccagcgccgcccccggcaagaacgccagcggcgaggacgaggtgctgctgggcgccagacccagacccagaaagcccagcttcctgaaggccctgctggccaccttcggcagcagcttcctgatcagcgcctgcttcaagctgatccaggacctgctgagcttcatcaacccccagctgctgagcatcctgatcagattcatcagcaaccccatggcccccagctggtggggcttcctggtggccggcctgatgttcctgtgcagcatgatgcagagcctgatcctgcagcactactaccactacatcttcgtgaccggcgtgaagttcagaaccggcatcatgggcgtgatctacagaaaggccctggtgatcaccaacagcgtgaagagagccagcaccgtgggcgagatcgtgaacctgatgagcgtggacgcccagagattcatggacctggcccccttcctgaacctgctgtggagcgcccccctgcagatcatcctggccatctacttcctgtggcagaacctgggccccagcgtgctggccggcgtggccttcatggtgctgctgatccccctgaacggcgccgtggccgtgaagatgagagccttccaggtgaagcagatgaagctgaaggacagcagaatcaagctgatgagcgagatcctgaacggcatcaaggtgctgaagctgtacgcctgggagcccagcttcctgaagcaggtggagggcatcagacagggcgagctgcagctgctgagaaccgccgcctacctgcacaccaccaccaccttcacctggatgtgcagccccttcctggtgaccctgatcaccctgtgggtgtacgtgtacgtggaccccaacaacgtgctggacgccgagaaggccttcgtgagcgtgagcctgttcaacatcctgagactgcccctgaacatgctgccccagctgatcagcaacctgacccaggccagcgtgagcctgaagagaatccagcagttcctgagccaggaggagctggacccccagagcgtggagagaaagaccatcagccccggctacgccatcaccatccacagcggcaccttcacctgggcccaggacctgccccccaccctgcacagcctggacatccaggtgcccaagggcgccctggtggccgtggtgggccccgtgggctgcggcaagagcagcctggtgagcgccctgctgggcgagatggagaagctggagggcaaggtgcacatgaagggcagcgtggcctacgtgccccagcaggcctggatccagaactgcaccctgcaggagaacgtgctgttcggcaaggccctgaaccccaagagataccagcagaccctggaggcctgcgccctgctggccgacctggagatgctgcccggcggcgaccagaccgagatcggcgagaagggcatcaacctgagcggcggccagagacagagagtgagcctggccagagccgtgtacagcgacgccgacatcttcctgctggacgaccccctgagcgccgtggacagccacgtggccaagcacatcttcgaccacgtgatcggccccgagggcgtgctggccggcaagaccagagtgctggtgacccacggcatcagcttcctgccccagaccgacttcatcatcgtgctggccgacggccaggtgagcgagatgggcccctaccccgccctgctgcagagaaacggcagcttcgccaacttcctgtgcaactacgcccccgacgaggaccagggccacctggaggacagctggaccgccctggagggcgccgaggacaaggaggccctgctgatcgaggacaccctgagcaaccacaccgacctgaccgacaacgaccccgtgacctacgtggtgcagaagcagttcatgagacagctgagcgccctgagcagcgacggcgagggccagggcagacccgtgcccagaagacacctgggccccagcgagaaggtgcaggtgaccgaggccaaggccgacggcgccctgacccaggaggagaaggccgccatcggcaccgtggagctgagcgtgttctgggactacgccaaggccgtgggcctgtgcaccaccctggccatctgcctgctgtacgtgggccagagcgccgccgccatcggcgccaacgtgtggctgagcgcctggaccaacgacgccatggccgacagcagacagaacaacaccagcctgagactgggcgtgtacgccgccctgggcatcctgcagggcttcctggtgatgctggccgccatggccatggccgccggcggcatccaggccgccagagtgctgcaccaggccctgctgcacaacaagatcagaagcccccagagcttcttcgacaccacccccagcggcagaatcctgaactgcttcagcaaggacatctacgtggtggacgaggtgctggcccccgtgatcctgatgctgctgaacagcttcttcaacgccatcagcaccctggtggtgatcatggccagcacccccctgttcaccgtggtgatcctgcccctggccgtgctgtacaccctggtgcagagattctacgccgccaccagcagacagctgaagagactggagagcgtgagcagaagccccatctacagccacttcagcgagaccgtgaccggcgccagcgtgatcagagcctacaacagaagcagagacttcgagatcatcagcgacaccaaggtggacgccaaccagagaagctgctacccctacatcatcagcaacagaagcgaggccgccagcctggccccctgcagcagcagaaacagccagcaggccctgtggtgcagcggcagcctgagcctgctgagccccaagcagaagaccggccccgccctgcccctgccccacttcctgctgatctag

SEQ ID NO: 140762 - protein, 638 aa, Artificial Sequence
  derived and/or modified sequence
MESERDMYRQFQDWCLRTYGDSGKTKTVTRKKYERIVQLLNGSESSSTDNAKFKFWVKSKGFQLGQPDEVRGGGGGAKQVLYVPVKTTDGVGVDEKLSLRRVAVVEDFFDIIYSMHVETGPNGEQIRKHAGQKRTYKAISESYAFLPREAVTRFLMSCSECQKRMHLNPDGTDHKDNGKPPTLVTSMIDYNMPITMAYMKHMKLQLLNSQQDEDESSIESDEFDMSDSTRMSAVNSDLSSNLEERMQSPQNLHGQQDDDSAAESFNGNETLGHSSIASGGTHSREMGDSNSDGKTGLEQDEQPLNLSDSPLSAQLTSEYRIDDHNSNGKNKYKNLLISDLKMEREARENGSKSPAHSYSSYDSGKNESVDRGAEDLSLNRGDEDEDDHEDHDDSEKVNETDGVEAERLKAFNMFVRLFVDENLDRMVPISKQPKEKIQAIIDSCRRQFPEYQERARKRIRTYLKSCRRMKRSGFEMSRPIPSHLTSAVAESILASACESESRNAAKRMRLERQQDESAPADKQCKPEATQATYSTSAVPGSQDVLYINGNGTYSYHSYRGLGGGLLNLNDASSSGPTDLSMKRQLATSSGSSSSSNSRPQLSPTEINAVRQLVAGYRESAAFLLRSADELENLILQQN

SEQ ID NO: 140763 - DNA, 1917 bp, Artificial Sequence
  derived and/or modified sequence
atggagtcagaaagagacatgtacagacagttccaagactggtgcctgcgaacttacggcgactctgggaaaacaaagaccgtgactcgaaagaaatatgagaggattgtccagctgctgaacgggtccgagtcctcaagcactgacaatgcgaagttcaagttctgggtgaagagtaagggctttcagctgggccagcctgacgaggttcgaggaggtggcgggggagctaagcaggtgctctatgtccctgtcaagacaaccgatggcgtgggcgtcgatgaaaagctctccctgagaagagtggccgtagtggaggatttttttgatattatttactccatgcatgttgaaactggccctaacggcgaacaaattagaaagcacgccgggcaaaagcgcacctacaaggccatatcagaaagctacgcattcctgccccgtgaagcagtgacacgcttccttatgtcgtgtagtgaatgtcagaaaaggatgcacttgaaccctgatggtactgaccacaaggacaacggtaaaccgcctactctagttacaagcatgatcgactacaatatgccaattacgatggcttacatgaaacacatgaaactgcagttactgaattcccaacaggacgaagacgaatcatccatcgaaagtgacgagttcgatatgagtgattctacacgcatgtcagccgttaatagtgacctgtctagtaacttggaggagcgaatgcaaagcccacagaacctgcacgggcagcaggatgacgacagtgctgcggaatcctttaacggaaacgaaactctcggccactcaagtattgcatccggaggaacccactcccgggaaatgggcgattcaaatagcgacggaaaaaccggtctcgaacaggacgaacaaccattgaacctgtcggatagccctttatctgcacagctgacatcagaatacaggatcgatgaccacaattccaacggtaaaaacaaatataaaaacttgctgatctctgatctcaagatggaaagggaggctagggagaacggctctaagagtcctgctcatagctacagcagctacgatagtggaaaaaacgaatcagttgacaggggcgccgaggatctgagtctgaacagaggagatgaagatgaggatgaccatgaggatcatgacgactctgagaaggtcaatgagactgatggagtcgaggccgaacggctgaaggcattcaatatgtttgtcaggctgttcgtcgatgaaaacctggaccggatggttcccatttcaaagcagccaaaggagaaaattcaggctatcatcgactcctgccggcgccagtttccagaataccaggagcgcgccagaaagagaattcgaacctacctgaagagctgcaggaggatgaagcgatcaggctttgagatgtcccgtccaattccttctcacttgactagcgccgtggccgaaagcattctggcctcagcttgtgaaagtgagagtaggaatgcggccaagcgcatgcgcctggagcggcagcaagacgaaagcgcaccagcagacaagcaatgcaagccagaggccactcaggccacttactcaactagcgcggttcctggctctcaggatgttttatatattaacgggaatggcacctattcttaccattcctaccgcggcctgggcggagggcttttaaatctaaacgacgccagctcatcaggaccaactgacttatccatgaagaggcagctggctacatcgtcaggcagttcctcaagttccaattcgcgaccacaactgagtcccacggaaataaacgctgtcagacagctagtggctggctatagagagagtgctgcctttctccttagatcagccgacgaactggaaaatctaattttacagcaaaattag

SEQ ID NO: 140764 - DNA, 3957 bp, Artificial Sequence
  derived and/or modified sequence
ggatggtcctggtcacaaaatattaaagagaccgaccgctaagggaacaggaaaaacgtccgagacagccgttgcaattacgaatggaccagacttggtagcacggggcattgattgctggtgcccaaccggaccctcctcccctcttcccatcccttcccccacccaaagcaggctcccgctgcggccgggacctcgcatccctgcaacgtggccggggctgcatttttcatgagcctagggtgaacaggtgcgaagtgcgctgggagcatccggccagcggccgagcgcggggaacatggagagcgagcgcgacatgtaccgccagttccaggactggtgcctcaggacttacggggactcaggcaagaccaagacggtgacccgtaaaaaatacgaacggatcgtccagctcctcaatggctccgagtcgagctccacggacaacgccaaatttaaattctgggtcaaatcgaagggcttccagctgggccagccggacgaggtccgcgggggaggcggcggcgccaagcaagtgctctacgtgcctgtcaagaccacggatggcgtaggggtagatgagaagctatctttacgacgggtagctgtggttgaagatttctttgacattatttattcgatgcatgtggaaacggggccaaatggagaacaaattcggaaacacgctggacaaaagagaacttacaaagcaatttcagagagctatgccttcctaccaagagaagcggtgacacgatttctaatgagctgctcagagtgccagaaaagaatgcatttaaacccagatggaacagatcataaagataatggaaaacctcccactttggtgaccagcatgattgactacaacatgccaattaccatggcctacatgaaacacatgaagctgcagctgctaaactcacagcaagatgaggatgaaagttcaatagaaagtgatgaatttgacatgagtgattcaacacggatgtcagctgtgaactctgatcttagctccaatcttgaagaaagaatgcaaagtccccagaatcttcatggccagcaagatgatgattctgctgcagagagctttaatggcaatgagactctggggcacagttcaattgcttcagggggaacacacagcagggagatgggagactccaacagtgatggcaaaactgggctggagcaagatgaacagccactgaacctgagtgacagtcccctctctgcgcagctaacttcggaatacagaatagatgatcacaacagtaatgggaaaaacaagtataagaatcttctaatttctgacctcaagatggaacgagaggcgagagaaaatggaagcaagtctcctgcacatagttactccagctatgactctggcaaaaatgagagtgtagaccgaggagctgaggacctctcactaaacaggggagatgaggacgaagatgaccacgaggaccatgacgattcggagaaagttaatgagacagacggcgttgaagccgagcggctgaaagcttttaatatgtttgtcaggctgtttgtagatgaaaacttggaccgaatggtcccaatctctaagcagcccaaagaaaagatccaggctatcattgactcatgcaggcgacaattccctgagtatcaagagcgtgccagaaaacgtatacgtacttacctcaagtcctgcaggcggatgaaaagaagtggttttgagatgtctcgacctattccttcccaccttacttcagcagttgcagagagtatcttggcttcagcttgtgagagtgagagtagaaatgccgccaagaggatgcgtctggagagacagcaggatgagtctgctccagctgacaaacagtgtaaaccagaggcgacccaggccacttactcaacatcagctgttccaggctcacaggacgtgctgtacatcaatggaaatgggacctatagttaccatagttacagagggctaggagggggtctgctaaatctgaatgatgcttccagcagtggacccactgatctcagcatgaagagacaattggcgactagctcaggatcctccagcagctcaaactccagaccccagctgagtccaactgaaatcaatgccgtgagacagcttgttgcaggatatcgagaatcagctgcatttttattgcgatctgcagatgaactggaaaatctcattttacaacagaactgagacagacgaccaccatattcactgaggtctaaatttgcagtttccactaatgacattttgatttcccaacagagatacttctggtcttactgcacagtcttttaagagaaatacttccattatgccacattgtccttgatccgtaagtgatgtgttaaggtgcttcaaaggaactctgacctctgaagtacttgagctactttagtatgtccagcctattgctttttgttttagtgtgtcaccataaatatcaggggcataaaaggctatctattcttaattcaaggataaaacagaagaagcttgtggtataaaacaatagttcaagatccagctgaaatattagtggaatttgctactgactcattggactgaaagctgaagtacctggcaaaaaaaaaaaaaagaaaaaaaaaagccaaatttcttgttgctacaggatataacaacaatgaaaaggatctcgtattttaaaaaaatatgtaatttttataaaaagaaaacttgtttttcattcaaacttgtcatttttactttggtaactttttcataggtcctaaaagaaaactgttttgagaaactactgtaagtaccttttccacatccctttgccttctcctctttccaaattctttctacaaaaataacacttgatgctggaaaaacccttgcctacgttctttcaatcgtcacatcaggaactacttccaagagaagcctgcatttctgctctcatgctgatctcaaaaaccccactcaacactgcaactttatcatagcagttttcatcccagaattttttttttaataatgacaagacatgttgttgaaaaaaaatcacaccttggtttcttagagctgctcgttcctgattgccgctgctgtctccaggcatccctctagcagcacctggatgtagatgactgaatgttaagaggttgcaagtgacaatctgaaaatttgcactcttgtgtgtagttttcttttcatttctttcagaaatagtttccaaaaagaccattacatctcctgatatgatttgtataattttcagttctagctaaaaataatgtaaggaactctcagcggatgcagctgcaacttacaatgaactgtgccctcctatcccccatactttacccttctttcttattttatagtgtgggatacacatgagtgatgttttctttgtgcactgagacaagcctattttttaaatatttagggagaagtactttagttcatgcttcttatacaacttttttctgttgtttagctttggttggattacaaattctttgtgcattcctgaatttgccttatttcatgtaaaatttatgtcattcagtttttgacaatgagtttgaggcatcagtgatatttcttatctacttgttacatatagtttttcaagtaatgactgtgattgtgaccgagtaatgtgcactttttcttgtaactgtggacattgctatgcttttttcttctagtgtttctagaattactgttccttacaattatgtaaacaaaaaacaaaaaaaaaacttttgtgatactgttggtgaatataatgtgaaaaatcttattgaaatatgagtattttggaaatacatagctgcacaaacatcttttaagatgtggatttagagtttgcttatttaaatgaaaattcaaaaattgagggctggtataattttctctgttttgtttggtttaataaacagatttctgtgttaaaagaa

SEQ ID NO: 140765 - DNA, 1917 bp, Artificial Sequence
  derived and/or modified sequence
atggagagcgagcgggacatgtaccggcagttccaggactggtgcctgcggacctatggagacagcggcaagaccaagacagtgaccaggaagaagtatgagcgcatcgtgcagctgctgaatggaagtgagagcagcagcacagacaatgccaagttcaagttctgggtgaagagcaagggcttccagctgggccagccagatgaggtgcggggcggcggcggcggggccaagcaggtgctgtatgtgcctgtgaagaccacagatggagtgggcgtggatgagaagctgagcctgcggcgggtggccgtggtggaggacttctttgacatcatctacagcatgcacgtggagaccggccccaacggggagcagatcaggaagcacgccggccagaagaggacctacaaggccatcagcgagagctatgccttcctgccccgggaggccgtgacccgcttcctgatgagctgcagcgagtgccagaagaggatgcacctgaacccagatggaacagaccacaaggacaatggcaagccacccaccctggtgacctccatgattgactacaacatgcccatcaccatggcctacatgaagcacatgaagctgcagctgctgaacagccagcaggatgaagatgagagcagcattgaaagtgatgaatttgacatgtctgacagcaccaggatgtctgctgtgaacagcgacctgagcagcaacctggaggagaggatgcagagcccccagaacctgcacggccagcaggatgatgacagcgctgctgagagcttcaatggaaatgagaccctgggccacagcagcatcgccagcggcggcacccacagccgggagatgggagacagcaacagtgatggcaagacaggcctggagcaggatgagcagcccctgaacctgagtgacagccccctgagcgcccagctgaccagcgagtacagaattgatgaccacaacagcaatggcaagaacaagtacaagaacctgctgatcagtgacctgaagatggagcgggaggcccgggagaatggcagcaagagccctgcccacagctacagcagctatgattctgggaagaatgaatctgtggacagaggagctgaggacctgagcctgaacagaggagatgaagatgaagatgaccatgaagatcatgatgacagcgagaaggtgaatgaaacagatggagtggaggccgagcggctgaaggccttcaacatgtttgtgcggctgtttgtggatgagaacctggacaggatggtgcccatcagcaagcagcccaaggagaagatccaggccatcatcgacagctgccggcggcagtttcctgagtaccaggagcgggccaggaagaggatccgcacctacctgaagagctgcaggaggatgaagaggagcggctttgagatgagccggcccatccccagccacctgaccagcgctgtggccgagagcatcctggccagcgcctgtgagagcgagagcagaaatgctgccaagaggatgaggctggagcggcagcaggatgaaagtgccccagctgacaagcagtgcaagccagaggccacccaggccacctacagcaccagcgctgtgcccggcagccaggatgtgctgtacatcaatggaaatggcacctacagctaccacagctaccggggcctgggcggcggcctgctgaacctgaatgatgccagcagcagcggccccacagacctgtccatgaagaggcagctggccaccagcagcggcagcagcagcagcagcaacagccggccccagctgagccccacagagatcaatgctgtgcggcagctggtggccggctaccgggagagcgctgccttcctgctgcggtctgcagatgagctggagaacctgatcctgcagcagaactag

SEQ ID NO: 140766 - DNA, 1917 bp, Artificial Sequence
  derived and/or modified sequence
atggagagcgagcgggacatgtaccggcagttccaggactggtgcttgcgaacttatggtgactccggaaaaacaaaaactgtgacacgaaaaaaatatgaaaggatcgtgcagcttctgaatggctctgagtctagctctactgataatgcaaaatttaaattttgggtcaaaagtaaaggattccaactgggccaacctgatgaagtgagaggcgggggggggggggcaaaacaggtcctctatgtgcccgtcaagaccactgatggcgtcggtgtggacgagaaattaagccttaggcgggtcgccgtcgtggaagatttctttgacatcatttactctatgcatgtcgagactggccctaatggagaacagatccggaaacacgcgggacagaagaggacctacaaggctatttcagagtcttacgcctttctcccccgcgaggctgtgaccaggttcctgatgagctgctcagagtgccaaaagagaatgcaccttaaccctgatggtactgaccataaggataatgggaaaccacctaccctggtaactagtatgattgattataatatgcccatcacaatggcgtacatgaagcacatgaaactgcagcttcttaatagccagcaagatgaagatgagtcctctatagagagtgacgagtttgatatgtcagactcaaccagaatgagtgcagtcaatagcgatttaagcagcaacttggaggaacgtatgcagtcaccgcaaaatctgcatggacagcaagacgatgattctgctgccgaaagctttaatggcaacgagacgctgggccactcgtctattgcgagtggtggcactcacagcagggagatgggggacagtaacagtgatggtaagaccggcctcgaacaagatgaacagcctctcaacctctctgattcccccttgtctgcccagctcaccagtgagtataggattgacgaccacaacagcaatggcaagaacaaatacaaaaaccttcttatcagtgacttgaaaatggagcgagaagcccgcgaaaatggaagtaagagtcccgcccatagttattcctcctacgactcagggaagaatgaaagcgttgacagaggtgctgaggaccttagcttaaataggggggatgaagacgaggacgatcatgaagaccatgacgactccgagaaagtaaacgagactgatggagtggaggcagaacgtttgaaagcctttaacatgtttgtgcgccttttcgttgacgagaaccttgacagaatggtgcctatctcgaagcaacccaaagagaagattcaggcaatcatcgactcctgtagaaggcagttccctgagtatcaggagcgcgctagaaaaagaatccgaacctatctgaagtcctgccgcaggatgaagagatctggcttcgagatgtctcgacctatcccctctcatctcactagcgccgtggccgaaagcatcctggcaagtgcatgtgaatctgagagtcggaacgctgcgaagcgtatgagactggaacgacagcaggatgaaagcgctcccgcagacaaacagtgtaagcccgaagccacgcaggcaacttattccacttcagcagttcctggttcccaggacgtgctttacataaatgggaacgggacatattcataccatagctatagaggtttgggaggggggcttctaaacttaaacgatgcttcgtcatccgggcctaccgaccttagcatgaaaaggcaattagccacctccagcgggagcagctcgagttctaactccaggccccaactgagcccaacagagatcaatgcggtgagacaactggtagcaggctacagggaatcagcggctttccttcttaggtccgctgacgaacttgagaacctcatcctgcagcaaaattag

SEQ ID NO: 140767 - DNA, 1917 bp, Artificial Sequence
  derived and/or modified sequence
atggagtccgagcgcgacatgtaccggcagtttcaggactggtgtttgaggacctatggagattcagggaaaaccaagaccgtgactcgtaaaaaatacgagagaatcgtacagctgctcaatgggagcgagagcagttccacggataatgccaaattcaagttttgggtgaagtctaagggttttcagttgggccagccagatgaggtgcgaggaggcggagggggagctaaacaagtgctgtacgtgcccgtgaaaactaccgatggagtaggagtcgatgaaaagctgtccctcaggcgtgtagctgtggtcgaggatttttttgacataatctactctatgcacgtggagaccgggcctaacggtgaacagataaggaaacacgcaggccagaagagaacatataaagcgatcagcgagtcctatgcgttcctgcctcgcgaagcagtaaccaggtttctgatgtcatgcagtgaatgccagaagcgcatgcaccttaatcccgatggcactgatcacaaggataacggcaaaccgccaactctggtgacctcgatgattgattacaatatgcccattacaatggcatacatgaaacacatgaagttacaactcttaaactcgcagcaggatgaggatgagtccagcatcgagtcagacgagttcgacatgagcgactcgacccgtatgagcgcggtgaacagcgacctatcttccaatctggaggagcgaatgcagtccccacagaacttacacggccaacaggacgatgactccgcagcggagtcattcaacggaaatgagacgttgggacactccagtattgctagtgggggaactcattctcgcgaaatgggcgatagcaactctgatggcaaaaccggactcgaacaggatgagcaaccactgaatctttcggacagccctctgagtgctcaacttacaagtgagtatcgaatagacgatcacaacagcaacggtaagaacaaatacaagaacttgctaatcagtgatctcaagatggagcgcgaggcccgtgagaacggctctaagagccccgctcactcttacagtagttacgattcagggaaaaatgaatccgtggacaggggcgctgaggacctcagcctcaatcggggagacgaagacgaagatgaccacgaagatcatgacgactccgaaaaggtaaatgaaacagatggggtcgaggctgagcgcctgaaagcgtttaatatgtttgtacggttattcgtcgacgagaatctggatcgcatggttcctatttcaaagcagccaaaagagaagatacaagctattatagactcatgccgcagacagttccccgaatatcaggagcgcgcaagaaagagaatacgaacctaccttaaatcttgcagaagaatgaagaggagcgggtttgagatgtcgcggccaataccatcccatctgaccagtgcagtcgcagagtctatccttgcatcagcctgcgagagtgagtctcgaaatgctgccaagcgaatgcgcttggaacgccagcaggatgagagcgcacccgctgataagcaatgcaagcctgaggccacacaggccacgtactcaacgagcgcggtgcctgggtcacaggacgtcctgtacatcaacgggaatggcacatattcctaccactcatatcgcggtcttggtggagggctgttgaacctcaacgacgcctccagttcaggccctaccgacctttccatgaagcgtcagcttgctacctccagcggtagttcttcaagttccaattcccggcctcagctgagccctaccgaaatcaacgccgtgcgccagctggtggcaggttatcgcgagagtgcagcattcctgctaagaagcgccgatgaactcgaaaatttgatactccagcagaattag

SEQ ID NO: 140768 - DNA, 1917 bp, Artificial Sequence
  derived and/or modified sequence
atggagagcgagagagacatgtacagacagttccaggactggtgcctgagaacctacggcgacagcggcaagaccaagaccgtgaccagaaagaagtacgagagaatcgtgcagctgctgaacggcagcgagagcagcagcaccgacaacgccaagttcaagttctgggtgaagagcaagggcttccagctgggccagcccgacgaggtgagaggcggcggcggcggcgccaagcaggtgctgtacgtgcccgtgaagaccaccgacggcgtgggcgtggacgagaagctgagcctgagaagagtggccgtggtggaggacttcttcgacatcatctacagcatgcacgtggagaccggccccaacggcgagcagatcagaaagcacgccggccagaagagaacctacaaggccatcagcgagagctacgccttcctgcccagagaggccgtgaccagattcctgatgagctgcagcgagtgccagaagagaatgcacctgaaccccgacggcaccgaccacaaggacaacggcaagccccccaccctggtgaccagcatgatcgactacaacatgcccatcaccatggcctacatgaagcacatgaagctgcagctgctgaacagccagcaggacgaggacgagagcagcatcgagagcgacgagttcgacatgagcgacagcaccagaatgagcgccgtgaacagcgacctgagcagcaacctggaggagagaatgcagagcccccagaacctgcacggccagcaggacgacgacagcgccgccgagagcttcaacggcaacgagaccctgggccacagcagcatcgccagcggcggcacccacagcagagagatgggcgacagcaacagcgacggcaagaccggcctggagcaggacgagcagcccctgaacctgagcgacagccccctgagcgcccagctgaccagcgagtacagaatcgacgaccacaacagcaacggcaagaacaagtacaagaacctgctgatcagcgacctgaagatggagagagaggccagagagaacggcagcaagagccccgcccacagctacagcagctacgacagcggcaagaacgagagcgtggacagaggcgccgaggacctgagcctgaacagaggcgacgaggacgaggacgaccacgaggaccacgacgacagcgagaaggtgaacgagaccgacggcgtggaggccgagagactgaaggccttcaacatgttcgtgagactgttcgtggacgagaacctggacagaatggtgcccatcagcaagcagcccaaggagaagatccaggccatcatcgacagctgcagaagacagttccccgagtaccaggagagagccagaaagagaatcagaacctacctgaagagctgcagaagaatgaagagaagcggcttcgagatgagcagacccatccccagccacctgaccagcgccgtggccgagagcatcctggccagcgcctgcgagagcgagagcagaaacgccgccaagagaatgagactggagagacagcaggacgagagcgcccccgccgacaagcagtgcaagcccgaggccacccaggccacctacagcaccagcgccgtgcccggcagccaggacgtgctgtacatcaacggcaacggcacctacagctaccacagctacagaggcctgggcggcggcctgctgaacctgaacgacgccagcagcagcggccccaccgacctgagcatgaagagacagctggccaccagcagcggcagcagcagcagcagcaacagcagaccccagctgagccccaccgagatcaacgccgtgagacagctggtggccggctacagagagagcgccgccttcctgctgagaagcgccgacgagctggagaacctgatcctgcagcagaactag

SEQ ID NO: 140769 - protein, 1052 aa, Artificial Sequence
  derived and/or modified sequence
MKLVNIWLLLLVVLLCGKKHLGDRLEKKSFEKAPCPGCSHLTLKVEFSSTVVEYEYIVAFNGYFTAKARNSFISSALKSSEVDNWRIIPRNNPSSDYPSDFEVIQIKEKQKAGLLTLEDHPNIKRVTPQRKVFRSLKYAESDPTVPCNETRWSQKWQSSRPLRRASLSLGSGFWHATGRHSSRRLLRAIPRQVAQTLQADVLWQMGYTGANVRVAVFDTGLSEKHPHFKNVKERTNWTNERTLDDGLGHGTFVAGVIASMRECQGFAPDAELHIFRVFTNNQVSYTSWFLDAFNYAILKKIDVLNLSIGGPDFMDHPFVDKVWELTANNVIMVSAIGNDGPLYGTLNNPADQMDVIGVGGIDFEDNIARFSSRGMTTWELPGGYGRMKPDIVTYGAGVRGSGVKGGCRALSGTSVASPVVAGAVTLLVSTVQKRELVNPASMKQALIASARRLPGVNMFEQGHGKLDLLRAYQILNSYKPQASLSPSYIDLTECPYMWPYCSQPIYYGGMPTVVNVTILNGMGVTGRIVDKPDWQPYLPQNGDNIEVAFSYSSVLWPWSGYLAISISVTKKAASWEGIAQGHVMITVASPAETESKNGAEQTSTVKLPIKVKIIPTPPRSKRVLWDQYHNLRYPPGYFPRDNLRMKNDPLDWNGDHIHTNFRDMYQHLRSMGYFVEVLGAPFTCFDASQYGTLLMVDSEEEYFPEEIAKLRRDVDNGLSLVIFSDWYNTSVMRKVKFYDENTRQWWMPDTGGANIPALNELLSVWNMGFSDGLYEGEFTLANHDMYYASGCSIAKFPEDGVVITQTFKDQGLEVLKQETAVVENVPILGLYQIPAEGGGRIVLYGDSNCLDDSHRQKDCFWLLDALLQYTSYGVTPPSLSHSGNRQRPPSGAGSVTPERMEGNHLHRYSKVLEAHLGDPKPRPLPACPRLSWAKPQPLNETAPSNLWKHQKLLSIDLDKVVLPNFRSNRPQVRPLSPGESGAWDIPGGIMPGRYNQEVGQTIPVFAFLGAMVVLAFFVVQINKAKSRPKRRKPRVKRPQLMQQVHPPKTPSV

SEQ ID NO: 140770 - protein, 497 aa, Artificial Sequence
  derived and/or modified sequence
MALVGLPGHLHFCDQESGFLGRHCSGPCHDHCGFPSRDRVKKWCRTDFNSKLPIKVKIIPTPPRSKRVLWDQYHNLRYPPGYFPRDNLRMKNDPLDWNGDHIHTNFRDMYQHLRSMGYFVEVLGAPFTCFDASQYGTLLMVDSEEEYFPEEIAKLRRDVDNGLSLVIFSDWYNTSVMRKVKFYDENTRQWWMPDTGGANIPALNELLSVWNMGFSDGLYEGEFTLANHDMYYASGCSIAKFPEDGVVITQTFKDQGLEVLKQETAVVENVPILGLYQIPAEGGGRIVLYGDSNCLDDSHRQKDCFWLLDALLQYTSYGVTPPSLSHSGNRQRPPSGAGSVTPERMEGNHLHRYSKVLEAHLGDPKPRPLPACPRLSWAKPQPLNETAPSNLWKHQKLLSIDLDKVVLPNFRSNRPQVRPLSPGESGAWDIPGGIMPGRYNQEVGQTIPVFAFLGAMVVLAFFVVQINKAKSRPKRRKPRVKRPQLMQQVHPPKTPSV

SEQ ID NO: 140771 - DNA, 3159 bp, Artificial Sequence
  derived and/or modified sequence
atgaaactggtgaatatctggttgctcttgctggtggtgctcctgtgcgggaaaaagcacctcggtgaccgcctcgaaaaaaagagttttgagaaagcaccgtgtccgggatgctcacacctcacattgaaagtggagttttcctcgaccgtggtagaatacgagtatattgtcgcctttaatggctacttcaccgcaaaggcccgtaactcatttatatcttcagctctgaaatcatccgaggtggataattggcgtattattccaagaaataacccgtcaagtgattatccgagtgattttgaggttatccagataaaggaaaagcagaaggccggcttgctgacgctggaagatcatcccaatattaagagggtgacccctcagaggaaagtgtttcggtctttgaaatacgccgagagcgatccgactgtaccgtgtaacgaaaccaggtggtcacaaaagtggcaatcgtctcggccgttacggcgggcctcgctgagtctgggttccgggttttggcacgctacaggcaggcactcctccaggcgtctcctgcgtgctatcccaagacaggtggcacaaacactccaggcagatgtgttgtggcaaatggggtatacaggagccaacgtgcgcgttgccgtatttgatacgggtttaagcgaaaagcatccacacttcaaaaacgttaaggagagaactaactggacaaatgaacggaccctggatgacggccttggtcatggcacatttgttgccggcgtaatcgccagcatgcgggagtgccaaggttttgccccggacgcggaacttcatatatttagagtgtttactaacaaccaagtgtcctacacctcctggtttttggatgcctttaactatgctatcctaaagaagattgatgtcctaaacctctcaattggaggcccggattttatggatcatccctttgtggataaggtgtgggaacttaccgcaaataacgtcatcatggtgtccgccatcggcaatgacggcccgctctacggaacgttgaacaacccagctgatcagatggatgttatcggggtgggtgggatcgactttgaagacaacattgcgagattttccagtcgcgggatgacaacttgggaattgccaggaggctatggcagaatgaagccggacattgtgacatacggagccggtgtgcggggttcgggcgtgaagggtgggtgtagagcattaagcggcacaagtgtagcaagccctgttgtagccggagccgtcactttgctggtatccacagtgcagaaacgagagttggtgaacccagcgtctatgaagcaagccctgatagcgtctgcccgaagactacccggagttaacatgtttgagcagggccacggaaagcttgaccttctgcgagcttaccagatcctcaactcttacaagcctcaggcctcgctgtccccttcctatattgatctgacggagtgtccctacatgtggccatattgcagccagccaatttattatggcggcatgccgaccgtagtcaatgtaacaattctgaatggaatgggagtcaccgggcgtattgttgacaagcctgattggcagccttatctgcctcagaacggagataacatcgaggtagccttttcttatagctccgtgctgtggccatggtctggttatctcgctatctccattagtgtcaccaagaaggcagcctcatgggaaggcatagctcaaggccacgtgatgatcaccgtggcatcaccagccgagaccgaatctaaaaatggcgcagaacaaacatcaaccgtcaagctacctatcaaggtaaagatcattccaacacccccccggagtaagagagtgctttgggatcaatatcataatctgaggtaccccccagggtacttccctcgggataatcttcgaatgaagaatgacccattggattggaatggcgaccacatccatactaattttcgcgacatgtaccagcacctgagaagcatggggtatttcgtcgaggtgcttggggcccccttcacttgtttcgacgctagtcagtatggcaccttactgatggttgactcggaagaggagtatttccccgaggaaatcgctaagttaaggcgcgacgtggataatgggctatcactggtaattttttctgactggtacaacacctcagttatgcggaaagtcaagttctacgacgagaacactaggcagtggtggatgcccgataccggcggagcaaatattcccgcacttaacgagctcctgagtgtctggaacatgggctttagtgatgggctctacgaaggcgagttcacgttagccaatcacgacatgtactacgcctccggttgttcaattgccaagtttcctgaagacggggttgtgattacccaaactttcaaggatcagggcctggaagtgcttaagcaggaaacagccgtggtagaaaatgttcccatactggggttataccaaatccccgccgaaggtggaggtcgaatagttctgtatggagattcaaattgtctggatgacagccacaggcagaaggattgtttttggttactggatgctctgcttcagtacacctcgtatggcgtgacccccccttcactcagccattccggcaataggcagcggccgcctagtggcgccgggtccgtgactcccgaacgcatggaaggaaaccacctccacaggtattctaaggtgttagaggcccatcttggcgacccaaaaccgagacccctacccgcgtgcccccggctatcatgggctaagcctcagcccctcaatgaaaccgcccctagcaacttatggaaacaccagaaattgctctcgatcgatctggacaaggtcgtgttacctaactttaggtccaatagaccgcaggtgcggcccctcagtccgggagagagtggcgcctgggacatcccaggcggcatcatgcccggtagatataaccaggaagtgggtcaaaccatcccggtgtttgcattcctgggggctatggttgtgctggcatttttcgtggtccaaattaacaaagccaagtctaggccaaagaggcgaaagcctcgggtgaagaggccacagctgatgcagcaggtacacccccctaagaccccgagcgtatag

SEQ ID NO: 140772 - DNA, 1494 bp, Artificial Sequence
  derived and/or modified sequence
atggcacttgtcggactgcctgggcacctgcatttctgtgaccaagagtccggattcttagggcgacattgtagcgggccgtgccacgaccactgcggcttccccagccgggatcgcgtaaagaagtggtgtcggaccgactttaattccaaattgccaatcaaggtcaagattattccaaccccaccacgctccaaaagagtgctatgggatcaatatcataatcttcgttaccctcccggatattttcctcgggacaatctgaggatgaagaacgaccccctggactggaacggagaccacatccataccaattttcgggacatgtatcagcacctgagatccatggggtatttcgtggaggtcctgggcgcccccttcacctgctttgatgcctcccagtatggaaccctgctgatggtggattctgaggaagaatatttcccagaggagatcgcaaagttacggcgggatgtagacaatggattatctctcgtaatattttctgactggtataataccagcgtcatgcgcaaggtcaaattctacgacgagaacactcggcaatggtggatgcccgatacaggtggagccaacataccagccctcaacgagctcttatctgtctggaatatgggattctcagacgggctttacgagggcgagttcactctcgctaaccacgacatgtactacgcttcaggctgctcgattgccaagtttcctgaggatggagtcgtcatcacacaaacatttaaggatcaggggctggaggtgctcaagcaggagacagctgtggtagaaaatgtgcccatcttgggtctataccagattcccgccgaaggcggagggcgaatcgttctgtacggtgatagtaattgtcttgatgactcccaccgtcagaaggattgcttttggctgcttgatgctttgctgcagtatacctcttacggcgtgacaccccccagcctgtcacattctggtaatcgccaacgcccaccgtccggcgctggcagcgtgacaccagagagaatggagggcaaccatctccaccgatactcaaaagtgctcgaggcgcacctaggggatccaaaacctagaccactgcccgcctgtccacgcctgagctgggctaaaccacagcctctaaatgagactgccccaagcaatctatggaaacaccagaaactactcagcatagatctggacaaggtggttctcccaaatttccggagcaatagaccacaggtccgtccactgtcgccgggagagagcggagcctgggacattccaggcggaatcatgcccgggagatacaaccaggaagtggggcagaccataccggttttcgcgtttctgggggctatggtggtgcttgccttttttgtggttcagattaacaaggctaagtctaggcccaagcgacgtaagccaagagtgaagcggccccagttaatgcagcaagtccatccccctaagaccccctcagtctag

SEQ ID NO: 140773 - DNA, 3159 bp, Artificial Sequence
  derived and/or modified sequence
atgaagctggtgaacatctggctgctgctgctggtggtgctgctgtgtgggaagaagcacctgggggaccggctggagaagaagagctttgagaaggccccctgccccggctgcagccacctgaccctgaaggtggagttcagcagcacagtggtggagtatgagtacatcgtggccttcaacggctacttcaccgccaaggccagaaattccttcatcagcagcgccctgaagagcagcgaggtggacaactggaggatcatccccaggaacaaccccagcagtgactaccccagcgactttgaagtcatccagatcaaggagaagcagaaggccggcctgctgaccctggaggaccaccccaacatcaagagggtgaccccccagaggaaggtgttccgcagcctgaagtatgcagagagtgaccccaccgtgccctgcaatgagacccgctggagccagaagtggcagagcagccggcccctgcggcgggccagcctgagcctgggcagcggcttctggcacgccaccggccgccacagcagccggcggctgctgcgggccatcccccggcaggtggcccagaccctgcaggctgatgtgctgtggcagatgggctacaccggggccaacgtgcgggtggccgtgtttgacaccggcctgtctgagaagcacccccacttcaagaatgtgaaggagaggaccaactggaccaatgaaagaaccctggatgatggcctgggccacggcacctttgtggccggcgtgattgcctccatgagggagtgccagggctttgccccagatgctgagctgcacatcttccgggtcttcaccaacaaccaggtgtcctacacctcctggttcctggatgccttcaactatgccatcctgaagaagattgatgtgctgaacctgagcatcggcggccctgacttcatggaccacccctttgtggacaaggtgtgggagctgacagccaacaacgtcatcatggtgtctgccatcggaaatgatggccccctgtatggcaccctgaacaacccagctgaccagatggatgtgattggagtgggcggcatcgactttgaggacaacatcgcccgcttcagcagccggggcatgaccacctgggagctgcccggcggctacggccgcatgaagccagacatcgtgacctacggggccggcgtgcggggcagcggcgtgaagggcggctgccgggccctgagcggcacctctgtggccagccctgtggtggccggggctgtgaccctgctggtgtccacagtgcagaagcgggagctggtgaacccagcctccatgaagcaggccctgattgccagcgcccggcggctgcccggggtgaacatgtttgagcagggccacggcaagctggacctgctgcgggcctaccagatcctgaacagctacaagccccaggccagcctgagccccagctacatcgacctgacagaatgtccctacatgtggccctactgcagccagcccatctactatggaggcatgcccaccgtggtgaatgtgaccatcctgaatggcatgggcgtgacaggccgcatcgtggacaagccagactggcagccctacctgccccagaatggagacaacatcgaggtggccttctcctacagctctgtgctgtggccctggagcggctacctggccatcagcatctctgtgaccaagaaggccgcctcctgggagggcatcgcccagggccacgtgatgatcaccgtggccagccctgctgagacagagagcaagaatggagctgagcagaccagcacagtgaagctgcccatcaaggtgaagatcatccccaccccacccaggagcaagagggtgctgtgggaccagtaccacaacctgcgctacccacctggctacttcccccgggacaacctgaggatgaagaatgaccccctggactggaatggagaccacatccacaccaacttccgggacatgtaccagcacctgcgctccatgggctactttgtggaggtgctgggcgcccccttcacctgctttgatgccagccagtatggcaccctgctgatggtggacagcgaggaggagtacttccctgaggagatcgccaagctgcggagagatgtggacaatggcctgagcctggtgatcttcagtgactggtacaacacctctgtgatgaggaaggtgaagttctatgatgagaacacccggcagtggtggatgccagacaccggcggggccaacatcccagccctgaatgagctgctgtctgtgtggaacatgggcttcagtgatggcctgtatgaaggagagttcaccctggccaaccacgacatgtactatgccagcggctgcagcatcgccaagtttcctgaagatggagtggtgatcacccagaccttcaaggaccagggcctggaggtgctgaagcaggagacagctgtggtggagaatgtgcccatcctgggcctgtaccagatcccagctgagggcggcggcagaattgtgctgtatggagacagcaactgcctggatgacagccaccggcagaaggactgcttctggctgctggatgccctgctgcagtacaccagctatggagtgaccccacccagcctgagccacagcggcaaccggcagaggcctcccagcggggccggctctgtgaccccagagaggatggagggcaaccacctgcaccgctacagcaaggtgctggaggcccacctgggggaccccaagccccggcccctgcctgcctgcccccggctgtcctgggccaagccccagcccctgaatgaaacagcccccagcaacctgtggaagcaccagaagctgctgagcattgacctggacaaggtggtgctgcccaacttccgcagcaaccggccccaggtgcggcccctgagccctggagagagcggggcctgggacatccctgggggcatcatgcctggccgctacaaccaggaggtgggccagaccatccctgtgtttgccttcctgggcgccatggtggtgctggccttctttgtggtgcagatcaacaaggccaagagccggcccaagaggaggaagccccgggtgaagaggccccagctgatgcagcaggtgcacccccccaagaccccatctgtgtag

SEQ ID NO: 140774 - DNA, 1494 bp, Artificial Sequence
  derived and/or modified sequence
atggccctggtgggcctgcccggccacctgcacttctgtgaccaggagagcggcttcctgggccgccactgcagcggcccctgccacgaccactgcggcttccccagccgggacagagtgaagaagtggtgcaggacagacttcaacagcaagctgcccatcaaggtgaagatcatccccaccccacccaggagcaagagggtgctgtgggaccagtaccacaacctgcgctacccacctggctacttcccccgggacaacctgaggatgaagaatgaccccctggactggaatggagaccacatccacaccaacttccgggacatgtaccagcacctgcgctccatgggctactttgtggaggtgctgggcgcccccttcacctgctttgatgccagccagtatggcaccctgctgatggtggacagcgaggaggagtacttccctgaggagatcgccaagctgcggagagatgtggacaatggcctgagcctggtgatcttcagtgactggtacaacacctctgtgatgaggaaggtgaagttctatgatgagaacacccggcagtggtggatgccagacacaggaggagccaacatcccagccctgaatgagctgctgtctgtgtggaacatgggcttcagtgatggcctgtatgaaggagagttcaccctggccaaccacgacatgtactatgccagcggctgcagcatcgccaagttcccagaagatggagtggtgatcacccagaccttcaaggaccagggcctggaggtgctgaagcaggagacagctgtggtggagaatgtgcccatcctgggcctgtaccagatcccagctgagggcggcggccgcatcgtgctgtatggagacagcaactgcctggatgacagccaccggcagaaggactgcttctggctgctggatgccctgctgcagtacaccagctatggagtgaccccacccagcctgagccacagcggcaaccggcagaggcctccttctggagctggctctgtgaccccagagaggatggagggcaaccacctgcaccgctacagcaaggtgctggaggcccacctgggggaccccaagccccggcccctgcctgcctgcccccggctgtcctgggccaagccccagcccctgaatgaaacagcccccagcaacctgtggaagcaccagaagctgctgagcattgacctggacaaggtggtgctgcccaacttccgcagcaaccggccccaggtgcggcccctgagccctggagagagcggggcctgggacatccctgggggcatcatgcctggccgctacaaccaggaggtgggccagaccatccctgtgtttgccttcctgggcgccatggtggtgctggccttctttgtggtgcagatcaacaaggccaagagccggcccaagaggaggaagccccgggtgaagaggccccagctgatgcagcaggtgcacccccccaagacccccagcgtgtag

SEQ ID NO: 140775 - DNA, 4380 bp, Artificial Sequence
  derived and/or modified sequence
cagagcgcgcacgcaagccccgggagcgcgggacagacagggcacgctgggtcggcggagctgaggctcccagctgtgggcctcgctggcccggtcgcccagtctcgcgagagttgggagtaaacagccccgaatggagtgcccaggcgtgttcgccgcggaggcgccgttatcccgggcccgccggccctgagctcccggcggcgcagattggctcacagtggttgattgatcaaccccattggacgttggttctgtggtacaaatggagtacaggactcagtcgtcacggcctgagtgagagaagccttatttccaagatggagaagaagcggagaaagaaatgaaagcctctcttcaggctgaaccacaaaaggccatgggatttaacttttatttatgttgggcaagactgtaagatggctgattagtaatgttgcagcttttagctgaaacaaaaattcacttttaatcaagaagaaaaaagtgtgatttgaatatatgcaattttatgatcatattcgcttgtgaccatgaagcttgtcaacatctggctgcttctgctcgtggttttgctctgtgggaagaaacatctgggcgacagactggaaaagaaatcttttgaaaaggccccatgccctggctgttcccacctgactttgaaggtggaattctcatcaacagttgtggaatatgaatatattgtggctttcaatggatactttacagccaaagctagaaattcatttatttcaagtgccctgaagagcagtgaagtagacaattggagaattatacctcgaaacaatccatccagtgactaccctagtgattttgaggtgattcagataaaagaaaaacagaaagcggggctgctaacacttgaagatcatccaaacatcaaacgggtcacgccccaacgaaaagtctttcgttccctcaagtatgctgaatctgaccccacagtaccctgcaatgaaacccggtggagccagaagtggcaatcatcacgtcccctgcgaagagccagcctctccctgggctctggcttctggcatgctacgggaaggcattcgagcagacggctgctgagagccatcccgcgccaggttgcccagacactgcaggcagatgtgctctggcagatgggatatacaggtgctaatgtaagagttgctgtttttgacactgggctgagcgagaagcatccccacttcaaaaatgtgaaggagagaaccaactggaccaacgagcgaacgctggacgatgggttgggccatggcacattcgtggcaggtgtgatagccagcatgagggagtgccaaggatttgctccagatgcagaacttcacattttcagggtctttaccaataatcaggtatcttacacatcttggtttttggacgccttcaactatgccattttaaagaagatcgacgtgttaaacctcagcatcggcggcccggacttcatggatcatccgtttgttgacaaggtgtgggaattaacagctaacaatgtaatcatggtttctgctattggcaatgacggacctctttatggcactctgaataaccctgctgatcaaatggatgtgattggagtaggcggcattgactttgaagataacatcgcccgcttttcttcaaggggaatgactacctgggagctaccaggaggctacggtcgcatgaaacctgacattgtcacctatggtgctggcgtgcggggttctggcgtgaaaggggggtgccgggccctctcagggaccagtgttgcttctccagtggttgcaggtgctgtcaccttgttagtgagcacagtccagaagcgtgagctggtgaatcccgccagtatgaagcaggccctgatcgcgtcagcccggaggctccccggggtcaacatgtttgagcaaggccacggcaagctcgatctgctcagagcctatcagatcctcaacagctacaagccacaggcaagtttgagccccagctacatagatctgactgagtgtccctacatgtggccctactgctcccagcccatctactatggaggaatgccgacagttgttaatgtcaccatcctcaacggcatgggagtcacaggaagaattgtagataagcctgactggcagccctatttgccacagaacggagacaacattgaagttgccttctcctactcctcggtcttatggccttggtcgggctacctggccatctccatttctgtgaccaagaaagcggcttcctgggaaggcattgctcagggccatgtcatgatcactgtggcttccccagcagagacagagtcaaaaaatggtgcagaacagacttcaacagtaaagctccccattaaggtgaagataattcctactcccccgcgaagcaagagagttctctgggatcagtaccacaacctccgctatccacctggctatttccccagggataatttaaggatgaagaatgaccctttagactggaatggtgatcacatccacaccaatttcagggatatgtaccagcatctgagaagcatgggctactttgtagaggtcctcggggcccccttcacgtgttttgatgccagtcagtatggcactttgctgatggtggacagtgaggaggagtacttccctgaagagatcgccaagctccggagggacgtggacaacggcctctcgctcgtcatcttcagtgactggtacaacacttctgttatgagaaaagtgaagttttatgatgaaaacacaaggcagtggtggatgccggataccggaggagctaacatcccagctctgaatgagctgctgtctgtgtggaacatggggttcagcgatggcctgtatgaaggggagttcaccctggccaaccatgacatgtattatgcgtcagggtgcagcatcgcgaagtttccagaagatggcgtcgtgataacacagactttcaaggaccaaggattggaggttttaaagcaggaaacagcagttgttgaaaacgtccccattttgggactttatcagattccagctgagggtggaggccggattgtactgtatggggactccaattgcttggatgacagtcaccgacagaaggactgcttttggcttctggatgccctcctccagtacacatcgtatggggtgacaccgcctagcctcagtcactctgggaaccgccagcgccctcccagtggagcaggctcagtcactccagagaggatggaaggaaaccatcttcatcggtactccaaggttctggaggcccatttgggagacccaaaacctcggcctctaccagcctgtccacgcttgtcttgggccaagccacagcctttaaacgagacggcgcccagtaacctttggaaacatcagaagctactctccattgacctggacaaggtggtgttacccaactttcgatcgaatcgccctcaagtgaggcccttgtcccctggagagagcggcgcctgggacattcctggagggatcatgcctggccgctacaaccaggaggtgggccagaccattcctgtctttgccttcctgggagccatggtggtcctggccttctttgtggtacaaatcaacaaggccaagagcaggccgaagcggaggaagcccagggtgaagcgcccgcagctcatgcagcaggttcacccgccaaagaccccttcggtgtgaccggcagcctggctgaccgtgagggccagagagagccttcacggacggcgctggtgggtgagccgagctgtggtggcggctggtttaaaagggatccagtttccagctgcaggtttgttagagtctgttctacatgggcctgccctcctgtgatgggcagaggctcctggtacatcgagaagattcctgtggatcccgtcaggagggacttagtggctctgccgccagtgagacttcccgccggcagctgtgcgcaccaaagactcgggagaactggaaaggctgtctggggtcttctgactgcaggggaaggatgtactttccaaacaaatgatacaaccctgaccaagctaaaagacgcttgttaaaggctattttctatatttattgttgggaaaagtcactttaaagacttgtgctatttggaagcaaagctattttttttgtcagtggaatgcagtttttttactattccatcatgaggaacaacatagattccatgatctttttaatgacagtacagactgagatttgaaggaaacatgcacaaatctgtaaaacatagaccttcgctttatttttgtaagtatcacctgccaccatgttttgtaatttgaggtcttgatttcaccattgtcggtgaagaaaattttcaataaatatgtattacccgtctgaagcttaaaga

SEQ ID NO: 140776 - DNA, 3085 bp, Artificial Sequence
  derived and/or modified sequence
aacccaacacaaactcagttcagataaggggaaaccatgaaaccaacataattgccagagcacttgtgtcagcacttctgacacaaattatgtcagggtccccagcacctctcccaggctcggtgctttagggctcacgggactcagcctgtggtcatactcccagctaagattcattatagtggcacagcaaggatgcacagcggctctgtaagggaaaaagatgcctcacacggagaaagcctggagaaatccaggcgcagcttcctaagctctcccctctctcctgccaggcagggtctcacagagctggcccctttcctagcagcaagctgcattgacatgtgtacgtgtttttgcccagggaagccctctagagactcaagtccaagtttccattagggctggtcacgtactcattctctgccagtgacaactcccaaagctccagacttgcaaaagcagaggtgtccctgcacatcacactgtctgtatagacagcaggctggcacagaggccttatctgtgcaggagcattccagagccaagttcccagatgccagcctagggcagcgctgtaagcaagcccttctgaagctaggtctgctttgttaactctgtcttgtacagttgtgttgcttcattgtagttttctcatatgatctactctaacactgtattctttatttcagtttgagccccagctacatagatctgactgagtgtccctacatgtggccctactgctcccagcccatctactatggaggaatgccgacagttgttaatgtcaccatcctcaacggcatgggagtcacaggaagaattgtagataagcctgactggcagccctatttgccacagaacggagacaacattgaagttgccttctcctactcctcggtcttatggccttggtcgggctacctggccatctccatttctgtgaccaagaaagcggcttcctgggaaggcattgctcagggccatgtcatgatcactgtggcttccccagcagagacagagtcaaaaaatggtgcagaacagacttcaacagtaagctccccattaaggtgaagataattcctactcccccgcgaagcaagagagttctctgggatcagtaccacaacctccgctatccacctggctatttccccagggataatttaaggatgaagaatgaccctttagactggaatggtgatcacatccacaccaatttcagggatatgtaccagcatctgagaagcatgggctactttgtagaggtcctcggggcccccttcacgtgttttgatgccagtcagtatggcactttgctgatggtggacagtgaggaggagtacttccctgaagagatcgccaagctccggagggacgtggacaacggcctctcgctcgtcatcttcagtgactggtacaacacttctgttatgagaaaagtgaagttttatgatgaaaacacaaggcagtggtggatgccggataccggaggagctaacatcccagctctgaatgagctgctgtctgtgtggaacatggggttcagcgatggcctgtatgaaggggagttcaccctggccaaccatgacatgtattatgcgtcagggtgcagcatcgcgaagtttccagaagatggcgtcgtgataacacagactttcaaggaccaaggattggaggttttaaagcaggaaacagcagttgttgaaaacgtccccattttgggactttatcagattccagctgagggtggaggccggattgtactgtatggggactccaattgcttggatgacagtcaccgacagaaggactgcttttggcttctggatgccctcctccagtacacatcgtatggggtgacaccgcctagcctcagtcactctgggaaccgccagcgccctcccagtggagcaggctcagtcactccagagaggatggaaggaaaccatcttcatcggtactccaaggttctggaggcccatttgggagacccaaaacctcggcctctaccagcctgtccacgcttgtcttgggccaagccacagcctttaaacgagacggcgcccagtaacctttggaaacatcagaagctactctccattgacctggacaaggtggtgttacccaactttcgatcgaatcgccctcaagtgaggcccttgtcccctggagagagcggcgcctgggacattcctggagggatcatgcctggccgctacaaccaggaggtgggccagaccattcctgtctttgccttcctgggagccatggtggtcctggccttctttgtggtacaaatcaacaaggccaagagcaggccgaagcggaggaagcccagggtgaagcgcccgcagctcatgcagcaggttcacccgccaaagaccccttcggtgtgaccggcagcctggctgaccgtgagggccagagagagccttcacggacggcgctggtgggtgagccgagctgtggtggcggctggtttaaaagggatccagtttccagctgcaggtttgttagagtctgttctacatgggcctgccctcctgtgatgggcagaggctcctggtacatcgagaagattcctgtggatcccgtcaggagggacttagtggctctgccgccagtgagacttcccgccggcagctgtgcgcaccaaagactcgggagaactggaaaggctgtctggggtcttctgactgcaggggaaggatgtactttccaaacaaatgatacaaccctgaccaagctaaaagacgcttgttaaaggctattttctatatttattgttgggaaaagtcactttaaagacttgtgctatttggaagcaaagctattttttttgtcagtggaatgcagtttttttactattccatcatgaggaacaacatagattccatgatctttttaatgacagtacagactgagatttgaaggaaacatgcacaaatctgtaaaacatagaccttcgctttatttttgtaagtatcacctgccaccatgttttgtaatttgaggtcttgatttcaccattgtcggtgaagaaaattttcaataaatatgtattacccgtctgaagctt

SEQ ID NO: 140777 - DNA, 3159 bp, Artificial Sequence
  derived and/or modified sequence
atgaagctggtgaacatctggctgctgctgctggtggtgctgctgtgcgggaagaagcacctgggcgatcgattagaaaagaagagttttgagaaggcgccctgtcccggatgttctcatcttactctgaaggtcgaattttcgtcaactgtagtggaatacgaatatatagttgccttcaacggttactttaccgcgaaagcccgcaacagctttatctctagcgcgctgaagtcctccgaagtggacaattggcggatcatccctcgaaataacccctcttctgattacccttcagactttgaagtaatacagatcaaagagaagcaaaaagctggcctgttaacattggaagaccacccaaacataaagagggttacccctcaaaggaaagttttcagatccctgaagtacgccgagtctgatcccactgtaccgtgcaatgaaacccggtggtcccagaaatggcagtctagccgtcccctccggagagcctcgttgagtctgggatctgggttctggcacgccacagggagacactcatccaggcgacttcttcgggcaatccctagacaggtggctcagacactgcaggcggacgtgttatggcagatggggtacactggcgctaatgttcgggtggctgtcttcgatacgggcttatccgaaaaacatccccacttcaaaaacgttaaggaaagaaccaattggaccaacgaaagaacgctggacgatgggctgggacacgggacgtttgtggctggggtgatagccagcatgcgggaatgccagggattcgcacctgacgcagagctccatatctttcgggtctttacaaacaatcaggtgagctacacctcatggtttctcgacgcttttaactacgcaatattaaagaagatcgatgtgcttaatctgtcaatcggcggccccgattttatggaccatccctttgtagataaggtctgggaactcactgcgaacaacgtgattatggtgtcggcaattggcaacgatggtcccctgtacgggacgctcaataacccagccgatcagatggatgtgattggggtgggcggtatagacttcgaagacaacattgcccgcttttcttctcgcggaatgaccacctgggagttacctggcggatatggccgaatgaagcctgatatcgttacctatggtgcgggcgtacgcggatcaggagtcaaggggggttgccgcgcgctgtcgggcaccagtgttgcatcccccgttgtggctggtgccgttacattgttggtctctacagtgcagaagcgtgagctggtgaaccccgccagcatgaagcaggccctgattgcgtctgctcgacggctccctggcgttaacatgtttgaacagggacatgggaagctcgacctgctgcgggcctaccagatcttaaactcttataaaccccaggccagtctgtcccccagctacatcgaccttaccgagtgtccatatatgtggccttattgcagtcagccgatctactatggtggcatgcctactgtggtaaatgtgactattcttaatgggatgggcgttactggcaggatcgtggacaagcccgattggcagccttaccttccccagaatggtgataatattgaggtcgcattctcatattcgtcagttttgtggccctggagcggctatttggcgatttccattagtgtaacgaagaaggctgctagctgggagggcatcgcccagggacacgtgatgatcacggtggcttcaccagcggagactgagtccaaaaacggcgccgagcagactagtaccgtgaaactccccatcaaggtgaagatcatacccacacctccacggtcaaagagggtgctgtgggaccagtaccataacctcagatacccgccagggtatttccctcgcgataatctgaggatgaagaatgatccgctggattggaatggagatcatatacacacaaactttagggacatgtatcagcacctccgctccatgggctatttcgtagaagttctcggcgcccccttcacctgctttgatgccagtcaatacggaaccctgctgatggtggattctgaagaagagtactttcccgaagaaatcgctaaacttcgcagagacgtggataatggactcagcctcgtaatattttctgattggtacaatacatccgtaatgagaaaggtgaagttctatgatgagaacactcgccaatggtggatgcctgacaccgggggagccaatataccagcccttaatgagcttctatctgtttggaatatgggatttagcgatggattgtacgaaggagaattcaccctggccaatcatgatatgtattacgccagcggctgctcaatagccaaattccccgaggatggtgtagtgatcactcaaacctttaaggaccagggcctggaggtgctgaagcaagagaccgccgtggtcgagaacgtgccaatcctgggtctgtatcagatccccgccgaaggagggggccgaattgttctctatggggattcaaattgcctggacgactcccacagacagaaggattgtttttggctccttgacgcactgctgcagtacacttcttacggtgtgactcccccctcactttcccactcagggaatcgccagcgacctccaagcggggcaggctcagtaaccccagaaagaatggagggcaaccatctacatagatacagtaaggttctcgaggcccatttaggagaccccaaaccgagacctctgccagcgtgcccgagactctcatgggctaagccccagcccttgaacgagaccgctcccagtaacctttggaagcaccaaaaactactgtccattgatctggacaaagtggttcttccaaatttccgaagtaaccggccccaggtgcgtccactatcccctggtgaaagtggtgcctgggatattcctggtggcatcatgcccggccgttataaccaggaagtcggccagactatcccagtgtttgcttttttgggggccatggttgtgctggccttcttcgtggtgcaaattaataaggcgaaatcacggccaaaacggcgaaagccaagagtaaagaggcctcaactgatgcagcaggtccacccaccgaaaaccccgtcagtgtag

SEQ ID NO: 140778 - DNA, 1494 bp, Artificial Sequence
  derived and/or modified sequence
atggccctggtgggcctgcccggccacctgcacttctgcgaccaggaatccggctttcttggaagacactgctccggaccctgccacgatcactgcgggttcccctctcgggaccgggtgaagaagtggtgtcggacagatttcaacagcaagctgcctattaaggtcaagatcattcccacgcccccccgaagcaaacgtgtgttgtgggaccaatatcataatcttcggtacccccccggatactttcccagagataacctgcgtatgaagaatgacccactagactggaacggggaccatatccacacaaacttcagagatatgtatcagcaccttcgttccatgggatattttgtagaagtgctcggcgccccttttacttgcttcgatgcatcccaatacggcaccttgcttatggttgactccgaggaagagtacttccctgaggaaatagctaaacttaggcgtgatgttgataacgggctctctctggtgatcttctctgactggtacaacacttcagtcatgaggaaggtgaagttttatgacgagaacactaggcaatggtggatgcccgacacgggtggcgcgaacatccccgctctgaacgagttgctctcggtatggaacatgggatttagtgacggtctttacgagggtgagttcaccctggctaaccatgacatgtattacgcatccgggtgttccatcgctaaatttcctgaggacggcgtagtgatcactcaaacatttaaagatcagggccttgaggttctgaaacaggagacagctgtggtggagaatgtgcccattcttggactgtatcagatccctgccgagggaggcggtagaatcgttttgtatggggactctaactgcttggatgattcgcacaggcagaaggactgcttttggctcctcgacgctctgctgcaatataccagctacggagtcacgccacccagcctttctcattctggaaaccgtcagcggccccctagtggggccggaagcgtgaccccggagaggatggaagggaaccacctgcaccgatacagcaaagtacttgaggcacacctgggtgatcctaagcccaggcctcttcctgcttgcccccggttgtcttgggccaaaccacagcccctcaatgagacagctccaagtaacctgtggaaacaccagaaacttctgtctattgacttggataaagtggtcctcccaaatttcaggagcaaccgcccccaggtacggccactctctcctggcgagtctggggcctgggatattccaggcgggattatgccagggaggtataatcaggaagtgggccagactatcccagtttttgccttcctgggagccatggttgtcctcgcatttttcgtggtccagatcaacaaagcaaagagccgtcccaagcgcagaaaaccaagagtcaagagaccacagcttatgcagcaggtccacccccctaaaaccccatcagtttag

SEQ ID NO: 140779 - DNA, 3159 bp, Artificial Sequence
  derived and/or modified sequence
atgaagctagtgaacatctggctactgcttttggtggtcctcctttgcggcaaaaaacacctgggggataggcttgagaagaagtcatttgaaaaggctccttgtccgggatgctcacacctcactctgaaggtggagtttagcagcactgttgtggaatacgaatacattgtcgcttttaatggatatttcacggctaaggccagaaactcctttatctcttcggctctcaagtcctcggaggtggacaattggagaattattccaagaaataacccctcttcagactaccccagtgatttcgaagttatccagattaaagagaagcagaaggctgggctcttgacactggaggaccatcccaacataaagagagttactccacagaggaaggttttccgcagtttaaagtacgcagagagtgaccccacagtcccctgtaatgagactcggtggagccaaaagtggcagagttcccgacctttgagaagagccagtctgagcttggggtctggcttttggcacgccacgggccgacacagcagccgacgccttctgagggcaatcccccgacaggtggcccagactttgcaagccgacgttctgtggcaaatgggttatacgggcgcaaatgtccgagtggctgtgttcgacaccggtctgtccgaaaagcaccctcattttaaaaacgttaaggagaggaccaattggaccaatgagagaactctggacgatggtctaggacatgggaccttcgtggctggtgtgatcgcttccatgagggagtgtcagggcttcgctcctgatgctgaacttcacatcttccgcgtgttcacaaacaatcaggtatcatacaccagctggtttctggatgcttttaactatgctattctaaaaaagatcgacgtactgaatctctccattggcggtcctgactttatggaccatcccttcgtcgacaaagtttgggaactgacagccaacaatgtgatcatggtgtccgctatcggcaatgatggaccattgtacggcactctcaacaaccctgcggaccaaatggatgtgatcggtgtaggcggaattgattttgaagacaacattgcacggttttcctccagaggcatgacaacatgggagctgccgggtggctatggcaggatgaaacccgatatagtgacatatggggcaggggtccgcggaagcggggttaaaggtgggtgccgcgcactgtcaggcacttcagtcgcctcaccagttgtcgccggtgccgttacgttgctggtctccactgtgcaaaagcgtgaactagttaatcctgccagcatgaaacaggcactgatcgccagcgccagaagactgcccggagtcaatatgtttgaacagggacatgggaagctggatttactgcgggcttaccagatattgaacagttacaagcctcaggcttccctcagcccctcatatattgacctcactgagtgtccctatatgtggccttactgctcccagcctatctactatggtggaatgcctacagtagtgaacgtgactattcttaacgggatgggggtgaccggaaggattgtcgacaagccagactggcagccgtacctcccccagaatggcgacaacatagaagtggcattctcttattcatctgtcctttggccatggtcggggtacctggccatttccatctctgtaactaaaaaagccgcaagttgggaaggtattgcgcaggggcacgtcatgataacggtggctagcccagctgaaaccgagtcaaaaaacggagccgagcagacttcgacggtcaagctcccgatcaaagttaagatcataccaactccacccaggagtaagagggttctgtgggaccaataccataatctgcggtatccgcctgggtatttcccgcgagacaacctacgcatgaagaatgatcccttggattggaatggcgatcacatacacaccaactttcgggacatgtaccagcatctcaggagcatgggctacttcgtggaagttctgggagccccattcacttgcttcgatgcgtcacagtacgggacactcctgatggtcgattctgaagaagagtatttccccgaagagatcgcaaagctcagacgggatgtagacaacggcctctcactagtcattttcagtgactggtacaacacgtcggtcatgcggaaagttaagttttacgacgagaacaccaggcagtggtggatgccagacaccggaggtgccaacattcccgctttaaatgagcttctgtctgtgtggaacatgggattctccgacggtctctacgagggggagtttaccttggccaaccacgatatgtattatgcctctggctgctcaatcgcgaaatttcctgaggatggtgtggtaatcactcagacgtttaaagatcaaggtttggaagtgctaaaacaggaaacagccgttgttgagaatgtccccatattggggctgtaccagatacctgctgaagggggtggcaggattgtactgtatggagatagcaattgcctggatgatagccataggcagaaggactgcttctggctcttggatgccctgctgcagtacacgtcttacggtgtcacccccccaagcctctcgcactctggcaatcgtcagcggcctccctccggtgcagggagtgttacacctgaacgcatggagggcaatcacctgcacagatatagcaaggtgctggaagcacacttgggcgatcctaaaccacgccctcttcccgcatgtcctcggctgtcttgggccaaaccacagcctcttaacgagacagctccgtctaatctatggaaacaccaaaaattattgtccatcgatctcgataaggtggtgcttcctaactttcggagtaaccgcccacaggtgcgtcccctgagtccaggcgaatcgggagcatgggatatacctggaggaattatgccaggaagatataatcaagaggtggggcagacgataccagtattcgcattcctgggcgcaatggtcgttcttgctttcttcgtcgtgcagattaacaaagccaaatccaggcccaagcgccgaaagcctcgagtcaagagaccccaactcatgcagcaggtccatcctcccaaaacaccttccgtgtag

SEQ ID NO: 140780 - DNA, 1494 bp, Artificial Sequence
  derived and/or modified sequence
atggctcttgttggcttgcccggacacttacacttctgtgaccaggagtccggcttcctcggcagacattgttccggtccatgccatgaccactgtggctttcctagccgggacagagtgaaaaaatggtgcagaaccgatttcaacagcaaacttcctattaaagtgaagataattcctacccctcccaggtcgaagagagtactgtgggatcagtatcacaacttgcgctacccgccaggatatttcccgcgagacaatctcagaatgaagaacgatcccctggactggaacggggaccacattcacacaaatttcagagatatgtaccagcatctccgttctatgggctacttcgtggaagtgctcggagcaccatttacctgttttgatgcttctcagtatggcaccttgcttatggtggactctgaagaggagtattttccggaggaaattgctaagctaaggcgagatgtggataatggcctatccctggttatattttccgactggtacaacacttcagtgatgagaaaagttaaattttacgatgaaaatactagacaatggtggatgcctgacactgggggtgccaatatcccggctctcaacgaacttctctcagtgtggaacatggggttctcagacggcttgtacgagggggaattcacactggcaaatcatgacatgtattatgcttctggttgctctatcgccaaatttcctgaagacggcgtggtcatcactcagacatttaaggaccaaggccttgaggtcctgaagcaggagaccgctgtggtggaaaacgttccaatcctcggtttatatcagatcccagctgagggaggagggaggattgtcctgtacggcgactccaactgtctggacgattcacaccgccagaaggattgcttctggctgctggatgcactcctgcagtacacctcttatggggtgacaccaccgtctctgtcacatagcggcaatcggcagaggcctccgtccggcgcaggcagcgtaactcctgaacgcatggaaggcaaccacctacatagatactcaaaggtgctggaggctcacctgggagaccctaagcctaggcctcttccagcctgtcccagactaagttgggccaaaccacagccactaaacgaaactgcaccctcaaacctgtggaaacatcagaagctgctgagcatagatctcgacaaggtggtgctccccaattttagaagcaaccgccctcaagttcgcccactgtcaccaggcgaatccggagcttgggatatccccggtggcatcatgcccggacgctataaccaggaagtgggccagaccatccctgtgttcgccttcctgggtgccatggtcgtcttagccttcttcgtggtgcagattaacaaggccaagagtcgcccaaagagacgaaagccacgcgttaaaaggccccagcttatgcaacaggttcatccccctaagacacccagcgtgtag

SEQ ID NO: 140781 - DNA, 3159 bp, Artificial Sequence
  derived and/or modified sequence
atgaagctggtgaacatctggctgctgctgctggtggtgctgctgtgcggcaagaagcacctgggcgacagactggagaagaagagcttcgagaaggccccctgccccggctgcagccacctgaccctgaaggtggagttcagcagcaccgtggtggagtacgagtacatcgtggccttcaacggctacttcaccgccaaggccagaaacagcttcatcagcagcgccctgaagagcagcgaggtggacaactggagaatcatccccagaaacaaccccagcagcgactaccccagcgacttcgaggtgatccagatcaaggagaagcagaaggccggcctgctgaccctggaggaccaccccaacatcaagagagtgaccccccagagaaaggtgttcagaagcctgaagtacgccgagagcgaccccaccgtgccctgcaacgagaccagatggagccagaagtggcagagcagcagacccctgagaagagccagcctgagcctgggcagcggcttctggcacgccaccggcagacacagcagcagaagactgctgagagccatccccagacaggtggcccagaccctgcaggccgacgtgctgtggcagatgggctacaccggcgccaacgtgagagtggccgtgttcgacaccggcctgagcgagaagcacccccacttcaagaacgtgaaggagagaaccaactggaccaacgagagaaccctggacgacggcctgggccacggcaccttcgtggccggcgtgatcgccagcatgagagagtgccagggcttcgcccccgacgccgagctgcacatcttcagagtgttcaccaacaaccaggtgagctacaccagctggttcctggacgccttcaactacgccatcctgaagaagatcgacgtgctgaacctgagcatcggcggccccgacttcatggaccaccccttcgtggacaaggtgtgggagctgaccgccaacaacgtgatcatggtgagcgccatcggcaacgacggccccctgtacggcaccctgaacaaccccgccgaccagatggacgtgatcggcgtgggcggcatcgacttcgaggacaacatcgccagattcagcagcagaggcatgaccacctgggagctgcccggcggctacggcagaatgaagcccgacatcgtgacctacggcgccggcgtgagaggcagcggcgtgaagggcggctgcagagccctgagcggcaccagcgtggccagccccgtggtggccggcgccgtgaccctgctggtgagcaccgtgcagaagagagagctggtgaaccccgccagcatgaagcaggccctgatcgccagcgccagaagactgcccggcgtgaacatgttcgagcagggccacggcaagctggacctgctgagagcctaccagatcctgaacagctacaagccccaggccagcctgagccccagctacatcgacctgaccgagtgcccctacatgtggccctactgcagccagcccatctactacggcggcatgcccaccgtggtgaacgtgaccatcctgaacggcatgggcgtgaccggcagaatcgtggacaagcccgactggcagccctacctgccccagaacggcgacaacatcgaggtggccttcagctacagcagcgtgctgtggccctggagcggctacctggccatcagcatcagcgtgaccaagaaggccgccagctgggagggcatcgcccagggccacgtgatgatcaccgtggccagccccgccgagaccgagagcaagaacggcgccgagcagaccagcaccgtgaagctgcccatcaaggtgaagatcatccccaccccccccagaagcaagagagtgctgtgggaccagtaccacaacctgagatacccccccggctacttccccagagacaacctgagaatgaagaacgaccccctggactggaacggcgaccacatccacaccaacttcagagacatgtaccagcacctgagaagcatgggctacttcgtggaggtgctgggcgcccccttcacctgcttcgacgccagccagtacggcaccctgctgatggtggacagcgaggaggagtacttccccgaggagatcgccaagctgagaagagacgtggacaacggcctgagcctggtgatcttcagcgactggtacaacaccagcgtgatgagaaaggtgaagttctacgacgagaacaccagacagtggtggatgcccgacaccggcggcgccaacatccccgccctgaacgagctgctgagcgtgtggaacatgggcttcagcgacggcctgtacgagggcgagttcaccctggccaaccacgacatgtactacgccagcggctgcagcatcgccaagttccccgaggacggcgtggtgatcacccagaccttcaaggaccagggcctggaggtgctgaagcaggagaccgccgtggtggagaacgtgcccatcctgggcctgtaccagatccccgccgagggcggcggcagaatcgtgctgtacggcgacagcaactgcctggacgacagccacagacagaaggactgcttctggctgctggacgccctgctgcagtacaccagctacggcgtgaccccccccagcctgagccacagcggcaacagacagagaccccccagcggcgccggcagcgtgacccccgagagaatggagggcaaccacctgcacagatacagcaaggtgctggaggcccacctgggcgaccccaagcccagacccctgcccgcctgccccagactgagctgggccaagccccagcccctgaacgagaccgcccccagcaacctgtggaagcaccagaagctgctgagcatcgacctggacaaggtggtgctgcccaacttcagaagcaacagaccccaggtgagacccctgagccccggcgagagcggcgcctgggacatccccggcggcatcatgcccggcagatacaaccaggaggtgggccagaccatccccgtgttcgccttcctgggcgccatggtggtgctggccttcttcgtggtgcagatcaacaaggccaagagcagacccaagagaagaaagcccagagtgaagagaccccagctgatgcagcaggtgcacccccccaagacccccagcgtgtag

SEQ ID NO: 140782 - DNA, 1494 bp, Artificial Sequence
  derived and/or modified sequence
atggccctggtgggcctgcccggccacctgcacttctgcgaccaggagagcggcttcctgggcagacactgcagcggcccctgccacgaccactgcggcttccccagcagagacagagtgaagaagtggtgcagaaccgacttcaacagcaagctgcccatcaaggtgaagatcatccccaccccccccagaagcaagagagtgctgtgggaccagtaccacaacctgagatacccccccggctacttccccagagacaacctgagaatgaagaacgaccccctggactggaacggcgaccacatccacaccaacttcagagacatgtaccagcacctgagaagcatgggctacttcgtggaggtgctgggcgcccccttcacctgcttcgacgccagccagtacggcaccctgctgatggtggacagcgaggaggagtacttccccgaggagatcgccaagctgagaagagacgtggacaacggcctgagcctggtgatcttcagcgactggtacaacaccagcgtgatgagaaaggtgaagttctacgacgagaacaccagacagtggtggatgcccgacaccggcggcgccaacatccccgccctgaacgagctgctgagcgtgtggaacatgggcttcagcgacggcctgtacgagggcgagttcaccctggccaaccacgacatgtactacgccagcggctgcagcatcgccaagttccccgaggacggcgtggtgatcacccagaccttcaaggaccagggcctggaggtgctgaagcaggagaccgccgtggtggagaacgtgcccatcctgggcctgtaccagatccccgccgagggcggcggcagaatcgtgctgtacggcgacagcaactgcctggacgacagccacagacagaaggactgcttctggctgctggacgccctgctgcagtacaccagctacggcgtgaccccccccagcctgagccacagcggcaacagacagagaccccccagcggcgccggcagcgtgacccccgagagaatggagggcaaccacctgcacagatacagcaaggtgctggaggcccacctgggcgaccccaagcccagacccctgcccgcctgccccagactgagctgggccaagccccagcccctgaacgagaccgcccccagcaacctgtggaagcaccagaagctgctgagcatcgacctggacaaggtggtgctgcccaacttcagaagcaacagaccccaggtgagacccctgagccccggcgagagcggcgcctgggacatccccggcggcatcatgcccggcagatacaaccaggaggtgggccagaccatccccgtgttcgccttcctgggcgccatggtggtgctggccttcttcgtggtgcagatcaacaaggccaagagcagacccaagagaagaaagcccagagtgaagagaccccagctgatgcagcaggtgcacccccccaagacccccagcgtgtag

SEQ ID NO: 140783 - protein, 484 aa, Artificial Sequence [sequence omitted]

SEQ ID NO: 140784 - DNA, 1455 bp, Artificial Sequence
  derived and/or modified sequence
atggctccctggctgcagctcctgtctctcctgggtctgttgccaggcgccgtcgcagcgccggcccaacctcgggccgccagcttccaggcatggggacctccttccccagaactgctggctcccacccgctttgccttggaaatgtttaatcgtgggcgggcggccgggacaagagcggtgttagggcttgtcaggggacgggttcgcagagctggacaaggcagcctgtactccctggaggctacattagaagagcctccctgtaacgaccctatggtgtgccggttgcctgtgagcaagaaaacattactgtgttcctttcaagtgctcgatgagctcgggcgccacgtgcttcttcgcaaggactgcggaccggtcgacacgaaggtccccggggccggtgaacctaaatcagcctttacccagggctcagccatgatttcttcattgagccagaaccatccagacaatcgaaacgaaacctttagctcagttattagtctgctcaacgaagatcctctcagtcaggatctaccggtaaagatggcatccatttttaagaactttgtgataacctacaaccgcacttacgaatccaaggaggaggctcggtggagactgtccgtctttgtaaataacatggtgagagcccagaagattcaggctctcgatcgcgggacggctcagtacggagtgaccaaattctccgacctcactgaggaggaatttcggaccatctatcttaacaccctgctgcgaaaggaacccggcaataaaatgaagcaagctaaaagcgtcggcgacctcgcccccccagagtgggattggcgtagtaaaggcgcagtgaccaaggtgaaagatcagggaatgtgcggctcatgctgggcattcagcgtcacggggaatgtcgagggtcagtggttcttaaaccagggaacactgctgtccttgagtgagcaggaactcttggattgcgataagatggataaagcgtgcatggggggactcccgtcaaatgcttatagcgccatcaagaatctaggaggtctggagaccgaggacgattactcataccaagggcatatgcaatcctgcaactttagcgctgaaaaagcaaaggtatatattaacgacagtgtggagttatcccagaacgaacagaagctcgcagcatggctcgcaaaaaggggccctatttctgtggctatcaatgcatttggaatgcagttttatagacatggcatctcccggccccttcgacccttatgcagcccatggctcattgaccacgccgttctgctggttggttatggaaacagatccgacgtgcccttttgggctattaaaaattcctggggcaccgattggggggagaaggggtattactacttgcacaggggaagtggggcatgtggcgtcaacaccatggcatcgtcagcagttgtagactag

SEQ ID NO: 140785 - DNA, 1455 bp, Artificial Sequence
  derived and/or modified sequence
atggccccctggctgcagctgctgagcctgctgggcctgctgcctggagctgtggccgccccagcccagccccgggccgccagcttccaggcctggggcccccccagccctgagctgctggcccccaccaggtttgccctggagatgttcaacagaggccgggccgccggcaccagggctgtgctgggcctggtgcggggccgggtgcggcgggccggccagggcagcctgtacagcctggaggccaccctggaggagcccccctgcaatgaccccatggtgtgccgcctgcctgtgtccaagaagaccctgctgtgcagcttccaggtgctggatgagctgggcagacatgtgctgctgaggaaggactgtggccctgtggacaccaaggtgcctggggccggggagcccaagagcgccttcacccagggcagcgccatgatcagcagcctgagccagaaccacccagacaacagaaatgagaccttcagcagcgtcatcagcctgctgaatgaagaccccctgagccaggacctgcctgtgaagatggccagcatcttcaagaacttcgtcatcacctacaacagaacctatgagagcaaggaggaggcccgctggaggctgtctgtgtttgtgaacaacatggtgcgggcccagaagatccaggccctggaccggggcacagcccagtatggagtgaccaagttcagtgacctgacagaggaggagttccgcaccatctacctgaacaccctgctgaggaaggagcccggcaacaagatgaagcaggccaagtctgtgggggacctggcccctcctgagtgggactggaggagcaaaggagctgtgaccaaggtgaaggaccagggcatgtgtggcagctgctgggccttctctgtgactggaaatgtggagggccagtggttcctgaaccagggcaccctgctgagcctgtctgagcaggagctgctggactgtgacaagatggacaaggcctgcatgggcggcctgcccagcaatgcctacagcgccatcaagaacctgggcggcctggagacagaagatgactacagctaccagggccacatgcagagctgcaacttctctgctgagaaggccaaggtgtacatcaatgacagcgtggagctgagccagaatgagcagaagctggccgcctggctggccaagaggggccccatctctgtggccatcaatgccttcggcatgcagttctaccgccacggcatcagccggcccctgcggcccctgtgcagcccctggctgattgaccatgctgtgctgctggtgggctacggcaacagaagtgatgtgcccttctgggccatcaagaacagctggggcacagactggggcgagaagggctactactacctgcaccggggcagcggggcctgtggggtgaacaccatggccagcagcgctgtggtggactag

SEQ ID NO: 140786 - DNA, 1455 bp, Artificial Sequence
  derived and/or modified sequence
atggccccctggctgcagctgctgagcctgctgggcctgctgcccggggcagtggctgcccccgctcagcccagggctgcatcatttcaggcgtgggggccgccaagccctgaactgttggctcctactcgattcgccctggaaatgttcaatagaggccgcgccgcagggacccgcgctgtgctcggcctggttcgaggaagagtaagacgggcaggtcagggatctctttatagccttgaggccacactcgaggaacccccttgcaatgatcccatggtgtgtcggctgccggtgtcaaagaagactcttctctgttcctttcaggtgctcgatgaattaggacggcatgtgctcttgaggaaagactgtggcccagtggataccaaggtccccggcgctggcgaacccaaatcagccttcactcagggttccgccatgatttcttcactctctcagaatcacccagataaccggaacgagactttcagcagtgtgatttcactgttgaacgaagatcctctgtcccaagacttgccggtcaaaatggccagtatattcaagaacttcgttattacatacaatcggacgtatgagtccaaagaggaggcccgctggagactctctgttttcgttaacaatatggtcagagcccagaagattcaagccctggacagaggcactgcacagtatggggtgacaaagttctctgaccttacagaggaagagttccggacgatctatcttaatacactgctgaggaaagagcctggtaacaagatgaagcaggccaagagcgttggtgatctggcccctccagaatgggactggcggagtaagggagccgtgactaaggtgaaggaccaagggatgtgcggatcttgctgggccttttcagtgaccggcaatgtggaaggccaatggttcctgaaccaaggaaccctgctcagcttatccgagcaggagttgctggactgcgataaaatggacaaggcttgtatgggcggacttcctagcaacgcctattcggcaatcaagaacctgggcggcttggagactgaggatgattattcttaccaggggcatatgcagtcctgcaatttcagcgccgaaaaagctaaagtatacatcaacgattccgtggagttaagtcaaaatgagcagaaactcgccgcctggctggcaaagaggggccccattagcgtggccattaatgcctttggtatgcagttctaccggcacggaatttccagacccttgaggcccctctgcagcccatggctcatcgaccatgctgtgctgcttgtgggttatggcaacaggagcgatgtgccattctgggctatcaagaactcatgggggaccgactggggggaaaagggttactattacctgcacagagggagcggagcatgtggagtcaatacgatggcatcatctgctgtcgtggattag

SEQ ID NO: 140787 - DNA, 1455 bp, Artificial Sequence
  derived and/or modified sequence
atggcgccttggctccagcttttaagtctgctgggactcctgcccggtgccgttgcagccccagcgcagccccgtgccgcatcattccaagcatggggaccaccgtcccctgagctgttagcacccactaggttcgctctggagatgtttaacagggggcgtgccgcaggcactcgtgcggtattgggactagtccgagggagagtccggagagcaggccagggcagtctctacagcctggaggcgacactggaggaacccccttgtaacgatcccatggtgtgcagactccctgtgagcaaaaaaacgttgctgtgcagctttcaggtgctcgatgagctcggtaggcatgtgttgctccggaaggattgcgggccagttgacactaaagttccgggagctggcgagcctaaaagtgcctttacccagggctcagcaatgattagcagcctgtctcagaaccaccccgacaataggaacgaaaccttcagctctgttataagccttcttaatgaggaccctttgtctcaggacctgcccgtgaagatggccagcattttcaagaactttgtgattacatacaataggacttatgagagtaaggaggaggcaagatggcggctatcagtgttcgtcaacaatatggtccgcgcacagaagattcaggccctagatagaggcacagcacagtacggcgtgaccaagttctccgacctgaccgaggaggagttccgtacaatctatcttaacaccctgctgaggaaggaaccaggcaacaaaatgaaacaggccaagagcgtgggggatctggcccctcccgaatgggactggcgcagcaaaggtgccgtgacaaaggtcaaggaccaggggatgtgtggcagctgctgggccttcagcgtgaccgggaacgttgaggggcagtggttcctcaaccagggcacacttctcagtttgtccgagcaggaacttctggactgtgacaaaatggacaaggcttgcatgggcggtctcccttccaacgcgtactctgccataaagaatttgggcggtctggaaaccgaagacgattatagctatcagggccatatgcaaagctgcaatttctcggccgagaaagctaaggtgtacataaatgactctgtcgagctgagccagaacgagcagaagctcgctgcctggctggccaaacggggtccaataagcgtcgccatcaatgcctttggaatgcagttttaccggcatggaatatctcgccctctgcggccattgtgtagcccttggctcatcgatcacgctgtgctactcgtagggtacgggaaccgaagtgacgtcccattctgggctataaaaaacagctggggcaccgactggggtgagaaaggctattattacctgcatcgagggtccggcgcttgcggagtcaacaccatggccagctccgccgtggtggattag

SEQ ID NO: 140788 - DNA, 2035 bp, Artificial Sequence
  derived and/or modified sequence
gtgccgtcgccccgctggagggaggactcaggccccgctggccgcgggctcggtacccggtgggtcggtggagcgtctgttgggtccgggccgccggcttcgccctcgccatggcgccctggctgcagctcctgtcgctgctggggctgctcccgggcgcagtggccgcccccgcccagccccgagccgccagctttcaggcctgggggccgccgtccccggagctgctggcgcccacccgcttcgcgctggagatgttcaaccgcggccgggctgcggggacgcgggccgtgctgggccttgtgcgcggccgcgtccgccgggcgggtcaggggtcgctgtactccctggaggccaccctggaggagccaccctgcaacgaccccatggtgtgccggctccccgtgtccaagaaaaccctgctctgcagcttccaagtcctggatgagctcggaagacacgtgctgctgcggaaggactgtggcccagtggacaccaaggttccaggtgctggggagcccaagtcagccttcactcagggctcagccatgatttcttctctgtcccaaaaccatccagacaacagaaacgagactttcagctcagtcatttccctgttgaatgaggatcccctgtcccaggacttgcctgtgaagatggcttcaatcttcaagaactttgtcattacctataaccggacatatgagtcaaaggaagaagcccggtggcgcctgtccgtctttgtcaataacatggtgcgagcacagaagatccaggccctggaccgtggcacagctcagtatggagtcaccaagttcagtgatctcacagaggaggagttccgcactatctacctgaatactctcctgaggaaagagcctggcaacaagatgaagcaagccaagtctgtgggtgacctcgccccacctgaatgggactggaggagtaagggggctgtcacaaaagtcaaagaccagggcatgtgtggctcctgctgggccttctcagtcacaggcaatgtggagggccagtggtttctcaaccaggggaccctgctctccctctctgaacaggagctcttggactgtgacaagatggacaaggcctgcatgggcggcttgccctccaatgcctactcggccataaagaatttgggagggctggagacagaggatgactacagctaccagggtcacatgcagtcctgcaacttctcagcagagaaggccaaggtctacatcaatgactccgtggagctgagccagaacgagcagaagctggcagcctggctggccaagagaggcccaatctccgtggccatcaatgcctttggcatgcagttttaccgccacgggatctcccgccctctccggcccctctgcagcccttggctcattgaccatgcggtgttgcttgtgggctacggcaaccgctctgacgttcccttttgggccatcaagaacagctggggcactgactggggtgagaagggttactactacttgcatcgtgggtccggggcctgtggcgtgaacaccatggccagctcggcggtggtggactgaagaggggcccccagctcgggacctggtgctgatcagagtggctgctgccccagcctgacatgtgtccaggcccctccccgggaggtacagctggcagagggaaaggcactgggtacctcagggtgagcagagggcactgggctggggcacagcccctgcttccctgcaccccattcccaccctgaagttctgcacctgcacctttgttgaattgtggtagcttaggaggatgtcggggtgaagggtggtatcttggcagttgaagctggggcaagaactctgggcttgggtaatgagcaggaagaaaattttctgatcttaagcccagctctgttctgcccccgctttcctctgtttgatactataaattttctggttcccttggatttagggatagtgtccctctccatgtccaggaaacttgtaaccacccttttctaacagcaataaagaggtgtccttgtcccgag

SEQ ID NO: 140789 - DNA, 1455 bp, Artificial Sequence
  derived and/or modified sequence
atggccccctggctgcagctgctgagcctgctgggcctgctgcccggcgccgtggccgcccccgcccagcccagagccgccagcttccaggcctggggcccccccagccccgagctgctggcccccaccagattcgccctggagatgttcaacagaggcagagccgccggcaccagagccgtgctgggcctggtgagaggcagagtgagaagagccggccagggcagcctgtacagcctggaggccaccctggaggagcccccctgcaacgaccccatggtgtgcagactgcccgtgagcaagaagaccctgctgtgcagcttccaggtgctggacgagctgggcagacacgtgctgctgagaaaggactgcggccccgtggacaccaaggtgcccggcgccggcgagcccaagagcgccttcacccagggcagcgccatgatcagcagcctgagccagaaccaccccgacaacagaaacgagaccttcagcagcgtgatcagcctgctgaacgaggaccccctgagccaggacctgcccgtgaagatggccagcatcttcaagaacttcgtgatcacctacaacagaacctacgagagcaaggaggaggccagatggagactgagcgtgttcgtgaacaacatggtgagagcccagaagatccaggccctggacagaggcaccgcccagtacggcgtgaccaagttcagcgacctgaccgaggaggagttcagaaccatctacctgaacaccctgctgagaaaggagcccggcaacaagatgaagcaggccaagagcgtgggcgacctggccccccccgagtgggactggagaagcaagggcgccgtgaccaaggtgaaggaccagggcatgtgcggcagctgctgggccttcagcgtgaccggcaacgtggagggccagtggttcctgaaccagggcaccctgctgagcctgagcgagcaggagctgctggactgcgacaagatggacaaggcctgcatgggcggcctgcccagcaacgcctacagcgccatcaagaacctgggcggcctggagaccgaggacgactacagctaccagggccacatgcagagctgcaacttcagcgccgagaaggccaaggtgtacatcaacgacagcgtggagctgagccagaacgagcagaagctggccgcctggctggccaagagaggccccatcagcgtggccatcaacgccttcggcatgcagttctacagacacggcatcagcagacccctgagacccctgtgcagcccctggctgatcgaccacgccgtgctgctggtgggctacggcaacagaagcgacgtgcccttctgggccatcaagaacagctggggcaccgactggggcgagaagggctactactacctgcacagaggcagcggcgcctgcggcgtgaacaccatggccagcagcgccgtggtggactag

SEQ ID NO: 140790 - protein, 162 aa, Artificial Sequence
  derived and/or modified sequence
MAETVADTRRLITKPQNLNDAYGPPSNFLEIDVSNPQTVGVGRGRFTTYEIRVKTNLPIFKLKESTVRRRYSDFEWLRSELERESKVVVPPLPGKAFLRQLPFRGDDGIFDDNFIEERKQGLEQFINKVAGHPLAQNERCLHMFLQDEIIDKSYTPSKIRHA

SEQ ID NO: 140791 - DNA, 489 bp, Artificial Sequence
  derived and/or modified sequence
atggccgagaccgtggccgacaccagaagactgatcaccaagccccagaacctgaacgacgcctacggcccccccagcaacttcctggagatcgacgtgagcaacccccagaccgtgggcgtgggcagaggcagattcaccacctacgagatcagagtgaagaccaacctgcccatcttcaagctgaaggagagcaccgtgagaagaagatacagcgacttcgagtggctgagaagcgagctggagagagagagcaaggtggtggtgccccccctgcccggcaaggccttcctgagacagctgcccttcagaggcgacgacggcatcttcgacgacaacttcatcgaggagagaaagcagggcctggagcagttcatcaacaaggtggccggccaccccctggcccagaacgagagatgcctgcacatgttcctgcaggacgagatcatcgacaagagctacacccccagcaagatcagacacgcctag

SEQ ID NO: 140792 - DNA, 489 bp, Artificial Sequence
  derived and/or modified sequence
atggccgaaacggtagcagatactaggcgactcatcacaaagccccagaacttgaatgatgcatatgggcccccatctaattttctggaaattgacgtgtctaaccctcagaccgttggcgtgggacgtgggagatttaccacctacgaaatccgcgtgaagactaacttgcctatctttaagctcaaggaaagcacagtgaggcgccgatatagcgattttgagtggcttagatctgagttagaacgagagtctaaggtggtggtgccgcctctcccaggaaaggccttcctgcggcagctccctttccggggcgatgacggcatttttgatgacaatttcatagaggagcgcaagcaggggcttgaacagttcattaacaaagtcgcaggacatcccctggctcagaacgaacgttgcctgcatatgttccttcaggacgaaataatcgataaatcctataccccttctaaaatccgacacgcatag

SEQ ID NO: 140793 - DNA, 489 bp, Artificial Sequence
  derived and/or modified sequence
atggccgagaccgtggccgacaccaggaggctcatcaccaagccccagaacctgaatgatgcctacggcccccccagcaacttcctggagattgatgtgagcaacccccagacagtgggcgtgggccggggccgcttcaccacctatgagatccgggtgaagaccaacctgcccatcttcaagctgaaggagagcacagtgagaagacgctacagcgactttgagtggctgcggtctgagctggagcgggagagcaaggtggtggtgccccccctgcccgggaaggccttcctgcggcagctgcccttcagaggagatgatggcatctttgatgacaacttcatcgaggagaggaagcagggcctggagcagttcatcaacaaggtggccggccaccccctggcccagaatgaacgctgcctgcacatgttcctgcaggatgagatcatcgacaagagctacacccccagcaagatcagacatgcctag

SEQ ID NO: 140794 - DNA, 489 bp, Artificial Sequence
  derived and/or modified sequence
atggccgagaccgtggccgacacccggcggctgatcaccaagccccagaaccttaatgatgcctatgggccacccagcaactttctcgaaatagatgtcagcaacccacagacagttggtgtgggtcgagggagattcaccacatacgagatcagggtgaagacaaacttaccaattttcaagcttaaagagagcacagtaaggcgtcggtattctgacttcgagtggcttaggagcgaactggagcgcgaaagcaaggtagttgtgccccccttgcccgggaaagcatttctacggcagctgccctttaggggagatgacgggatcttcgacgataactttatcgaagaaaggaaacagggcctggaacaatttatcaataaagtggctggccacccactcgctcagaatgagagatgtctccacatgttcttgcaggacgagatcattgacaagagctatacgcctagtaaaattcggcacgcctag

SEQ ID NO: 140795 - DNA, 489 bp, Artificial Sequence
  derived and/or modified sequence
atggctgagacagtggccgacacacgcagactgatcactaagccacagaaccttaacgacgcctatgggcctccttccaactttctggagatcgacgtgtccaacccacagacagttggagtgggcaggggacggtttaccacttacgagatccgggtgaagacaaatttgcctatcttcaaattgaaagagtcaactgtgagacgtcggtactccgactttgagtggctaagatctgagctcgagcgcgagtctaaagtcgtggtcccgcctttgccaggaaaagctttccttaggcagctgcccttccggggtgatgatggcatttttgatgataatttcatcgaggagcgcaagcagggtctagaacagttcattaacaaggtggccggacaccccctggcccagaatgagaggtgcctgcatatgtttctacaggatgagatcatcgacaagagctacaccccgtcgaaaatcagacatgcctag

SEQ ID NO: 140796 - DNA, 1755 bp, Artificial Sequence
  derived and/or modified sequence
agtccggccggaacctgtttgcgaccccgagtcccatgacaccgcttctcctcacaccccagtccgcagtgcccctccccagcctcggccgggcctcccgggagccgggcgtggcgttccagctagtgagccgtttctcccctgggctcggaggcggaagcttgaggggcgcggggaggagcttcgcgtgcggggtgaacgcccgctctacgtgctcgttctcttcgcgaccgctgcgcgcgagccccgtgtccccacggcgggcagcagcggcggcggcggcggctgaacgcggagggggcggagggagcccgcggcggcggcagcagctacagcgaaatggcggagaccgtggctgacacccggcggctgatcaccaagccgcagaacctgaatgacgcctacggaccccccagcaacttcctcgagatcgatgtgagcaacccgcaaacggtgggggtcggccggggccgcttcaccacttacgaaatcagggtcaagacaaatcttcctattttcaagctgaaagaatctactgttagaagaagatacagtgactttgaatggctgcgaagtgaattagaaagagagagcaaggtcgtagttcccccgctccctgggaaagcgtttttgcgtcagcttccttttagaggagatgatggaatatttgatgacaattttattgaggaaagaaaacaagggctggagcagtttataaacaaggtcgctggtcatcctctggcacagaacgaacgttgtcttcacatgtttttacaagatgaaataatagataaaagctatactccatctaaaataagacatgcctgaaatttggcaagaaggggcaaaaacgtgactattaatgattgataagcaccagtgaagaagttctaacttttagcatgctgcacagaaactggtataacatgccttcagtatactaacactcatatgctcagttttgttttgttttggcagttgacaagaagttaatttgctttagtaaaaatccctcattccagcctttctatataaatagctctttcttgctgttttaatgtggtgcacactatagcctcacaaacctgttattccagtgtaatctgcagtgtcgtaactaaagttactggcttggtcttatttgcacagtttttgcgtcttgtttgcttcttgcatctgattaactagaatatttctctttcccccttttaatttgtgatgtcacttgaccccatttatgtgtaggagcactacaccattggtttccaatactgcacacataagatacatacttgtgtgcagaaagtatcttcctccaggcttgtaatacccttcacatggaagattaatgagggaaatctttatattctgtataaaaacaaaagcaaatttatatactaaaatcatttgtctaaaaatttaagttgttttcaaataaaaattaaaatgcatttctgatatgcactgattgtgttgcctccagctttttttgctctctatgagtgactacttaagtcacttgttgagagggattatttactaattatatacttctcattcctgtaactccattccctttaaacagtggtgatatcaaatatacttccatccattgaatggggtatttttaacaacaacaaaagtgatatactaaaaaatgtattgcttaaggcttattgaatcattttgaagcactttgtgtatttgaaaactgctttataatctcatttattaaaaggactttcaaagataaaa

SEQ ID NO: 140797 - protein, 535 aa, Artificial Sequence
  derived and/or modified sequence
MEAPTVETPPDPSPPSAPAPALVPLRAPDVARLREEQEKVVTNCQERIQHWKKVDNDYNALRERLSTLPDKLSYNIMVPFGPFAFMPGKLVHTNEVTVLLGDNWFAKCSAKQAVGLVEHRKEHVRKTIDDLKKVMKNFESRVEFTEDLQKMSDAAGDIVDIREEIKCDFEFKAKHRIAHKPHSKPKTSDIFEADIANDVKSKDLLADKELWARLEELERQEELLGELDSKPDTVIANGEDTTSSEEEKEDRNTNVNAMHQVTDSHTPCHKDVASSEPFSGQVNSQLNCSVNGSSSYHSDDDDDDDDDDDDDNIDDDDGDNDHEALGVGDNSIPTIYFSHTVEPKRVRINTGKNTTLKFSEKKEEAKRKRKNSTGSGHSAQELPTIRTPADIYRAFVDVVNGEYVPRKSILKSRSRENSVCSDTSESSAAEFDDRRGVLRSISCEEATCSDTSESILEEEPQENQKKLLPLSVTPEAFSGTVIEKEFVSPSLTPPPAIAHPALPTIPERKEVLLEASEETGKRVSKFKAARLQQKD

SEQ ID NO: 140798 - DNA, 1608 bp, Artificial Sequence
  derived and/or modified sequence
atggaggcccccaccgtggagaccccccccgaccccagcccccccagcgcccccgcccccgccctggtgcccctgagagcccccgacgtggccagactgagagaggagcaggagaaggtggtgaccaactgccaggagagaatccagcactggaagaaggtggacaacgactacaacgccctgagagagagactgagcaccctgcccgacaagctgagctacaacatcatggtgcccttcggccccttcgccttcatgcccggcaagctggtgcacaccaacgaggtgaccgtgctgctgggcgacaactggttcgccaagtgcagcgccaagcaggccgtgggcctggtggagcacagaaaggagcacgtgagaaagaccatcgacgacctgaagaaggtgatgaagaacttcgagagcagagtggagttcaccgaggacctgcagaagatgagcgacgccgccggcgacatcgtggacatcagagaggagatcaagtgcgacttcgagttcaaggccaagcacagaatcgcccacaagccccacagcaagcccaagaccagcgacatcttcgaggccgacatcgccaacgacgtgaagagcaaggacctgctggccgacaaggagctgtgggccagactggaggagctggagagacaggaggagctgctgggcgagctggacagcaagcccgacaccgtgatcgccaacggcgaggacaccaccagcagcgaggaggagaaggaggacagaaacaccaacgtgaacgccatgcaccaggtgaccgacagccacaccccctgccacaaggacgtggccagcagcgagcccttcagcggccaggtgaacagccagctgaactgcagcgtgaacggcagcagcagctaccacagcgacgacgacgacgacgacgacgacgacgacgacgacgacaacatcgacgacgacgacggcgacaacgaccacgaggccctgggcgtgggcgacaacagcatccccaccatctacttcagccacaccgtggagcccaagagagtgagaatcaacaccggcaagaacaccaccctgaagttcagcgagaagaaggaggaggccaagagaaagagaaagaacagcaccggcagcggccacagcgcccaggagctgcccaccatcagaacccccgccgacatctacagagccttcgtggacgtggtgaacggcgagtacgtgcccagaaagagcatcctgaagagcagaagcagagagaacagcgtgtgcagcgacaccagcgagagcagcgccgccgagttcgacgacagaagaggcgtgctgagaagcatcagctgcgaggaggccacctgcagcgacaccagcgagagcatcctggaggaggagccccaggagaaccagaagaagctgctgcccctgagcgtgacccccgaggccttcagcggcaccgtgatcgagaaggagttcgtgagccccagcctgacccccccccccgccatcgcccaccccgccctgcccaccatccccgagagaaaggaggtgctgctggaggccagcgaggagaccggcaagagagtgagcaagttcaaggccgccagactgcagcagaaggactag

SEQ ID NO: 140799 - DNA, 1608 bp, Artificial Sequence
  derived and/or modified sequence
atggaggctcctacagtcgaaactccaccagatccctcaccaccatcagcccctgcccctgcactggtgccattgcgcgcacccgacgtggcaaggttgcgtgaggaacaagagaaagtcgtgaccaactgccaggaacgcatacaacactggaaaaaagtggacaatgattataatgccctaagggagagactgtcgacattgccggacaagttatcatataatattatggtcccctttggaccctttgccttcatgcccggaaaattagtccataccaacgaagtgactgtcctactcggggacaactggtttgccaagtgctctgcgaagcaggcagtggggttggtggaacatagaaaagagcatgtgcgcaagactattgacgatctgaaaaaagttatgaaaaattttgagagccgggtagagtttacagaggaccttcagaaaatgtccgatgcggctggggatattgtagacatccgtgaggaaataaagtgcgatttcgagtttaaggccaaacaccgaatcgcccacaaacctcactccaaacccaagaccagcgacatttttgaagccgacattgcgaacgacgtcaagtccaaagacctccttgccgacaaggaactctgggcacgcctcgaggagctggagcgacaagaagagctcctgggcgagctcgattctaagccggatacagtaatcgcaaacggtgaagatacaacgagtagtgaggaggagaaagaggataggaacaccaatgtgaacgccatgcaccaggtgacggactcccacaccccctgccacaaagacgtggcctccagtgaaccattcagtggacaggtgaattcacagctgaactgcagtgtgaatgggtcctccagttatcacagcgacgacgatgatgacgacgacgatgatgatgacgacgataatatcgacgatgatgatggtgacaacgatcatgaagcactgggtgtgggggataattccatccccacgatttatttctcacataccgtagagcccaaaagagtgcgcattaacactggaaaaaatactacgctgaagttctccgagaaaaaagaggaggccaaacgaaaacgcaagaacagcaccgggagtggccactccgcccaggaactgcctaccattcggacacctgccgatatctatcgtgccttcgtggatgtcgtaaacggcgaatatgtgccgaggaagagcattcttaagtccaggtcccgtgagaattccgtgtgtagtgatacttcggagagctctgcagctgaatttgacgacagacggggtgtgctacggtcaatatcttgtgaggaggccacatgctctgacacgagcgagtctatattagaggaggaacctcaggagaaccagaaaaaactgctgcctctttctgtgacacctgaagctttttccggaaccgtgattgagaaagaattcgtctcaccctccttgacaccaccaccggctatagcacatcccgccctcccaactattccagaacggaaagaggttctgcttgaagcttctgaggaaacaggcaagagggtttccaagtttaaggccgcgcggctgcagcagaaagattag

SEQ ID NO: 140800 - DNA, 1608 bp, Artificial Sequence
  derived and/or modified sequence
atggaggcccccaccgtggagaccccaccagaccccagcccccccagcgccccagccccagccctggtgcccctgcgggccccagatgtggcccggctgcgggaggagcaggagaaggtggtgaccaactgccaggagcgcatccagcactggaagaaggtggacaatgactacaatgccctgcgggagcggctgagcaccctgcctgacaagctgagctacaacatcatggtgcccttcggcccctttgccttcatgcctgggaagctggtgcacaccaatgaggtgacagtgctgctgggggacaactggtttgccaagtgcagcgccaagcaggccgtgggcctggtggagcacaggaaggagcacgtgaggaagaccattgatgacctgaagaaggtgatgaagaactttgagagccgggtggagttcacagaggacctgcagaagatgtctgatgctgctggggacatcgtggacatccgggaggagatcaagtgtgactttgagttcaaggccaagcacagaattgcccacaagccccacagcaagcccaagaccagtgacatctttgaagctgacatcgccaatgatgtgaagagcaaggacctgctggccgacaaggagctgtgggcccggctggaggagctggagcggcaggaggagctgctgggggagctggacagcaagccagacacagtgattgccaatggagaggacaccaccagcagcgaggaggagaaggaggacaggaacaccaacgtgaatgccatgcaccaggtgacagacagccacaccccctgccacaaggatgtggccagcagcgagcccttcagcggccaggtgaacagccagctgaactgcagcgtgaatggcagcagcagctaccacagtgatgatgatgatgatgatgatgatgatgatgatgatgacaacattgatgatgatgatggagacaatgaccacgaggccctgggcgtgggggacaacagcatccccaccatctacttcagccacacagtggagcccaagagggtgcgcatcaacacaggcaagaacaccaccctgaagttcagcgagaagaaggaggaggccaagaggaagaggaagaacagcactggaagtggccacagcgcccaggagctgcccaccatccgcaccccagctgacatctaccgggcctttgtggatgtggtgaatggagaatatgtgcccaggaagagcatcctgaagagccgcagccgggagaacagcgtgtgcagcgacaccagcgagagcagcgctgctgagtttgatgaccggcggggcgtgctgcggagcatcagctgtgaggaggccacctgcagcgacaccagcgagagcatcctggaggaggagccccaggagaaccagaagaagctgctgcccctgtctgtgaccccagaggccttcagcggcaccgtcatcgagaaggagtttgtgagccccagcctgaccccacctccagccatcgcccacccagccctgcccaccatccctgagaggaaggaggtgctgctggaggccagcgaggagaccgggaagagggtgtccaagttcaaggccgcccggctgcagcagaaggactag

SEQ ID NO: 140801 - DNA, 2540 bp, Artificial Sequence
  derived and/or modified sequence
gcggccgccacgcgacgcctggctgggcccgcaccggagaggcgtctcggtacctggcaggcggcctgctactcggagcccgctgcggggcggcggcggcggggacatgcacgtgtgagatgcggcagcgggcggcgcggacgcgaacagcagcggcggcggcgggcgcggcctcctgggcgcggggcgcgcggtgcctgagggcgggcgcgcgggcgctgggcaactgccggccgcgccgcctgcgcaggcgctggttcaggactcacacgccgcgctgaggcccgcgggcccgtcatggaggcgcccaccgtggagacgccccccgacccctcgcccccttcggccccggcccctgccctggttccgttgcgcgccccggatgtggcgcggctgcgcgaggagcaggaaaaggtggtcactaactgccaagagagaatccagcattggaagaaggtagataatgactataatgcccttcgagaaagactcagcaccttgcctgataaattgtcttataatataatggtaccatttggcccttttgccttcatgccaggaaaacttgtccatactaatgaagtcactgttttactgggggacaactggtttgcaaagtgctcagcaaagcaggctgtaggtttagttgagcaccggaaagaacatgtaagaaaaacaatagatgacttaaaaaaagtgatgaaaaattttgaatccagagttgaattcacagaagatttgcagaaaatgagcgatgctgcaggtgatattgttgacatacgagaagaaattaaatgtgacttcgaatttaaagcaaaacaccgaattgctcataaaccgcattccaaaccaaaaacttcagatatttttgaagcagatattgcaaatgatgtgaaatccaaggatttgctagctgataaagaactgtgggctcgacttgaagaactagagagacaggaagaattgctgggtgaacttgatagtaagcctgatactgtgattgcaaatggagaagatacgacatcttctgaagaggaaaaggaagatcgtaacacaaatgtgaatgcgatgcatcaagtaacagactctcatactccttgtcataaggatgttgcaagttcagaaccattcagtggtcaagtgaatagtcagttgaactgttcagtgaatggttccagttcttaccacagtgatgatgatgatgatgatgatgatgacgacgacgacgacaacattgacgacgatgatggtgataacgaccatgaggctttaggggttggagataattctataccaacaatatatttttcacatactgttgagcctaagagggtccgaataaatactggaaagaataccactttaaaattcagtgaaaagaaagaagaagccaaacgtaaacgaaagaacagcactggcagtggccactctgcccaggagctgccgaccatcaggacgcctgcagacatttacagagcctttgttgatgttgtgaatggagaatatgtccctcgcaaatccatcctgaagtctcgaagtagagagaatagtgtgtgtagcgacactagtgaaagcagtgctgctgaatttgatgataggcggggagttttgaggagtatcagctgcgaagaagccacttgcagtgacaccagtgagagcattttggaagaggaaccacaagaaaatcaaaagaaacttttgcccttatcagtaacacctgaggctttttctggaactgttatagaaaaagaatttgtatcaccttccttaacaccacccccagccattgctcatcccgcactacccactattccagaacgaaaggaagttctgttggaagcatctgaagaaactggaaagagggtttcaaagtttaaagctgccagattgcaacagaaagactaggccctgtctaggaaatgggaatttacatcctaaaacctagttgttcatttgtttagagtatctatagcaaaataggttacatgtagtttgaaataaggtatcctgagttactttggcaacaagttcttttacccttacccgtggtatttgaaaaaaatcaaggtaactgtctgaatactttaatatcagcttgttttgtgaattctctgaatactgtcaacactcttatctaagtttgcctttatgatgcagtggcagcattttgaattacttttcaaagaatactgttcatatgcattgtttttgtgtttcaaactaaatacaggcagttttgtgccagctgtgatattgtgcataccatatggaccattttaaagaaaattttaaaatttcaaatagattcaacaattacattacttgctttcacattttaaaggcactttaaaaaaatctacttctcttgtaggttttgcggctagttggctattcaagaaacctcgcccctctgaatgtcatactgtaatctttaaggaagaaagctacatgaattaattgtactctatgggaaaatttctttggaaagatattttgtaaaacttttttttccaagtaaaaactttatgaaacttggtctc

SEQ ID NO: 140802 - DNA, 1608 bp, Artificial Sequence
  derived and/or modified sequence
atggaggcccccaccgtggagaccccccccgaccccagccccccctccgctcccgctcccgctctggtaccactcagagcaccagacgtcgcgaggctccgggaggagcaggaaaaggtggttaccaattgccaagaaaggattcagcattggaagaaagtagataacgactataatgccctgcgggagaggctgtccacgctgcccgacaagcttagctataacatcatggtaccatttggacccttcgctttcatgcctggcaagcttgtgcatacaaacgaagtgacagtcctgctgggcgacaattggtttgcaaaatgttccgcaaaacaggcagtgggtctggtggaacacagaaaggagcatgtgcgcaagacaattgacgacttaaagaaagtgatgaagaacttcgagagccgggtcgagttcactgaggatctgcagaaaatgagcgacgctgctggcgacatcgtagatatccgtgaagagattaagtgcgacttcgagtttaaggccaaacataggatcgcgcacaaacctcattcgaaacccaagacctctgacatcttcgaagcagacatagccaacgacgtgaagtctaaggatctcctggcggacaaggagctgtgggcgagactggaggagctggaaagacaggaagagcttcttggagagctcgattccaagcccgacaccgtaatcgccaacggcgaggataccacatcatctgaggaggaaaaagaggatcgaaatactaatgttaacgcaatgcaccaggttacagattctcacacgccctgccacaaggacgtagcctccagcgagcctttttccgggcaggtgaacagccagctgaattgttccgtgaatggatcctcctcatatcactctgacgatgatgacgacgacgatgacgacgatgatgacgataacatcgacgacgacgatggcgacaacgaccacgaagctctgggagttggagacaactccattccaactatatacttctcacatactgtggagcctaagagagtgcgcataaacacaggaaaaaacaccactttaaagtttagcgaaaagaaggaagaggccaagcggaagcgcaagaactccaccggtagcggacatagtgcccaggaacttccaaccatccgcacacctgccgacatttatcgagcgttcgtggacgttgtgaacggggaatatgttccgagaaagagcatcctgaaatcccgctccagagagaactctgtgtgcagcgacacgtctgagtcttcagctgccgaattcgacgatagacgaggggtactgcggtccatcagttgcgaggaggcaacttgttccgatacatctgagtccatcctcgaagaagagccacaggagaaccagaaaaagctgctgccactctccgtcacccccgaagcattttcaggcactgtgattgagaaggaatttgtgtccccaagcttaactccccccccagcgatcgcccatccggcccttccaaccatccctgagcggaaagaagttctcctagaagcatccgaagaaaccggcaaaagggtatccaagttcaaggcagcaagactccagcagaaagattag

SEQ ID NO: 140803 - DNA, 1608 bp, Artificial Sequence
  derived and/or modified sequence
atggaggcccctaccgtggagacacctcccgatccctctcccccatccgctcccgctcccgcattggtgcctttgcgcgcaccagacgtagctagactgcgggaggaacaggagaaagtcgtcacaaactgccaagagcggatccagcactggaaaaaagttgataacgattataatgctctgcgcgagcggcttagcaccctgcctgataagctctcttataatatcatggtgccttttggaccttttgcctttatgcccggtaagcttgtacacactaacgaagtgacagtattacttggcgataactggttcgccaagtgctcagctaagcaggccgtgggccttgttgaacaccgtaaggaacacgttcgcaaaactatcgacgacctcaagaaggtgatgaaaaacttcgagtctcgcgtggaatttactgaggatcttcagaaaatgtctgatgccgctggtgacatcgtggacatacgggaggaaattaagtgtgattttgagttcaaagcaaaacatcgcatcgcccacaagccccatagtaagccgaagacgtccgatatatttgaggccgacatcgctaatgatgtgaagtctaaagacctgctggccgacaaggagctgtgggcaaggctggaagagctggaacgccaggaggagcttctcggcgaactagatagtaaacctgacactgtgattgccaatggagaggatactactagcagtgaggaagagaaggaggaccgaaacactaacgtgaatgctatgcaccaggtaacagattctcatactccctgtcacaaagacgtggcctcatctgaaccctttagcggtcaggtaaatagccaactcaattgctccgttaacggatcatctagttaccacagcgatgatgatgacgacgatgacgatgacgacgacgacgataatatcgacgacgacgatggcgacaacgatcatgaagctttgggagtgggtgataacagcatcccgaccatttatttctcacacaccgtggaaccaaagcgagtcagaataaacaccggcaagaacacaacgctgaagtttagcgaaaagaaagaggaagctaaaagaaaacggaaaaattcaacaggatctggacactctgctcaggagctccccactatcagaaccccagccgatatataccgggctttcgtagacgttgttaacggagagtatgtgccgagaaaatccatcctgaagagccgcagccgggagaacagtgtttgctctgacacctctgagagttccgccgctgaatttgatgatcggcgtggagtgcttcgcagtatctcatgtgaagaagcaacatgttctgacacctccgagtccattctggaggaggagccccaggaaaaccagaagaagctactcccactctccgtaactccagaagcattttccgggaccgttatcgagaaagagttcgtgtccccatccctcactcctccacccgcaatcgcgcatcccgctctcccaaccatacctgagagaaaagaggtactgttggaggcctcagaagaaacaggcaagcgggtgtctaagttcaaggccgcacggctacagcaaaaggactag

SEQ ID NO: 140804 - DNA, 2273 bp, Artificial Sequence
  derived and/or modified sequence
acacgccgcgctgaggcccgcgggcccgtcatggaggcgcccaccgtggagacgccccccgacccctcgcccccttcggccccggcccctgccctggttccgttgcgcgccccggatgtggcgcggctgcgcgaggagcaggaaaaggtggtcactaactgccaagagagaatccagcattggaagaaggtagataatgactataatgcccttcgagaaagactcagcaccttgcctgataaattgtcttataatataatggtaccatttggcccttttgccttcatgccaggaaaacttgtccatactaatgaagtcactgttttactgggggacaactggtttgcaaagtgctcagcaaagcaggctgtaggtttagttgagcaccggaaagaacatgtaagaaaaacaatagatgacttaaaaaaagtgatgaaaaattttgaatccagagttgaattcacagaagatttgcagaaaatgagcgatgctgcaggtgatattgttgacatacgagaagaaattaaatgtgacttcgaatttaaagcaaaacaccgaattgctcataaaccgcattccaaaccaaaaacttcagatatttttgaagcagatattgcaaatgatgtgaaatccaaggatttgctagctgataaagaactgtgggctcgacttgaagaactagagagacaggaagaattgctgggtgaacttgatagtaagcctgatactgtgattgcaaatggagaagatacgacatcttctgaagaggaaaaggaagatcgtaacacaaatgtgaatgcgatgcatcaagtaacagactctcatactccttgtcataaggatgttgcaagttcagaaccattcagtggtcaagtgaatagtcagttgaactgttcagtgaatggttccagttcttaccacagtgatgatgatgatgatgatgatgatgacgacgacgacgacaacattgacgacgatgatggtgataacgaccatgaggctttaggggttggagataattctataccaacaatatatttttcacatactgttgagcctaagagggtccgaataaatactggaaagaataccactttaaaattcagtgaaaagaaagaagaagccaaacgtaaacgaaagaacagcactggcagtggccactctgcccaggagctgccgaccatcaggacgcctgcagacatttacagagcctttgttgatgttgtgaatggagaatatgtccctcgcaaatccatcctgaagtctcgaagtagagagaatagtgtgtgtagcgacactagtgaaagcagtgctgctgaatttgatgataggcggggagttttgaggagtatcagctgcgaagaagccacttgcagtgacaccagtgagagcattttggaagaggaaccacaagaaaatcaaaagaaacttttgcccttatcagtaacacctgaggctttttctggaactgttatagaaaaagaatttgtatcaccttccttaacaccacccccagccattgctcatcccgcactacccactattccagaacgaaaggaagttctgttggaagcatctgaagaaactggaaagagggtttcaaagtttaaagctgccagattgcaacagaaagactaggccctgtctaggaaatgggaatttacatcctaaaacctagttgttcatttgtttagagtatctatagcaaaataggttacatgtagtttgaaataaggtatcctgagttactttggcaacaagttcttttacccttacccgtggtatttgaaaaaaatcaaggtaactgtctgaatactttaatatcagcttgttttgtgaattctctgaatactgtcaacactcttatctaagtttgcctttatgatgcagtggcagcattttgaattacttttcaaagaatactgttcatatgcattgtttttgtgtttcaaactaaatacaggcagttttgtgccagctgtgatattgtgcataccatatggaccattttaaagaaaattttaaaatttcaaatagattcaacaattacattacttgctttcacattttaaaggcactttaaaaaaatctacttctcttgtaggttttgcggctagttggctattcaagaaacctcgcccctctgaatgtcatactgtaatctttaaggaagaaagctacatgaattaattgtactctatgggaaaatttctttggaaagatattttgtaaaacttttttttccaagtaaaaactttatgaaacttggtctc

SEQ ID NO: 140805 - protein, 441 aa, Artificial Sequence
  derived and/or modified sequence
MSEREVSTAPAGTDMPAAKKQKLSSDENSNPDLSGDENDDAVSIESGTNTERPDTPTNTPNAPGRKSWGKGKWKSKKCKYSFKCVNSLKEDHNQPLFGVQFNWHSKEGDPLVFATVGSNRVTLYECHSQGEIRLLQSYVDADADENFYTCAWTYDSNTSHPLLAVAGSRGIIRIINPITMQCIKHYVGHGNAINELKFHPRDPNLLLSVSKDHALRLWNIQTDTLVAIFGGVEGHRDEVLSADYDLLGEKIMSCGMDHSLKLWRINSKRMMNAIKESYDYNPNKTNRPFISQKIHFPDFSTRDIHRNYVDCVRWLGDLILSKSCENAIVCWKPGKMEDDIDKIKPSESNVTILGRFDYSQCDIWYMRFSMDFWQKMLALGNQVGKLYVWDLEVEDPHKAKCTTLTHHKCGAAIRQTSFSRDSSILIAVCDDASIWRWDRLR

SEQ ID NO: 140806 - protein, 400 aa, Artificial Sequence
  derived and/or modified sequence
MSEREVSTAPAGTDMPAAKKQKLSSDENSNPDLSGDENDDAVSIESGTNTERPDTPTNTPNAPGRKSWGKGKWKSKKCKYSFKCVNSLKEDHNQPLFGVQFNWHSKEGDPLVFATVGSNRVTLYECHSQGEIRLLQSYVDADADENFYTCAWTYDSNTSHPLLAVAGSRGIIRIINPITMQCIKHYVGHGNAINELKFHPRDPNLLLSVSKDHALRLWNIQTDTLVAIFGGVEGHRDEVLSADYDLLGEKIMSCGMDHSLKLWRINSKRMMNAIKESYDYNPNKTNRPFISQKIHFPDFSTRDIHRNYVDCVRWLGDLILSKSCENAIVCWKPGKMEDDIDKIKPSESNVTILGRFDYSQCDIWYMRFSMDFWQKMLALGNQVGKLYVWDLEVEDPHKAK

SEQ ID NO: 140807 - DNA, 2006 bp, Artificial Sequence
  derived and/or modified sequence
ctagcagcgggtcggagatcgaaggaacgggccaattgcggctgaaacgtctttggaaggaggaagggggtgagggagcatccctttgagtttcgcctcttctcgaggcggtggtgggaagggagacatacttaatactgccctcttaatccaacggaccttacatcgtgtagactgccgggagggcggcgggaaaagggcaagacgggagttggggaagggaaggagccaggaagccgcgcgggagggcgcgcgcgcgcgcccctttttcagcagtgtggcggggtcgcacgcacgcccgcctcggcggctgggcgcgatttgcgacagtggggggggcggtggaggtggcggcggcagcggcaactttgcggcaagctcgggccgggcttgcttgacggcggtgtggcggaggccccgccccaggcggcaggaacctggagggaggcggaggaatatgtccgagagggaagtgtcgactgcgccggcgggaacagacatgcctgcggccaagaagcagaagctgagcagtgacgagaacagcaatccagacctctctggagacgagaatgatgacgctgtcagtatagaaagtggtacaaacactgaacgccctgatacacctacaaacacgccaaatgcacctggaaggaaaagttggggaaagggaaaatggaagtcaaagaaatgcaaatattctttcaaatgtgtaaatagtctcaaggaagatcataaccaaccattgtttggagttcagtttaactggcacagtaaagaaggagatccattagtgtttgcaactgtaggaagcaacagagttaccttgtatgaatgtcattcacaaggagaaatccggttgttgcaatcttacgtggatgctgatgctgatgaaaacttttacacttgtgcatggacctatgatagcaatacgagccatcctctgctggctgtagctggatctagaggcataattaggataataaatcctataacaatgcagtgtataaagcactatgttggccatggaaatgctatcaatgagctgaaattccatccaagagatccaaatcttctcctgtcagtaagtaaagatcatgctttacgattatggaatatccagacggacactctggtggcaatatttggaggcgtagaagggcacagagatgaagttctaagtgctgattatgatcttttgggtgaaaaaataatgtcctgtggtatggatcattctcttaaactttggaggatcaattcaaagagaatgatgaatgcaattaaggaatcttatgattataatccaaataaaactaacaggccatttatttctcagaaaatccattttcctgatttttctaccagagacatacataggaattatgttgattgtgtgcgatggttaggcgatttgatactttctaagtcttgtgaaaatgccattgtgtgctggaaacctggcaagatggaagatgatatagataaaattaaacccagtgaatctaatgtgactattcttgggcgatttgattacagccagtgtgacatttggtacatgaggttttctatggatttctggcaaaagatgcttgcattgggcaatcaagttggcaaactttatgtttgggatttagaagtagaagatcctcataaagccaaatgtacaacactgactcatcataaatgtggtgctgctattcgacaaaccagttttagcagggatagcagcattcttatagctgtttgtgatgatgccagtatttggcgctgggatcgacttcgataaaatacttttgcctaatcaaaattagagtgtgtttgttgtctgtgtaaaatagaattaatgtatcttgctagtaagggcacgtagagcatttagagttgtctttcagcattcaatcaggctgagctgaatgtagtgatgtttacattgtttacattctttgtactgtcttcctgctcagactctactgcttttaataaaaatttatttttgtaaaaaaaaaaaa

SEQ ID NO: 140808 - DNA, 1326 bp, Artificial Sequence
  derived and/or modified sequence
atgagcgaacgggaggtcagtaccgctccagctggcactgatatgcccgctgccaagaagcagaagctgagtagtgacgaaaacagcaacccggacctaagcggcgacgagaatgatgacgccgtatccattgaatccgggaccaatactgaaaggcctgatactccaacgaacacccctaacgcaccaggcaggaagagctgggggaaagggaaatggaaatccaaaaaatgtaagtatagctttaagtgcgtgaactcactaaaggaagaccataatcagccactgttcggcgtccaatttaattggcattcaaaggaaggggatcccttagtgtttgcaaccgtgggcagcaatcgggtaacattgtacgaatgtcacagtcagggcgaaatccggttgctgcagagctacgtagatgctgacgccgatgagaatttttacacctgtgcttggacatacgattcaaacacttcacacccacttctcgctgttgcaggctccagggggattatccggataatcaacccaattaccatgcagtgcatcaagcactacgtcggccatggcaacgccattaatgaattaaagttccacccacgagatccaaacctgctgctgtctgtttcaaaggaccatgccctgagactgtggaacatacaaacggatacactcgtggccattttcgggggcgtggaaggacaccgcgacgaagtgctgagcgcagattacgatctacttggcgagaagatcatgtcctgtggaatggaccattcgctgaaactttggcggattaattccaaacgcatgatgaacgccatcaaagagtcctatgactacaatcccaacaagacgaaccggccctttatctcgcagaagatccattttcccgacttctccacgcgcgacatccacagaaattacgtggattgcgtgaggtggctcggggaccttatcctgtctaaaagttgcgaaaatgctatcgtctgctggaagcccgggaaaatggaagacgacattgataagattaagccttctgagtcaaacgtcactatactcggacgctttgactactcacagtgcgacatatggtacatgcgcttcagcatggacttctggcagaagatgttagccctcggtaaccaagtgggaaagctgtacgtgtgggaccttgaagttgaagatcctcacaaagctaagtgcactacgctgacacatcataagtgcggagctgcgattcgacaaacaagcttttcgagagactcttctattctgatcgcagtatgtgatgacgcatcaatttggagatgggacagactgaggtag

SEQ ID NO: 140809 - DNA, 1203 bp, Artificial Sequence
  derived and/or modified sequence
atgagtgaacgggaagtcagcacagcccccgctggcaccgatatgccagcagctaagaaacaaaaactctcctcagatgaaaacagtaatccagatttatccggagacgaaaacgatgacgctgtgagcattgagagcggaacaaacacagagcgaccagatacccccaccaacacccccaatgcccctggaaggaaatcttggggaaaaggcaaatggaagtccaagaagtgcaagtacagctttaagtgtgtgaacagtttaaaggaggaccacaatcaacccctctttggcgtgcagtttaattggcacagcaaggagggagaccccttggtttttgccaccgtaggaagcaacagggtgacactttacgagtgtcatagccaaggtgagattcgactccttcaatcatacgtagacgcagacgctgatgagaacttctatacatgcgcgtggacatatgacagcaatactagccatcccctgctcgccgtggccgggagccgaggcattattcggattattaacccaatcacaatgcagtgcatcaagcactacgttggccatggtaatgcgatcaacgagctcaaattccatccacgagatccgaacttgctcctgtctgtatctaaggaccacgctctcaggctgtggaacatccagacagacacattggtggcaatcttcgggggagtcgaggggcacagagacgaggtcctgtcagccgattacgacttattgggcgagaaaatcatgagttgcggcatggatcacagcttgaaactttggcgaatcaatagcaagcgaatgatgaacgcaattaaagagagctacgactacaatccaaacaagaccaataggcccttcattagtcagaaaattcattttcccgacttcagtactcgagacatacatcgcaactatgttgactgcgtcagatggctgggggacctgattctcagcaagtcgtgtgaaaatgctatcgtgtgttggaagcccggaaaaatggaggatgatatcgacaaaatcaagcctagcgagagcaatgtcactatattaggcaggtttgactattcgcagtgcgacatttggtatatgaggttttctatggacttctggcaaaaaatgttggcacttggtaatcaggttgggaaactgtacgtgtgggacctcgaggtcgaagacccgcacaaggccaagtag

SEQ ID NO: 140810 - DNA, 1326 bp, Artificial Sequence
  derived and/or modified sequence
atgtctgagcgggaggtgtccacagccccagctggaacagacatgcctgctgccaagaagcagaagctgagcagtgatgagaacagcaacccagacctgtctggagatgaaaatgatgatgctgtgtccattgagagcggcaccaacacagagaggccagacacccccaccaacaccccaaatgcccctggcaggaagtcctggggcaagggcaagtggaagagcaagaagtgcaagtacagcttcaagtgtgtgaacagcctgaaggaggaccacaaccagcccctgtttggagtgcagttcaactggcacagcaaggagggggaccccctggtgtttgccaccgtgggcagcaacagagtgaccctgtatgagtgccacagccagggcgagatccggctgctgcagagctatgtggatgctgatgctgatgagaacttctacacctgtgcctggacctatgacagcaacaccagccaccccctgctggccgtggccggcagccggggcatcatccgcatcatcaaccccatcaccatgcagtgcatcaagcactacgtgggccatggaaatgccatcaatgagctgaagttccacccccgggaccccaacctgctgctgtctgtgtccaaggaccacgccctgcggctgtggaacatccagacagacaccctggtggccatctttggaggagtggagggccacagagatgaggtgctgtctgctgactatgacctgctgggggagaagatcatgagctgtggcatggaccacagcctgaagctgtggaggatcaacagcaagaggatgatgaatgccatcaaggagagctatgactacaaccccaacaagaccaaccggcccttcatcagccagaagatccacttcccagacttcagcacccgggacatccacaggaactacgtggactgtgtgcgctggctgggggacctgatcctgagcaagagctgtgaaaatgccatcgtgtgctggaagccaggcaagatggaggatgacatcgacaagatcaagcccagcgagagcaatgtgaccatcctgggccgctttgactacagccagtgtgacatctggtacatgaggttctccatggacttctggcagaagatgctggccctgggcaaccaggtgggcaagctgtatgtgtgggacctggaggtggaggacccccacaaggccaagtgcaccaccctgacccaccacaagtgtggggccgccatccggcagaccagcttcagccgggacagcagcatcctgattgctgtgtgtgatgatgccagcatctggcgctgggaccggctgaggtag

SEQ ID NO: 140811 - DNA, 1203 bp, Artificial Sequence
  derived and/or modified sequence
atgtctgagcgggaggtgtccacagccccagctggaacagacatgcctgctgccaagaagcagaagctgagcagtgatgagaacagcaacccagacctgtctggagatgaaaatgatgatgctgtgtccattgagagcggcaccaacacagagaggccagacacccccaccaacaccccaaatgcccctggcaggaagtcctggggcaagggcaagtggaagagcaagaagtgcaagtacagcttcaagtgtgtgaacagcctgaaggaggaccacaaccagcccctgtttggagtgcagttcaactggcacagcaaggagggggaccccctggtgtttgccaccgtgggcagcaacagagtgaccctgtatgagtgccacagccagggcgagatccggctgctgcagagctatgtggatgctgatgctgatgagaacttctacacctgtgcctggacctatgacagcaacaccagccaccccctgctggccgtggccggcagccggggcatcatccgcatcatcaaccccatcaccatgcagtgcatcaagcactacgtgggccatggaaatgccatcaatgagctgaagttccacccccgggaccccaacctgctgctgtctgtgtccaaggaccacgccctgcggctgtggaacatccagacagacaccctggtggccatctttggaggagtggagggccacagagatgaggtgctgtctgctgactatgacctgctgggggagaagatcatgagctgtggcatggaccacagcctgaagctgtggaggatcaacagcaagaggatgatgaatgccatcaaggagagctatgactacaaccccaacaagaccaaccggcccttcatcagccagaagatccacttcccagacttcagcacccgggacatccacaggaactacgtggactgtgtgcgctggctgggggacctgatcctgagcaagagctgtgaaaatgccatcgtgtgctggaagccaggcaagatggaggatgacatcgacaagatcaagcccagcgagagcaatgtgaccatcctgggccgctttgactacagccagtgtgacatctggtacatgaggttctccatggacttctggcagaagatgctggccctgggcaaccaggtgggcaagctgtatgtgtgggacctggaggtggaggacccccacaaggccaagtag

SEQ ID NO: 140812 - DNA, 1326 bp, Artificial Sequence
  derived and/or modified sequence
atgagcgagcgggaggtgagcaccgcccccgccggcaccgacatgcccgccgcgaagaagcaaaaactatcgtcagacgagaattctaaccccgacctttcgggcgacgaaaatgatgacgccgtgtctattgaaagtggcactaacactgagaggccagacacccccacgaacacacccaatgcacccggtcgtaaaagttggggcaagggaaagtggaagagcaaaaagtgcaaatattcttttaagtgcgtcaacagtctcaaagaggatcacaaccagcctctgttcggagttcagtttaattggcactccaaggagggtgatcctctggtgttcgccaccgttggcagcaaccgggttacgttatacgagtgtcacagtcaaggggagatccgactgttgcagtcttacgtagatgccgatgcggacgaaaatttttacacatgcgcctggacctatgacagcaatacctcgcaccccctcctggcagtcgccgggagtcgaggcatcatcaggatcattaaccccatcaccatgcaatgtatcaagcactacgttggccacgggaatgccatcaacgagttaaagtttcatccccgcgatccgaatctgcttcttagtgtctccaaggatcacgccctgagactgtggaatatccagaccgacacattggtggccatatttgggggtgtggaaggccatagagatgaggtgttgagcgctgattacgacctgcttggggagaaaattatgtcctgtggaatggaccatagtctcaagctgtggcgcattaattccaaacgtatgatgaatgcaattaaggaatcctatgactacaacccgaataagaccaacagaccatttatcagtcagaagatacactttcctgatttttcaacccgggatattcaccggaattatgtcgattgtgtgcggtggctgggagacctcattctgtccaagtcatgcgagaatgctatcgtttgttggaaacctggaaagatggaggacgatatcgataagattaagccttccgaaagcaacgtcaccatcctgggcaggttcgattatagtcagtgtgacatttggtatatgagatttagcatggatttttggcagaaaatgctggcactgggcaatcaggttggcaaactgtatgtgtgggatctagaggtggaagatcctcacaaggcgaaatgtactacgctgacccaccacaagtgcggtgctgccatacgacaaaccagtttcagccgggacagcagtatcttgatcgccgtctgtgacgacgcctcgatatggaggtgggatcgtttgcgttag

SEQ ID NO: 140813 - DNA, 1203 bp, Artificial Sequence
  derived and/or modified sequence
atgagcgagcgggaggtgagcaccgcccccgccggcaccgacatgcctgccgcaaagaagcagaagctgagttccgacgaaaattctaatccggatttgtccggagatgaaaatgacgacgctgtctcaatcgaaagcggcaccaataccgaaaggcctgacacccctacgaatacaccgaacgcaccaggccgcaagtcctggggcaaaggtaagtggaagagcaaaaagtgcaagtatagctttaaatgcgtaaacagcttaaaagaggaccacaatcagcccttgttcggcgtgcagttcaactggcattctaaggagggcgatcctttggtctttgcaacagtcggttccaaccgtgttaccctctacgagtgccattcccagggggaaattagactgctgcaatcttacgttgatgcagatgccgatgaaaacttttatacatgtgcttggacttatgactctaatacaagtcacccactactggcagtcgcggggtcacgcggtatcatccgcatcattaaccccatcacgatgcagtgcatcaaacattatgtcggccacggaaatgcaatcaacgaactcaaatttcacccaagggatcccaatctgctgctgtccgtgtccaaagaccacgccctgcgcttatggaatattcagactgacactttggtggctattttcggcggggttgaagggcaccgggacgaagtcctgtctgccgactacgacttacttggggagaaaataatgagttgtggtatggatcacagcttgaagttatggcggattaactccaagaggatgatgaacgccatcaaggagagctacgactacaaccctaataaaactaaccggccctttatttctcaaaaaatccactttccagacttcagtacccgtgatatccatcgcaactatgtggattgcgtcaggtggcttggggacttgattctcagcaagagctgtgagaacgcgatagtgtgttggaagcctggcaaaatggaggacgacattgacaagatcaaacccagtgagtccaatgtcacaattctcgggaggttcgactactctcagtgtgatatctggtacatgagattctctatggatttctggcagaaaatgttagctctcggcaatcaagtgggtaaactatacgtgtgggacctggaggtcgaggacccacacaaagccaagtag

SEQ ID NO: 140814 - DNA, 1326 bp, Artificial Sequence
  derived and/or modified sequence
atgtccgagagggaggtcagcacagctcctgccggaactgatatgccagctgccaagaagcagaaactgtcgtcagacgaaaactccaaccccgatctaagtggagatgagaatgacgatgccgtgtctattgaatcgggcacaaataccgaacggccagacacacctacaaacacccctaatgccccaggacgtaagtcctggggaaaaggcaagtggaaaagcaagaagtgcaaatattcattcaaatgcgtcaattcactcaaggaggatcacaaccaaccactctttggggttcagttcaattggcactcaaaggaaggagaccccttagtttttgcgactgtggggtccaaccgggtcactctgtatgagtgtcatagtcagggagagatcaggctgctgcagagttatgtcgatgccgacgcggatgagaatttttatacttgcgcctggacttacgactcaaatactagccatcctctcttggccgtggctggctcgaggggtattatcagaatcatcaacccaattaccatgcaatgcattaaacactacgttggtcacggaaatgccattaatgagctgaaatttcacccccgtgatcctaacttactgcttagtgtgtctaaggaccacgccttgcggctctggaatatccagacagatactctggtggccatattcggaggggttgaaggtcatcgcgatgaggtcctgtcggctgactacgatctgctgggggaaaaaattatgagctgcgggatggaccattcactaaagctatggcggataaacagtaagaggatgatgaatgcaattaaggagagctacgattataatccaaataaaactaataggcctttcatttcccagaaaatccatttccccgattttagtactagggacatccacaggaattacgtcgattgcgtgcgctggctgggtgacttaatcttatccaagagttgtgagaacgccatagtctgttggaaacccggaaagatggaagatgatatcgacaagattaagccctccgaatccaatgttaccatcctgggcaggttcgattactcccagtgtgacatatggtacatgcggttcagtatggacttttggcagaagatgttggccctgggaaaccaggttggtaaattatatgtgtgggaccttgaagtggaagacccccacaaggctaaatgtaccaccctcacacaccataagtgcggggctgctattcggcagacttccttttcacgggactcttccattctgatcgccgtatgcgatgatgcctccatctggcgatgggacagattgagatag

SEQ ID NO: 140815 - DNA, 1203 bp, Artificial Sequence
  derived and/or modified sequence
atgagcgagagagaggtgtccaccgccccagccggaactgacatgcctgccgctaagaagcagaagttaagttcagacgagaattccaatcctgacctttctggggatgaaaacgacgacgccgtcagtattgaatccggtacaaacactgaacgccctgatacgccaaccaacacccccaacgctcctggtcggaaatcttggggcaagggaaagtggaaatccaaaaaatgcaagtatagtttcaagtgtgtcaacagccttaaggaagaccacaaccaacctctcttcggagtgcagtttaattggcactcaaaggaaggcgacccattggtatttgcaacagttggttcaaaccgggtgaccttgtatgagtgccactctcagggggagatcaggctcctacagagctatgttgacgctgacgcagacgaaaacttttatacctgtgcatggacatacgacagcaacacttcccaccctttactggccgtagctggaagccgaggaattatccgtatcatcaaccccatcaccatgcagtgtataaagcattatgtcgggcatgggaacgcgatcaatgaattaaagtttcacccccgtgatcccaacctgctgttaagcgtcagcaaggaccacgctctcaggttgtggaatattcagaccgacactctggtggcaatttttggcggagtggaagggcaccgcgacgaagtgctgtctgccgattacgatcttcttggcgagaaaataatgagttgtggcatggaccactctctcaagctctggaggatcaattccaaacgcatgatgaatgccatcaaggaaagttacgattacaaccctaacaaaacaaatcggcctttcatttcacagaagatacattttcccgatttcagcactcgggacatacacagaaattacgtcgattgtgttcggtggctgggggatctcatattatcaaagtcttgtgaaaacgccattgtatgctggaagccaggcaaaatggaagatgacatcgataagataaaaccgagcgaatcaaacgtgacaatactcggacggtttgattacagccagtgcgacatctggtatatgaggttctctatggacttctggcagaaaatgcttgcactcgggaaccaggtcggcaagctgtacgtctgggacttagaagtggaggacccgcataaagccaaatag

SEQ ID NO: 140816 - DNA, 1326 bp, Artificial Sequence
  derived and/or modified sequence
atgagcgagagagaggtgagcaccgcccccgccggcaccgacatgcccgccgccaagaagcagaagctgagcagcgacgagaacagcaaccccgacctgagcggcgacgagaacgacgacgccgtgagcatcgagagcggcaccaacaccgagagacccgacacccccaccaacacccccaacgcccccggcagaaagagctggggcaagggcaagtggaagagcaagaagtgcaagtacagcttcaagtgcgtgaacagcctgaaggaggaccacaaccagcccctgttcggcgtgcagttcaactggcacagcaaggagggcgaccccctggtgttcgccaccgtgggcagcaacagagtgaccctgtacgagtgccacagccagggcgagatcagactgctgcagagctacgtggacgccgacgccgacgagaacttctacacctgcgcctggacctacgacagcaacaccagccaccccctgctggccgtggccggcagcagaggcatcatcagaatcatcaaccccatcaccatgcagtgcatcaagcactacgtgggccacggcaacgccatcaacgagctgaagttccaccccagagaccccaacctgctgctgagcgtgagcaaggaccacgccctgagactgtggaacatccagaccgacaccctggtggccatcttcggcggcgtggagggccacagagacgaggtgctgagcgccgactacgacctgctgggcgagaagatcatgagctgcggcatggaccacagcctgaagctgtggagaatcaacagcaagagaatgatgaacgccatcaaggagagctacgactacaaccccaacaagaccaacagacccttcatcagccagaagatccacttccccgacttcagcaccagagacatccacagaaactacgtggactgcgtgagatggctgggcgacctgatcctgagcaagagctgcgagaacgccatcgtgtgctggaagcccggcaagatggaggacgacatcgacaagatcaagcccagcgagagcaacgtgaccatcctgggcagattcgactacagccagtgcgacatctggtacatgagattcagcatggacttctggcagaagatgctggccctgggcaaccaggtgggcaagctgtacgtgtgggacctggaggtggaggacccccacaaggccaagtgcaccaccctgacccaccacaagtgcggcgccgccatcagacagaccagcttcagcagagacagcagcatcctgatcgccgtgtgcgacgacgccagcatctggagatgggacagactgagatag

SEQ ID NO: 140817 - DNA, 1203 bp, Artificial Sequence
  derived and/or modified sequence
atgagcgagagagaggtgagcaccgcccccgccggcaccgacatgcccgccgccaagaagcagaagctgagcagcgacgagaacagcaaccccgacctgagcggcgacgagaacgacgacgccgtgagcatcgagagcggcaccaacaccgagagacccgacacccccaccaacacccccaacgcccccggcagaaagagctggggcaagggcaagtggaagagcaagaagtgcaagtacagcttcaagtgcgtgaacagcctgaaggaggaccacaaccagcccctgttcggcgtgcagttcaactggcacagcaaggagggcgaccccctggtgttcgccaccgtgggcagcaacagagtgaccctgtacgagtgccacagccagggcgagatcagactgctgcagagctacgtggacgccgacgccgacgagaacttctacacctgcgcctggacctacgacagcaacaccagccaccccctgctggccgtggccggcagcagaggcatcatcagaatcatcaaccccatcaccatgcagtgcatcaagcactacgtgggccacggcaacgccatcaacgagctgaagttccaccccagagaccccaacctgctgctgagcgtgagcaaggaccacgccctgagactgtggaacatccagaccgacaccctggtggccatcttcggcggcgtggagggccacagagacgaggtgctgagcgccgactacgacctgctgggcgagaagatcatgagctgcggcatggaccacagcctgaagctgtggagaatcaacagcaagagaatgatgaacgccatcaaggagagctacgactacaaccccaacaagaccaacagacccttcatcagccagaagatccacttccccgacttcagcaccagagacatccacagaaactacgtggactgcgtgagatggctgggcgacctgatcctgagcaagagctgcgagaacgccatcgtgtgctggaagcccggcaagatggaggacgacatcgacaagatcaagcccagcgagagcaacgtgaccatcctgggcagattcgactacagccagtgcgacatctggtacatgagattcagcatggacttctggcagaagatgctggccctgggcaaccaggtgggcaagctgtacgtgtgggacctggaggtggaggacccccacaaggccaagtag

SEQ ID NO: 140818 - DNA, 2223 bp, Artificial Sequence
  derived and/or modified sequence
attcgccagatgggggaagccagggggaagcaggttactgtttttgcatttctatcttcaaggaagaattaggttatgaatagttccgtgaatagtcaggaagcgctgtcctccaagttcaagattaaggaaacgtggcatgcacagctaaagcaagaggtgacgtcttgtatcttcccccgtttcctgggacattggtggtgtagcccattccacagactttcgctccctagcagcgggtcggagatcgaaggaacgggccaattgcggctgaaacgtctttggaaggaggaagggggtgagggagcatccctttgagtttcgcctcttctcgaggcggtggtgggaagggagacatacttaatactgccctcttaatccaacggaccttacatcgtgtagactgccgggagggcggcgggaaaagggcaagacgggagttggggaagggaaggagccaggaagccgcgcgggagggcgcgcgcgcgcgcccctttttcagcagtgtggcggggtcgcacgcacgcccgcctcggcggctgggcgcgatttgcgacagtggggggggcggtggaggtggcggcggcagcggcaactttgcggcaagctcgggccgggcttgcttgacggcggtgtggcggaggccccgccccaggcggcaggaacctggagggaggcggaggaatatgtccgagagggaagtgtcgactgcgccggcgggaacagacatgcctgcggccaagaagcagaagctgagcagtgacgagaacagcaatccagacctctctggagacgagaatgatgacgctgtcagtatagaaagtggtacaaacactgaacgccctgatacacctacaaacacgccaaatgcacctggaaggaaaagttggggaaagggaaaatggaagtcaaagaaatgcaaatattctttcaaatgtgtaaatagtctcaaggaagatcataaccaaccattgtttggagttcagtttaactggcacagtaaagaaggagatccattagtgtttgcaactgtaggaagcaacagagttaccttgtatgaatgtcattcacaaggagaaatccggttgttgcaatcttacgtggatgctgatgctgatgaaaacttttacacttgtgcatggacctatgatagcaatacgagccatcctctgctggctgtagctggatctagaggcataattaggataataaatcctataacaatgcagtgtataaagcactatgttggccatggaaatgctatcaatgagctgaaattccatccaagagatccaaatcttctcctgtcagtaagtaaagatcatgctttacgattatggaatatccagacggacactctggtggcaatatttggaggcgtagaagggcacagagatgaagttctaagtgctgattatgatcttttgggtgaaaaaataatgtcctgtggtatggatcattctcttaaactttggaggatcaattcaaagagaatgatgaatgcaattaaggaatcttatgattataatccaaataaaactaacaggccatttatttctcagaaaatccattttcctgatttttctaccagagacatacataggaattatgttgattgtgtgcgatggttaggcgatttgatactttctaagtcttgtgaaaatgccattgtgtgctggaaacctggcaagatggaagatgatatagataaaattaaacccagtgaatctaatgtgactattcttgggcgatttgattacagccagtgtgacatttggtacatgaggttttctatggatttctggcaaaagatgcttgcattgggcaatcaagttggcaaactttatgtttgggatttagaagtagaagatcctcataaagccaaatgtacaacactgactcatcataaatgtggtgctgctattcgacaaaccagttttagcagggatagcagcattcttatagctgtttgtgatgatgccagtatttggcgctgggatcgacttcgataaaatacttttgcctaatcaaaattagagtgtgtttgttgtctgtgtaaaatagaattaatgtatcttgctagtaagggcacgtagagcatttagagttgtctttcagcattcaatcaggctgagctgaatgtagtgatgtttacattgtttacattctttgtactgtcttcctgctcagactctactgcttttaataaaaatttatttttgt

SEQ ID NO: 140819 - DNA, 2033 bp, Artificial Sequence
  derived and/or modified sequence
tttgcggcaagctcgggccgggcttgcttgacggcggtgtggcggaggccccgccccaggcggcaggaacctggagggaggcggaggaatatgtccgagagggaagtgtcgactgcgccggcgggaacagacatgcctgcggccaagaagcagaagctgagcagtgacgagaacagcaatccagacctctctggagacgagaatgatgacgctgtcagtatagaaagtggtacaaacactgaacgccctgatacacctacaaacacgccaaatgcacctggaaggaaaagttggggaaagggaaaatggaagtcaaagaaatgcaaatattctttcaaatgtgtaaatagtctcaaggaagatcataaccaaccattgtttggagttcagtttaactggcacagtaaagaaggagatccattagtgtttgcaactgtaggaagcaacagagttaccttgtatgaatgtcattcacaaggagaaatccggttgttgcaatcttacgtggatgctgatgctgatgaaaacttttacacttgtgcatggacctatgatagcaatacgagccatcctctgctggctgtagctggatctagaggcataattaggataataaatcctataacaatgcagtgtataaagcactatgttggccatggaaatgctatcaatgagctgaaattccatccaagagatccaaatcttctcctgtcagtaagtaaagatcatgctttacgattatggaatatccagacggacactctggtggcaatatttggaggcgtagaagggcacagagatgaagttctaagtgctgattatgatcttttgggtgaaaaaataatgtcctgtggtatggatcattctcttaaactttggaggatcaattcaaagagaatgatgaatgcaattaaggaatcttatgattataatccaaataaaactaacaggccatttatttctcagaaaatccattttcctgatttttctaccagagacatacataggaattatgttgattgtgtgcgatggttaggcgatttgatactttctaagtcttgtgaaaatgccattgtgtgctggaaacctggcaagatggaagatgatatagataaaattaaacccagtgaatctaatgtgactattcttgggcgatttgattacagccagtgtgacatttggtacatgaggttttctatggatttctggcaaaagatgcttgcattgggcaatcaagttggcaaactttatgtttgggatttagaagtagaagatcctcataaagccaagtaagtatttagaaatttctgttcaaaatttcaggctttttctccacacttgtatgccaatgtagagaagatcatttatatttgcagtgccatccttaagtcatttttaacatttactgttttcagagttaaagttattcttttttattccaataatttttgtttttcctaagtaccttggtgacaagtcatttcttgtttttatacaaattatgtagtgcttgttgaacttaaaatatatctaaattttataaaatttgagactgagctcttagtgaagtatattctggttttaagtgcttttcgtatgacttggaacatctgcttattttctaatccgctgttttagggtagacactgacaacgttatgtgtggtctttaacctgttgtcatgttttttccctagatgtacaacactgactcatcataaatgtggtgctgctattcgacaaaccagttttagcagggatagcagcattcttatagctgtttgtgatgatgccagtatttggcgctgggatcgacttcgataaaatacttttgcctaatcaaaattagagtgtgtttgttgtctgtgtaaaatagaattaatgtatcttgctagtaagggcacgtagagcatttagagttgtctttcagcattcaatcaggctgagctgaatgtagtgatgtttacattgtttacattctttgtactgtcttcctgctcagactctactgcttttaataaaaatttatttttg

SEQ ID NO: 140820 - DNA, 786 bp, Artificial Sequence
  derived and/or modified sequence
aggaatatgtccgagagggaagtgtcgactgcgccggcgggaacagacatgcctgcggccaagaagcagaagctgagcagtgacgagaacagcaatccagacctctctggagacgagaatgatgacgctgtcagtatagaaagtggtacaaacactgaacgccctgatacacctacaaacacgccaaatgcacctggaaggaaaagttggggaaagggaaaatggaagtcaaagaaatgcaaatattctttcaaatgtgtaaatagtctcaaggaagatcataaccaaccattgtttggagttcagtttaactggcacagtaaagaaggagatccattagtgtttgcaactgtaggaagcaacagagttaccttgtatgaatgtcattcacaaggagaaatccggttgttgcaatcttacgtggatgctgatgctgatgaaaacttttacacttgtgcatggaaatgctatcaatgagctgaaattccatccaagagatccaaatcttctcctgtcagtaagtaaagatcatgctttacgattatggaatatccagacggacactctggtggcaatatttggaggcgtagaagggcacagagatgaagttctaagtgctgattatgatcttttgggtgaaaaaataatgtcctgtggtatggatcattctcttaaactttggaggatcaattcaaagagaatgatgaatgcaattaaggaatcttatgattataatccaaataaaactaacagtcttgtgaaaatgccattgtgtgctggaaacct

SEQ ID NO: 140821 - protein, 734 aa, Artificial Sequence
  derived and/or modified sequence
MAASPGPAGVGGAGAVYGSGSSGFALDSGLEIKTRSVEQTLLPLVSQITTLINHKDNTKKSDKTLQAIQRVGQAVNLAVGRFVKVGEAIANENWDLKEEINIACIEAKQAGETIAALTDITNLNHLESDGQITIFTDKTGVIKAARLLLSSVTKVLLLADRVVIKQIITSRNKVLATMERLEKVNSFQEFVQIFSQFGNEMVEFAHLSGDRQNDLKDEKKKAKMAAARAVLEKCTMMLLTASKTCLRHPNCESAHKNKEGVFDRMKVALDKVIEIVTDCKPNGETDISSISIFTGIKEFKMNIEALRENLYFQSKENLSVTLEVILERMEDFTDSAYTSHEHRERILELSTQARMELQQLISVWIQAQSKKTKSIAEELELSILKISHSLNELKKELHSTATQLAADLLKYHADHVVLKALKLTGVEGNLEALAEYACKLSEQKEQLVETCRLLRHISGTEPLEITCIHAEETFQVTGQQIISAAETLTLHPSSKIAKENLDVFCEAWESQISDMSTLLREINDVFEGRRGEKYGYLSLPKPMKNNANLKSLKPDKPDSEEQAKIAKLGLKLGLLTSDADCEIEKWEDQENEIVQYGRNMSSMAYSLYLFTRGEGPLKTSQDLIHQLEVFAAEGLKLTSSVQAFSKQLKDDDKLMLLLEINKLIPLCHQLQTVTKTSLQNKVFLKVDKCITKTRSMMALLVQLLSLCYKLLKKLQMENNGWVSVTNKDTMDSKT

SEQ ID NO: 140822 - protein, 135 aa, Artificial Sequence
  derived and/or modified sequence
MSSMAYSLYLFTRGEGPLKTSQDLIHQLEVFAAEGLKLTSSVQAFSKQLKDDDKLMLLLEINKLIPLCHQLQTVTKTSLQNKVFLKVDKCITKTRSMMALLVQLLSLCYKLLKKLQMENNGWVSVTNKDTMDSKT

SEQ ID NO: 140823 - DNA, 2205 bp, Artificial Sequence
  derived and/or modified sequence
atggccgcctcccccgggcctgccggcgtggggggcgccggagctgtttatgggtcaggctcgtccggcttcgcgttagattccggcttggagatcaagaccaggtcagtggaacaaacactgctgccccttgtctctcagatcacaacccttattaatcataaagacaatacaaagaaatcagataaaaccctccaggccatccagcgcgtgggacaggccgtgaatttggctgtagggagatttgtgaaagtcggcgaggccattgccaacgagaattgggacctcaaggaagaaataaatatcgcatgcatcgaggctaaacaggctggcgaaacaattgcagctctgacagatatcactaatctgaatcacttagagagtgacggacagataactatttttaccgataaaacaggggtgattaaggcagctcggctgctgctgtcttctgtgactaaagtgctgctgctagctgaccgggtggttattaaacagattatcacttcacggaataaagtcctcgccactatggagcgcttggagaaggttaacagctttcaggagtttgtacagatcttctctcagttcggaaatgagatggtagagttcgcacatctcagtggcgacagacagaatgaccttaaagatgaaaaaaaaaaggccaaaatggcagccgctagagccgttctcgaaaaatgcactatgatgctgctgaccgcaagcaaaacctgtcttagacacccaaattgcgaaagtgcccacaaaaacaaggagggcgtgtttgacagaatgaaggtcgcgcttgataaagtgatcgaaattgtgaccgactgcaaacctaatggggaaaccgacattagctctattagcatttttaccggaatcaaggagttcaaaatgaatatcgaggccctgcgcgagaatctctactttcaatctaaggagaacctgagcgtgaccttggaagtgattttggaacgtatggaagattttaccgactctgcttacactagccatgaacacagggagcgaattctggaattatctacacaggcccggatggagttgcagcaactcatctcagtgtggatccaggcgcaaagtaaaaaaacaaagagtatcgcagaagaactggagttgtccatcctgaagatttcccactcgctgaacgagctcaaaaaggagctccacagtacagccacccaactggcagccgatctgctcaagtaccacgccgatcatgtcgtgctaaaagcactcaagctgactggggttgaggggaatctcgaggccttagccgaatacgcatgtaagctgtccgagcagaaagaacagctcgtggagacgtgtcggttgctaaggcacatctcgggcacagagcccctggagatcacctgtatccacgcagaagaaacctttcaggtgactggtcagcagatcatcagcgccgcagagactttgactctccatccctcctcaaaaatcgcaaaggaaaatctggacgttttttgtgaggcgtgggagtcacagatctccgatatgagtacactgcttagagagattaatgatgtgttcgagggccgccggggagaaaagtacggatacctgagcctcccaaaacctatgaagaacaacgctaaccttaaatccctgaagcccgataaacccgactccgaagagcaagccaagattgccaagttggggctgaagttggggctcctgactagcgatgccgattgcgaaattgaaaaatgggaggatcaagagaacgagatcgtgcagtacggacgtaacatgtcctctatggcctattctctatatctgtttacacgcggcgaagggcccttaaagacttcccaagatctcatccaccaactggaggtcttcgcggccgaggggctgaagttgacatcatccgtgcaggcgttttctaagcagctgaaggatgacgacaagcttatgctgcttcttgaaattaacaaacttatcccactgtgccaccagctgcagactgttaccaagaccagcctgcaaaataaggtgtttctgaaagtggacaaatgtattacgaagactagatctatgatggctctgttggttcagctcctctcactgtgctacaaacttctcaaaaaacttcagatggagaataatggctgggtctctgtcaccaataaggacacaatggactccaagacatag

SEQ ID NO: 140824 - DNA, 408 bp, Artificial Sequence
  derived and/or modified sequence
atgtcatcaatggcatattctctgtatctgttcactcgaggcgaaggaccactgaagacctcacaggatctgattcatcaattggaagtttttgcagcggagggcttaaagttgacttcatcagtccaggcattttccaagcaattgaaggacgacgacaagctcatgctcttgctggaaatcaataaacttattcccctctgccatcaactccagacagtgacgaaaactagcctacaaaataaggttttcctgaaggtcgacaaatgcatcactaaaacacggtcgatgatggccctgttagtacagcttctatccttgtgttataagctcctgaagaagctccagatggagaacaatggatgggtgtccgtgacaaataaggacacgatggattctaagacctag

SEQ ID NO: 140825 - DNA, 2205 bp, Artificial Sequence
  derived and/or modified sequence
atggccgccagccctggccctgctggggtgggcggggccggggctgtgtatggcagcggcagcagcggctttgccctggacagcggcctggagatcaagaccaggtctgtggagcagaccctgctgcccctggtgtcccagatcaccaccctcatcaaccacaaggacaacaccaagaagagtgacaagaccctgcaggccatccagagggtgggccaggccgtgaacctggccgtgggccgctttgtgaaggtgggggaggccatcgccaatgaaaactgggacctgaaggaggagatcaacatcgcctgcatcgaggccaagcaggccggggagaccatcgccgccctgacagacatcaccaacctgaaccacctggagagtgatggccagatcaccatcttcacagacaagacaggagtcatcaaggccgcccggctgctgctgagctctgtgaccaaggtgctgctgctggccgacagagtggtgatcaagcagatcatcaccagcaggaacaaggtgctggccaccatggagcggctggagaaggtgaacagcttccaggagtttgtgcagatcttcagccagtttggaaatgagatggtggagtttgcccacctgagcggggaccggcagaatgacctgaaggatgagaagaagaaggccaagatggccgccgcccgggctgtgctggagaagtgcaccatgatgctgctgacagccagcaagacctgcctgcggcaccccaactgtgagagcgcccacaagaacaaggagggcgtgtttgacaggatgaaggtggccctggacaaggtgattgaaattgtgacagactgcaagcccaacggggagacagacatcagcagcatcagcatcttcaccggcatcaaggagttcaagatgaacatcgaggccctgcgggagaacctgtacttccagagcaaggagaacctgtctgtgaccctggaggtgatcctggagaggatggaggacttcacagattctgcctacaccagccatgagcaccgggagcgcatcctggagctgagcacccaggccaggatggagctgcagcagctgatctctgtgtggatccaggcccagagcaagaagaccaagagcattgctgaggagctggagctgagcatcctgaagatcagccacagcctgaatgagctgaagaaggagctgcacagcacagccacccagctggccgctgacctgctgaagtaccacgccgaccacgtggtgctgaaggccctgaagctgactggagtggagggcaacctggaggccctggccgagtatgcctgcaagctgtctgagcagaaggagcagctggtggagacctgccgcctgctgcggcacatcagcggcacagagcccctggagatcacctgcatccacgccgaggagaccttccaggtgacaggccagcagatcatctctgctgctgagaccctgaccctgcaccccagcagcaagatcgccaaggagaacctggatgtgttctgtgaggcctgggagagccagatcagtgacatgagcaccctgctgcgggagatcaatgatgtgtttgagggcagaagaggagagaagtatggctacctgagcctgcccaagcccatgaagaacaatgccaacctgaagagcctgaagccagacaagccagattctgaggagcaggccaagatcgccaagctgggcctgaagctgggcctgctgaccagtgatgctgactgtgaaattgagaagtgggaggaccaggagaatgaaattgtgcagtatggcaggaacatgagctccatggcctacagcctgtacctgttcaccagaggagagggccccctgaagaccagccaggacctgatccaccagctggaggtgtttgctgctgagggcctgaagctgaccagctctgtgcaggccttcagcaagcagctgaaggatgatgacaagctgatgctgctgctggagatcaacaagctgatccccctgtgccaccagctgcagacagtgaccaagaccagcctgcagaacaaggtgttcctgaaggtggacaagtgcatcaccaagaccaggtccatgatggccctgctggtgcagctgctgagcctgtgctacaagctgctgaagaagctgcagatggagaacaacggctgggtgtctgtgaccaacaaggacaccatggacagcaagacctag

SEQ ID NO: 140826 - DNA, 408 bp, Artificial Sequence
  derived and/or modified sequence
atgagctccatggcctacagcctgtacctgttcaccagaggagagggccccctgaagaccagccaggacctgatccaccagctggaggtgtttgctgctgagggcctgaagctgaccagctctgtgcaggccttcagcaagcagctgaaggatgatgacaagctgatgctgctgctggagatcaacaagctgatccccctgtgccaccagctgcagacagtgaccaagaccagcctgcagaacaaggtgttcctgaaggtggacaagtgcatcaccaagaccaggtccatgatggccctgctggtgcagctgctgagcctgtgctacaagctgctgaagaagctgcagatggagaacaacggctgggtgtctgtgaccaacaaggacaccatggacagcaagacctag

SEQ ID NO: 140827 - DNA, 2205 bp, Artificial Sequence
  derived and/or modified sequence
atggccgccagccccggccccgccggcgtgggcggcgccggcgccgtgtatggatcaggctccagcggtttcgccctggacagcggcttagaaatcaagacaaggtccgtcgaacagacattactccccctagtgtctcaaattaccactctgatcaaccacaaagataatacgaaaaagtccgataaaactctgcaggccatccagagggttgggcaggcagtaaacctggccgtgggtagattcgtgaaagtcggcgaagcaatcgccaatgagaactgggatctgaaggaagaaattaacattgcatgcatagaagcgaagcaagctggggaaacaatcgcagcgctgactgatatcaccaatttgaaccacttggaaagcgacggtcaaatcacaattttcacagataagactggcgtaatcaaagctgcacgtctgctgttaagttccgtcacaaaagtgttgctcttagctgacagggtggtaattaaacagatcatcacctcgcggaataaggtgctggcaaccatggagcgcctggaaaaggtgaattcttttcaggagttcgtccagatcttctctcagtttgggaacgaaatggttgagttcgcgcatctgtcaggcgatagacagaacgatctgaaagatgagaaaaaaaaagcgaaaatggccgctgccagggcagtattagaaaagtgtaccatgatgttactgaccgcgtctaagacttgcttacggcatccaaactgtgagtccgcacacaagaataaggaaggcgtattcgatcgcatgaaagtagctctagacaaggttatcgagatagtgacagattgcaagcccaatggtgagacagatatctcttccatttccatatttacaggcatcaaggagttcaagatgaacattgaagccctgagggagaacctgtattttcaatcaaaggagaacctgagcgtcacactagaggtgatcctggagcgtatggaggattttaccgattcagcatacacaagccacgagcacagggagcggattctagagcttagtacacaggcccgcatggagctccagcagcttatttcggtgtggatacaggctcagtctaagaaaacaaagtccattgctgaagaactggaactgagtattctgaaaattagccattcattgaatgagctgaaaaaagaactgcacagtaccgcaacacagctcgccgcggacctcctcaagtaccatgccgatcatgtcgtcctaaaagcactcaaactaacaggtgtcgagggaaacctggaagctttggccgagtatgcctgcaagctgagtgagcaaaaggagcaattggtcgagacgtgccgcctgctgcggcatatttctggcacagagcctttggaaatcacatgtatccatgctgaggagacgttccaagtgactggccagcagattatcagcgccgctgagacacttaccctccatccatcgagtaaaatcgcaaaagaaaatctggatgtgttctgcgaggcctgggaatcccagatatctgacatgagcaccctgttaagggagattaacgatgtgttcgaagggcgacgcggcgaaaagtatgggtacctaagtctccccaaaccaatgaagaataacgcaaacctgaagagtctcaagcccgataaaccggactctgaagagcaagctaagatcgccaagctgggtctgaagctcggcctactgacttccgacgcagactgtgaaatcgagaaatgggaagaccaggaaaatgagatcgttcagtacggacgcaatatgagctcgatggcatattcattatatttgttcaccaggggcgagggacccctgaagacctcacaggatttgatccaccaattggaggtatttgctgccgaaggcctcaaactgacttcctctgtccaggcgttcagtaaacaactgaaggatgacgataagctcatgctgctacttgaaatcaataaactgattcccttatgccaccaactgcagacagttactaaaacatctctccagaataaagttttcttgaaggtggataaatgcatcacaaaaactcggtccatgatggctctgctggtacagctcctctcactgtgttacaaattactcaagaagctgcagatggaaaacaatggttgggtctctgtcacgaataaggacaccatggactcaaaaacttag

SEQ ID NO: 140828 - DNA, 408 bp, Artificial Sequence
  derived and/or modified sequence
atgagcagcatggcctacagcctgtacctgttcacccggggcgagggccccctcaagacatctcaggacctcattcatcagctggaggtgttcgctgccgagggtctgaagctgacgagctcggtccaggcctttagcaaacaacttaaagacgatgataagctaatgctgttactggaaatcaataagctgattcccctttgtcaccagctgcagactgtgactaagaccagcctgcaaaacaaagtgtttctgaaagtcgataaatgcatcactaaaactcgctccatgatggcactgcttgttcagctactgagcctatgctataagctgctaaaaaaacttcagatggaaaataacggctgggtgagcgtgaccaacaaggatactatggattcaaagacatag

SEQ ID NO: 140829 - DNA, 2205 bp, Artificial Sequence
  derived and/or modified sequence
atggcagcgtcccccggaccagcgggagtgggcggagcaggagctgtttacggcagcgggtccagtggattcgccttagacagtgggctggaaatcaaaaccaggagcgttgagcaaaccctcctgccgctggtgtcccagatcaccaccctgattaaccacaaagataacaccaaaaagagcgacaaaaccctgcaggccattcagcgcgtggggcaagctgtgaatctcgctgtcgggcgattcgttaaggtgggcgaggccatcgcaaacgaaaactgggatctgaaagaggagattaatatcgcctgcatcgaggcaaaacaggccggagaaaccatagccgctctgactgatatcacgaatctcaatcacctcgagagtgatggccagattaccatctttactgacaagaccggcgtaataaaagcagcaagattgttgttatcctccgtaaccaaggtgttgttgttagcggatagggtcgtgattaagcagatcatcacatcgaggaataaggtgctggccactatggagcgactggagaaggtaaattccttccaggaatttgtgcagatattctcacagtttggcaatgaaatggtggagttcgcacacctgagcggagaccgccagaacgatctgaaggacgagaaaaagaaagccaagatggccgcagcacgggctgttctcgaaaaatgcacaatgatgctcctgaccgctagcaagacctgcctgcgacaccccaactgcgagagcgcccacaagaataaagaaggggttttcgatcgtatgaaagtcgcactggataaagtgattgagattgttactgattgtaagccaaacggtgaaaccgacatcagttccatttcaattttcactgggatcaaagagttcaaaatgaatatcgaagcactccgagaaaatctatattttcagagtaaggaaaatctttcagttacactggaagtcatcttagagaggatggaggacttcacggactctgcgtacacaagtcacgagcaccgcgagagaatcctcgaactgagcacccaggcaagaatggagctacagcagctcatctcagtgtggatacaggcccagtcaaagaagaccaagtcgattgctgaggagttagagctgtctattctgaagatatctcactcactgaatgaattgaaaaaggaactgcactctaccgccacccagttagctgccgatctcctcaagtatcacgcagaccacgtagttctcaaggctcttaagctgactggggtggaaggcaatctggaggctctcgccgaatacgcatgcaaactttcggagcagaaagaacagctagttgaaacatgtcgccttttaagacacatcagcggtacagagccactcgagatcacttgcatacacgccgaggaaaccttccaggtaacgggacagcaaatcatcagcgccgcagaaacccttacgctgcatccgtctagtaagatagctaaggagaatttagacgtgttctgcgaggcatgggagtctcagatttctgacatgagcaccctcctccgcgagattaacgacgtatttgagggcagaagaggggagaagtacggctatctgtctctcccaaaacctatgaagaacaatgccaatctcaagtcactcaagcctgataagccagattcagaggagcaagctaagatcgcaaaacttgggctgaaactgggactgctgacctcagatgcggattgtgagatagagaagtgggaagatcaggaaaacgaaatagtgcagtacggacgcaatatgagctcaatggcttactccttatatttattcacacggggagaaggccctctaaagactagccaggatcttattcatcagctcgaggtgtttgctgcggaaggactcaagttgacatctagcgtccaggccttctccaagcaattaaaggatgatgataagctgatgcttctgctggaaataaacaaactgatccccctatgtcaccaactccagacggtgaccaagacctccctgcaaaataaggtgtttcttaaggtcgataaatgcatcacaaaaacacgctctatgatggcactgttggtgcagcttctgtctctctgctacaagctactgaaaaagctgcagatggagaataacgggtgggtcagcgtgacgaacaaagacaccatggactcgaagacctag

SEQ ID NO: 140830 - DNA, 408 bp, Artificial Sequence
  derived and/or modified sequence
atgtcgagcatggcctactccttgtacttgtttacacggggtgagggtccattgaaaacatcgcaggatttgatccaccagctggaagtgtttgcggctgagggactcaaattaacttctagtgtgcaagccttttcgaagcaattgaaggacgacgataaactcatgctcctcctggagataaacaagctgattcccttatgccatcaactgcaaacagtcaccaagacttccctgcaaaataaagtgtttctaaaggtagacaagtgtatcactaagacaagatccatgatggccctcctggttcagcttctgagtctctgttacaagctgctaaagaaacttcaaatggaaaataatgggtgggtctctgtgaccaataaggacaccatggactcaaagacttag

SEQ ID NO: 140831 - DNA, 2490 bp, Artificial Sequence
  derived and/or modified sequence
cctgtcgccgccgcctcgggcgggtgggctgactggcggcaggctcgccgcggcgcggagtcccggctgcgggatagaccgagggccatggccgcctctcccggacccgccggcgttggcggcgccggagcagtctacggctccggctcttcgggcttcgccctcgactcgggactggagatcaaaactcgctcggtggagcagacgctactcccgctggtttctcagatcaccacgcttattaatcataaagataataccaaaaagtctgataaaactctgcaagcaattcagcgtgtaggacaagctgtcaacttggcagttggaagatttgttaaagtaggagaagctatagccaatgaaaactgggatttgaaagaagaaataaatattgcttgtattgaagctaaacaagcaggagaaacaattgcagcacttacagacataaccaacttgaaccatctggaatctgatgggcagatcacaatttttacagacaaaacaggagtgataaaggctgcaagattacttctttcttcagtgacaaaagtgttgttgctggcagaccgagtagtcattaaacagataataacatcaagaaataaggttctcgcaactatggaaagactagagaaagtgaatagctttcaagagtttgtccaaatattcagtcaatttggaaatgaaatggtggagtttgcacatctgagtggagatagacaaaatgatttgaaagatgaaaagaaaaaggcaaaaatggcagcagctagggcagttcttgaaaagtgtacaatgatgcttctcacagcttcaaagacatgtctgaggcatcctaactgcgaatcagcccataaaaacaaagaaggagtatttgaccgtatgaaagtggcattggataaggtcattgaaattgtgactgactgtaaaccgaatggagagactgacatttcatctatcagtatttttactggaattaaggaattcaagatgaatattgaagctcttcgggagaatctttattttcagtccaaagagaacctttctgtgacattggaagtcatcttggagcgtatggaggactttactgattctgcctacaccagccatgagcacagagaacgcatcttggaactgtcaactcaggcgagaatggaactgcagcagttaatttctgtgtggattcaagctcaaagcaagaaaacaaaaagcatcgctgaagaactggaactcagtattttgaaaatcagtcacagtcttaatgaacttaagaaagaacttcatagtacagcgacacagctggcagcagatctattaaaataccatgctgatcatgtggttctaaaagcattaaaacttactggagtagaaggaaatttagaagctttggctgaatatgcctgtaaactctctgaacagaaagagcagcttgttgagacctgtcgattgttacgacacatatctgggacagaacctctggaaataacctgtatacatgcagaggagacatttcaggtgactggccaacagataatttctgctgctgaaacattgacattgcatccatctagtaaaattgctaaagaaaacctagatgtattttgtgaagcttgggaatcccaaattagtgacatgtcaacactgctgagagaaatcaatgacgtgtttgaaggaagacgaggagagaagtatggctacctttcacttccaaagccaatgaagaataatgcaaacctgaaatcattaaagccagacaagcctgactctgaggagcaagccaagatagcaaagcttggacttaagctgggtttgctcacctctgacgctgactgcgaaattgagaagtgggaagatcaggagaatgagattgttcaatatggacggaacatgtccagtatggcctattctctgtatttatttactagaggagaggggccactgaaaacttcccaggatttaattcatcaactagaggtttttgctgcagagggtttaaagcttacttccagtgttcaagctttttcaaaacagctgaaagacgatgacaagcttatgcttctcctggaaataaacaagctaattcctctatgccaccagctccagacagtaactaagacttctttgcagaataaagtatttctaaaggttgacaagtgtattacgaagacaagatccatgatggctctcttagtccaacttctttcactttgttataaactgctgaagaagcttcagatggaaaataacggatgggtctcagttacaaataaggacactatggatagtaaaacttgagaagcttttggggtcagatctctggaacatcatgtgatgaagctgacatttttaaaaatcaaatgatcctttatcttttcagaaattcatcaattttataaagaaaacaatattgaaattttgctctattttctgatcatgaaactgattgtaaagctttttgacaactaataaatgtcttggtaattgctagattct

SEQ ID NO: 140832 - DNA, 824 bp, Artificial Sequence
  derived and/or modified sequence
catcaatcctggccagctgattctcctctttaccagaacaccattgagcttagtacagaagaataatgcaaacctgaaatcattaaagccagacaagcctgactctgaggagcaagccaagatagcaaagcttggacttaagctgggtttgctcacctctgacgctgactgcgaaattgagaagtgggaagatcaggagaatgagattgttcaatatggacggaacatgtccagtatggcctattctctgtatttatttactagaggagaggggccactgaaaacttcccaggatttaattcatcaactagaggtttttgctgcagagggtttaaagcttacttccagtgttcaagctttttcaaaacagctgaaagacgatgacaagcttatgcttctcctggaaataaacaagctaattcctctatgccaccagctccagacagtaactaagacttctttgcagaataaagtatttctaaaggttgacaagtgtattacgaagacaagatccatgatggctctcttagtccaacttctttcactttgttataaactgctgaagaagcttcagatggaaaataacggatgggtctcagttacaaataaggacactatggatagtaaaacttgagaagcttttggggtcagatctctggaacatcatgtgatgaagctgacatttttaaaaatcaaatgatcctttatcttttcagaaattcatcaattttataaagaaaacaatattgaaattttgctctattttctgatcatgaaactgattgtaaagctttttgacaactaataaatgtcttggtaattgc

SEQ ID NO: 140833 - DNA, 2205 bp, Artificial Sequence
  derived and/or modified sequence
atggccgccagccccggccccgccggcgtgggcggcgccggcgccgtgtacggcagcggcagcagcggcttcgccctggacagcggcctggagatcaagaccagaagcgtggagcagaccctgctgcccctggtgagccagatcaccaccctgatcaaccacaaggacaacaccaagaagagcgacaagaccctgcaggccatccagagagtgggccaggccgtgaacctggccgtgggcagattcgtgaaggtgggcgaggccatcgccaacgagaactgggacctgaaggaggagatcaacatcgcctgcatcgaggccaagcaggccggcgagaccatcgccgccctgaccgacatcaccaacctgaaccacctggagagcgacggccagatcaccatcttcaccgacaagaccggcgtgatcaaggccgccagactgctgctgagcagcgtgaccaaggtgctgctgctggccgacagagtggtgatcaagcagatcatcaccagcagaaacaaggtgctggccaccatggagagactggagaaggtgaacagcttccaggagttcgtgcagatcttcagccagttcggcaacgagatggtggagttcgcccacctgagcggcgacagacagaacgacctgaaggacgagaagaagaaggccaagatggccgccgccagagccgtgctggagaagtgcaccatgatgctgctgaccgccagcaagacctgcctgagacaccccaactgcgagagcgcccacaagaacaaggagggcgtgttcgacagaatgaaggtggccctggacaaggtgatcgagatcgtgaccgactgcaagcccaacggcgagaccgacatcagcagcatcagcatcttcaccggcatcaaggagttcaagatgaacatcgaggccctgagagagaacctgtacttccagagcaaggagaacctgagcgtgaccctggaggtgatcctggagagaatggaggacttcaccgacagcgcctacaccagccacgagcacagagagagaatcctggagctgagcacccaggccagaatggagctgcagcagctgatcagcgtgtggatccaggcccagagcaagaagaccaagagcatcgccgaggagctggagctgagcatcctgaagatcagccacagcctgaacgagctgaagaaggagctgcacagcaccgccacccagctggccgccgacctgctgaagtaccacgccgaccacgtggtgctgaaggccctgaagctgaccggcgtggagggcaacctggaggccctggccgagtacgcctgcaagctgagcgagcagaaggagcagctggtggagacctgcagactgctgagacacatcagcggcaccgagcccctggagatcacctgcatccacgccgaggagaccttccaggtgaccggccagcagatcatcagcgccgccgagaccctgaccctgcaccccagcagcaagatcgccaaggagaacctggacgtgttctgcgaggcctgggagagccagatcagcgacatgagcaccctgctgagagagatcaacgacgtgttcgagggcagaagaggcgagaagtacggctacctgagcctgcccaagcccatgaagaacaacgccaacctgaagagcctgaagcccgacaagcccgacagcgaggagcaggccaagatcgccaagctgggcctgaagctgggcctgctgaccagcgacgccgactgcgagatcgagaagtgggaggaccaggagaacgagatcgtgcagtacggcagaaacatgagcagcatggcctacagcctgtacctgttcaccagaggcgagggccccctgaagaccagccaggacctgatccaccagctggaggtgttcgccgccgagggcctgaagctgaccagcagcgtgcaggccttcagcaagcagctgaaggacgacgacaagctgatgctgctgctggagatcaacaagctgatccccctgtgccaccagctgcagaccgtgaccaagaccagcctgcagaacaaggtgttcctgaaggtggacaagtgcatcaccaagaccagaagcatgatggccctgctggtgcagctgctgagcctgtgctacaagctgctgaagaagctgcagatggagaacaacggctgggtgagcgtgaccaacaaggacaccatggacagcaagacctag

SEQ ID NO: 140834 - DNA, 408 bp, Artificial Sequence
  derived and/or modified sequence
atgagcagcatggcctacagcctgtacctgttcaccagaggcgagggccccctgaagaccagccaggacctgatccaccagctggaggtgttcgccgccgagggcctgaagctgaccagcagcgtgcaggccttcagcaagcagctgaaggacgacgacaagctgatgctgctgctggagatcaacaagctgatccccctgtgccaccagctgcagaccgtgaccaagaccagcctgcagaacaaggtgttcctgaaggtggacaagtgcatcaccaagaccagaagcatgatggccctgctggtgcagctgctgagcctgtgctacaagctgctgaagaagctgcagatggagaacaacggctgggtgagcgtgaccaacaaggacaccatggacagcaagacctag

SEQ ID NO: 140835 - protein, 476 aa, Artificial Sequence
  derived and/or modified sequence
MANSAKAEEYEKMSLEQAKASVNSETESSFNINENTTASGTGLSEKTSVCRQVDIARKRKEFEDDLVKESSSCGKDTPSKKRKLDPEIVPEEKDCGDAEGNSKKRKRETEDVPKDKSSTGDGTQNKRKIALEDVPEKQKNLEEGHSSTVAAHYNELQEVGLEKRSQSRIFYLRNFNNWMKSVLIGEFLEKVRQKKKRDITVLDLGCGKGGDLLKWKKGRINKLVCTDIADVSVKQCQQRYEDMKNRRDSEYIFSAEFITADSSKELLIDKFRDPQMCFDICSCQFVCHYSFESYEQADMMLRNACERLSPGGYFIGTTPNSFELIRRLEASETESFGNEIYTVKFQKKGDYPLFGCKYDFNLEGVVDVPEFLVYFPLLNEMAKKYNMKLVYKKTFLEFYEEKIKNNENKMLLKRMQALEPYPANESSKLVSEKVDDYEHAAKYMKNSQVRLPLGTLSKSEWEATSIYLVFAFEKQQ

SEQ ID NO: 140836 - protein, 234 aa, Artificial Sequence [sequence omitted]

SEQ ID NO: 140837 - DNA, 1431 bp, Artificial Sequence
  derived and/or modified sequence
atggcaaattccgcgaaggccgaagaatatgagaagatgagcctagaacaggccaaagccagcgtgaattctgagacagagagttcatttaatattaacgaaaataccactgcgagcggtacaggcctgtccgagaagaccagcgtgtgccgccaagtcgacatagccaggaagagaaaagaattcgaagatgacttggtgaaggagtcgagttcatgcgggaaggacactccttctaaaaaacgcaaacttgacccggaaatcgtacctgaggagaaggactgtggggacgcagagggtaatagtaaaaagcgcaaacgcgagacagaagatgtcccgaaggataaatcttccactggagacgggacccagaacaaacggaaaatcgcattagaggacgtccccgagaaacagaagaacctcgaagaggggcacagcagtacagtcgccgctcattataatgaacttcaagaagtcgggctcgagaagcgctctcagagtcgtatcttttacctcaggaatttcaataactggatgaagtccgtcctgatcggggagtttctggagaaagtgcgtcagaagaagaagagagatattacagtattggatcttgggtgcggaaaggggggcgacctacttaagtggaaaaaaggtagaatcaacaaactggtctgcactgacatcgccgatgtgtctgttaaacagtgccaacaaaggtacgaggacatgaagaatcggcgggactctgaatacattttttccgcagagtttattactgcagacagcagcaaagagctattgatagacaaatttcgggatccgcagatgtgtttcgatatttgttcctgtcaattcgtctgtcattattccttcgaaagctacgagcaggctgacatgatgctgagaaacgcctgtgaaagattgagtccaggtggctactttatagggaccactccgaactcctttgagctgatccgccgcctcgaggccagcgagactgaatcattcggcaacgaaatatatacggtcaagttccagaagaaaggagactacccactgtttggctgcaaatacgatttcaacctggaaggcgtggtggatgtgccagagttcctggtgtatttccccctcctgaacgaaatggctaagaagtacaacatgaaattggtgtacaaaaagaccttcctcgaattttatgaggagaaaattaagaataacgagaacaagatgttacttaaacgtatgcaggcgctggaaccctaccctgccaatgaaagctcaaaactcgtctccgaaaaagtggacgattatgaacatgccgcaaaatatatgaagaactcacaggtccgccttcccctcggcacgctgtccaagtccgagtgggaggctacttccatctatctggtgtttgccttcgaaaagcagcagtag

SEQ ID NO: 140838 - DNA, 1431 bp, Artificial Sequence
  derived and/or modified sequence
atggcaaacagcgccaaagctgaagagtacgagaagatgtcattggagcaagcaaaagctagtgtgaactccgaaacggaatcaagctttaatattaacgagaatacaactgcctctggaacaggcctgtccgaaaaaacctccgtgtgtaggcaggtggatatagcccgcaagcggaaagaatttgaggatgatttggttaaggaaagcagcagttgtggcaaagatacaccttctaagaaaagaaaactagacccagagatcgtccccgaagagaaagactgtggagacgccgaaggcaatagcaagaaacgaaaacgggaaactgaagacgtgcccaaagacaagtccagcacaggagatgggacccagaacaaaaggaaaattgccttggaggacgtaccagagaagcaaaagaaccttgaggaagggcacagcagcactgtggcagcacattataatgaactccaagaagttggactggaaaagaggtctcagtccagaattttctacctgcggaacttcaacaattggatgaagtccgtgttaatcggggaattcctggaaaaagtccgacaaaaaaagaaacgagacataacagtgctagacctgggctgcggcaaaggtggggacctcctgaaatggaaaaaggggcgaatcaacaaattggtctgtaccgatatcgcagatgtgagcgtgaagcagtgccagcagagatacgaggacatgaaaaacagacgggactccgagtacatcttctccgcagagtttattactgctgactcaagtaaagagttgctaattgataagtttagagatccacaaatgtgttttgatatctgctcctgccagttcgtctgtcactattcctttgaaagctacgagcaagctgacatgatgcttcgcaacgcctgtgagcggctgtcacccgggggttattttataggaactacccccaacagcttcgaacttattagacggctcgaagcaagcgagaccgagagtttcgggaacgaaatctacactgtaaaattccaaaagaagggcgattatccactcttcggatgtaagtatgattttaatctagagggcgtggtggacgtgccagagttcttagtttacttccctctactcaatgagatggccaagaagtataatatgaagctcgtgtataagaaaacctttctcgagttctatgaggagaagatcaaaaataatgagaataaaatgctactgaagaggatgcaggcgctggaaccctacccagctaatgagagcagtaaacttgtgagtgagaaggtggacgattacgagcacgccgccaagtatatgaagaacagtcaggtgcggctaccgttgggaacactgagcaagagtgagtgggaggccacaagcatctatctcgtattcgcttttgagaaacaacagtag

SEQ ID NO: 140839 - DNA, 705 bp, Artificial Sequence
  derived and/or modified sequence
atgaaaaaccgcagggacagcgaatacatcttcagtgcagaatttatcaccgccgacagttcgaaggagctgctgattgataaattcagggaccctcagatgtgcttcgatatttgctcatgtcaatttgtgtgccattatagcttcgaatcatatgagcaagccgatatgatgctcaggaacgcgtgtgagcggctctcaccaggcggttatttcatcggtacaaccccaaattcttttgagctgatcagacgcctggaggcgagtgaaaccgagtcctttggaaacgaaatctatactgttaaattccagaaaaagggcgattaccccctgttcggttgcaagtatgacttcaatcttgagggggttgtcgatgtgccagagtttcttgtttacttcccccttctcaacgagatggcaaaaaagtacaatatgaaacttgtatataagaagactttcttggagttttacgaagagaaaatcaagaataatgaaaacaagatgctgctcaaaaggatgcaggcacttgagccatatcctgctaacgaaagttcgaaacttgtctctgagaaagtcgacgactatgaacatgctgccaaatatatgaaaaactctcaggttaggctgcctctgggtacgctttcaaaatcagagtgggaagctactagcatatacctggtttttgcatttgagaagcagcagtag

SEQ ID NO: 140840 - DNA, 1431 bp, Artificial Sequence
  derived and/or modified sequence
atggcaaatagtgccaaggctgaagagtacgaaaaaatgagcctggagcaagccaaggcctctgtgaacagtgaaaccgagtcttcttttaatattaatgagaatacgacagcttcaggaaccggacttagtgaaaaaacatcggtatgtcgccaggtggatatcgccagaaagcggaaggagttcgaagacgacttggtaaaggagtcatccagctgcgggaaagacactccaagtaaaaagaggaagcttgatccggaaattgtacccgaagaaaaggactgtggcgacgctgaagggaactcaaaaaaaaggaagagggagacagaagacgttcccaaagataaaagctcaactggcgacgggacgcagaacaaacgaaagatcgctctagaggacgtgcccgagaaacaaaagaatttggaggagggccatagttctacggtagcagctcattataacgagctgcaggaggtgggcttagagaagagatcacaatcccggattttctatcttaggaactttaataattggatgaaatcagtgctaatcggcgaattcctggagaaagtacggcagaagaaaaaaagggacattacggtcttagatctgggctgcggtaaggggggtgatcttttgaaatggaaaaagggccgaatcaataaattagtttgcacagatatcgcggatgtgtccgtgaaacagtgccagcaaaggtatgaagatatgaagaacaggcgcgatagtgagtacatcttttccgcagagtttataacagctgatagctccaaggagttacttatcgacaaattcagggacccccagatgtgctttgacatatgctcctgtcagtttgtctgtcattactcttttgagtcttacgagcaagccgatatgatgctgcgcaacgcctgcgagagactgagcccaggcggttacttcattggaaccaccccgaacagcttcgagctcattcgacgactggaggcgagcgaaacggaaagctttggcaacgagatttatacagtcaaatttcagaaaaagggtgattaccccttgtttggctgtaaatatgactttaacctcgagggcgttgtggatgtgccagagttcctggtctacttcccattgctcaacgaaatggctaagaaatataacatgaagcttgtgtacaaaaagactttcctcgagttctatgaggaaaagataaagaataatgaaaacaaaatgctgttgaagagaatgcaggctcttgaaccatatcccgccaacgagagcagtaagcttgtgagcgaaaaagtcgatgattatgagcatgcagcgaaatacatgaaaaactcccaggttaggctgccgctgggaacgctgagtaagagcgaatgggaggccacatccatctatctagtattcgccttcgagaaacagcagtag

SEQ ID NO: 140841 - DNA, 1431 bp, Artificial Sequence
  derived and/or modified sequence
atggccaacagcgccaaggccgaggagtatgagaagatgagcctggagcaggccaaggcctctgtgaacagcgagacagagagcagcttcaacatcaatgaaaacaccacagccagcggcaccggcctgtctgagaagacctctgtgtgccggcaggtggacatcgccaggaagaggaaggagtttgaagatgacctggtgaaggagagcagcagctgtgggaaggacacccccagcaagaagaggaagctggaccctgagatcgtgcctgaggagaaggactgtggagatgctgagggcaacagcaagaagaggaagcgggagacagaagatgtgcccaaggacaagagcagcactggagatggcacccagaacaagaggaagatcgccctggaggatgtgcctgagaagcagaagaacctggaggagggccacagcagcacagtggccgcccactacaatgagctgcaggaggtgggcctggagaagaggagccagagccgcatcttctacctgaggaacttcaacaactggatgaagtctgtgctgattggagagttcctggagaaggtgcggcagaagaagaagagggacatcaccgtgctggacctgggctgtgggaagggcggggacctgctgaagtggaagaagggccgcatcaacaagctggtgtgcacagacattgctgatgtgtctgtgaagcagtgccagcagagatatgaggacatgaagaacagaagagattctgagtacatcttctctgctgagttcatcacagctgacagcagcaaggagctgctgattgacaagttccgggacccccagatgtgctttgacatctgcagctgccagtttgtgtgccactacagctttgagagctatgagcaggccgacatgatgctgagaaatgcctgtgagcggctgagccctgggggctacttcatcggcaccacccccaacagctttgagctgatccggcggctggaggccagcgagacagagagctttggaaatgagatctacacagtgaagttccagaagaagggggactaccccctgtttggctgcaagtatgacttcaacctggagggcgtggtggatgtgcctgagttcctggtgtacttccccctgctgaatgagatggccaagaagtacaacatgaagctggtgtacaagaagaccttcctggagttctatgaggagaagatcaagaacaatgaaaacaagatgctgctgaagaggatgcaggccctggagccctacccagccaatgaaagcagcaagctggtgtctgagaaggtggatgattatgaacatgctgccaagtacatgaagaacagccaggtgcggctgcccctgggcaccctgagcaagtctgagtgggaggccaccagcatctacctggtgtttgcctttgagaagcagcagtag

SEQ ID NO: 140842 - DNA, 705 bp, Artificial Sequence
  derived and/or modified sequence
atgaagaacagaagagattctgagtacatcttctctgctgagttcatcacagctgacagcagcaaggagctgctgattgacaagttccgggacccccagatgtgctttgacatctgcagctgccagtttgtgtgccactacagctttgagagctatgagcaggccgacatgatgctgagaaatgcctgtgagcggctgagccctgggggctacttcatcggcaccacccccaacagctttgagctgatccggcggctggaggccagcgagacagagagctttggaaatgagatctacacagtgaagttccagaagaagggggactaccccctgtttggctgcaagtatgacttcaacctggagggcgtggtggatgtgcctgagttcctggtgtacttccccctgctgaatgagatggccaagaagtacaacatgaagctggtgtacaagaagaccttcctggagttctatgaggagaagatcaagaacaatgaaaacaagatgctgctgaagaggatgcaggccctggagccctacccagccaatgaaagcagcaagctggtgtctgagaaggtggatgattatgaacatgctgccaagtacatgaagaacagccaggtgcggctgcccctgggcaccctgagcaagtctgagtgggaggccaccagcatctacctggtgtttgcctttgagaagcagcagtag

SEQ ID NO: 140843 - DNA, 1431 bp, Artificial Sequence
  derived and/or modified sequence
atggccaacagcgccaaggccgaggagtacgagaagatgagcctggagcaggccaaggcctctgtcaactctgaaactgagtcctccttcaacattaacgaaaacacgactgcttctggcaccgggctgtccgagaagacgtctgtgtgccggcaggtggatattgccaggaaaagaaaggagtttgaggacgatctagtcaaggaatcctcctcttgcggcaaagacaccccctctaagaaaagaaagctggacccggaaatcgtgcccgaggagaaagactgtggcgacgcagagggaaattctaagaagcgaaagagagagactgaggacgttcccaaggataagagtagcaccggcgatggaacccaaaacaaacgtaaaatagccctcgaggatgtgccggaaaagcagaaaaatctagaagagggccacagcagtacagtggcggctcattacaacgaacttcaagaggttggactggaaaagaggtctcagtctaggatcttctacctcaggaacttcaataattggatgaaatccgtcctcatcggcgagtttctggaaaaggtgaggcagaaaaaaaagcgagacatcacagttttggacctgggttgtggtaaaggaggagacttgctgaaatggaagaagggacgaatcaacaagttggtttgtacggatattgccgatgtgtcagtgaaacaatgccagcagcgttacgaagatatgaaaaaccgaagagactctgagtatatcttcagtgctgagtttatcaccgccgacagttccaaagagttactcatcgacaaatttcgcgatccccagatgtgctttgacatctgctcatgccagttcgtttgtcactacagctttgaaagttatgagcaggctgacatgatgctccgcaatgcttgtgaacgcctctctcccgggggctactttatagggaccacccccaactcatttgaactcattaggagacttgaggcatccgagaccgagtcattcggaaacgaaatctacaccgtgaagttccagaaaaaaggtgactacccactgtttggttgtaaatacgacttcaacttagagggagtggtggacgtccctgaattcctcgtatactttccactcctgaacgagatggctaagaaatacaacatgaagctcgtctataagaaaacattcctggagttctatgaggagaagataaagaataacgagaacaaaatgctgctgaaacggatgcaagcgttggagccatatcctgctaacgaatcatccaagctcgtctctgagaaggtggatgattacgaacacgccgctaagtacatgaagaactcccaagtccgcttgcctcttggtacattgagcaagagtgagtgggaggctacgagtatctacctggtgttcgccttcgaaaagcagcagtag

SEQ ID NO: 140844 - DNA, 1431 bp, Artificial Sequence
  derived and/or modified sequence
atggccaacagcgccaaggccgaggagtacgagaagatgagcctggagcaggccaaggcgtctgtaaactcagagacagagagtagctttaatattaacgaaaataccacagcctctggaacaggcctatccgagaaaacctctgtctgtcgccaggtcgatatcgctcggaagaggaaggaattcgaggatgatctggtcaaagagagtagtagttgcggcaaggatacaccgagtaaaaagagaaaactcgacccagaaatcgtaccagaagagaaagattgtggcgacgctgagggtaacagcaaaaagagaaagcgggaaacagaagacgtccctaaggataagagcagcacaggcgatgggacccaaaacaagaggaagatcgcattggaggacgtgcccgagaaacagaagaacctagaagaaggacattcatcaaccgtggccgctcactacaacgaactgcaggaggtgggactcgaaaaaaggtcccagagtcgcatcttttatcttcgcaacttcaacaactggatgaagagcgtgctaattggggagtttctggagaaagtgaggcaaaaaaagaaacgtgacataacagtgctcgacctgggatgtgggaagggtggagatctgctgaagtggaaaaagggtcgaatcaataaactggtctgtacggatatcgccgacgtatcagtgaaacagtgtcagcagcgatatgaagacatgaaaaatcgtcgtgattctgagtacattttttcagccgagtttatcacagctgacagctccaaggagttgctgatcgacaaattccgagatccccaaatgtgctttgacatttgctcttgccagttcgtatgtcactatagctttgaatcctacgagcaggcagatatgatgctgcggaatgcttgcgagagactgagccctggggggtactttatcgggaccactccaaattcttttgagctcatcagaaggctcgaggcatctgaaactgaaagttttggcaacgaaatctataccgtgaaattccagaaaaagggcgattaccccctgttcggatgcaaatatgattttaatctggagggtgttgtggacgtacccgagtttctggtgtatttcccccttcttaatgaaatggctaagaaatacaacatgaagctggtgtacaagaagacattcctggagttctacgaagagaaaatcaaaaacaatgagaacaaaatgttgctgaagcggatgcaggcattggagccttatccagctaacgaaagtagcaagttggtgtcagaaaaagtagacgattacgagcatgctgcaaagtacatgaagaactctcaggttaggctgccgctgggaactctgagtaagtccgaatgggaagcaacctcaatatacctggtgtttgctttcgagaaacagcagtag

SEQ ID NO: 140845 - DNA, 705 bp, Artificial Sequence
  derived and/or modified sequence
atgaagaaccggcgggacagcgagtacatcttcagcgccgagttcatcactgcagattcgtccaaagagcttcttatcgacaagttcagggacccacaaatgtgttttgatatttgttcctgccagttcgtttgtcattactcatttgagtcttatgaacaagcagatatgatgctgcgcaacgcctgtgagagacttagtccaggggggtattttattggcactacccccaattcattcgaacttattagacggctggaggccagcgagacggaaagtttcgggaatgagatttacacggtgaaatttcagaaaaagggcgattaccccctttttggctgtaagtatgattttaacttggaaggagtggttgatgtacctgagtttttggtatatttccctcttctcaatgagatggccaaaaaatacaatatgaaactggtatataaaaaaacatttcttgaattttatgaagagaaaatcaaaaacaatgaaaacaagatgctgttgaagcgcatgcaggccctggagccctatcctgcaaatgaatcctcgaagctggtcagtgagaaagttgacgattatgagcatgccgccaagtacatgaagaattcgcaggtaaggctgccgctggggaccttaagcaagagcgagtgggaagcaacttcaatctacctggtctttgctttcgagaagcagcaatag

SEQ ID NO: 140846 - DNA, 1431 bp, Artificial Sequence
  derived and/or modified sequence
atggccaacagcgccaaggccgaggagtacgagaagatgagcctggagcaggccaaagcaagcgttaactcggaaaccgaatcctcctttaacatcaatgagaatactacagctagcggcacgggactatctgaaaaaacgtcagtgtgcaggcaagtagatattgcgcgcaaaagaaaggagttcgaagatgacctggtaaaagaatctagctcatgtggcaaggatactcctagcaagaaacgtaagctggatcccgaaatcgtccctgaagaaaaagattgtggagacgccgaaggtaattccaagaaacgcaaaagagaaacagaagacgtgcccaaggataaatcctccactggcgacggcacccagaataagagaaagatagcactcgaagacgtccccgagaaacagaagaatctggaggagggacactcaagcaccgttgcagctcattacaatgagttacaggaggtgggcctcgaaaaaagaagccaatccaggattttctacttaagaaattttaataactggatgaagtcggtcctgattggtgagttccttgagaaggtccgccagaagaaaaagagggacattaccgtgttggatcttggatgcggaaagggtggagatctgctgaaatggaaaaagggcaggattaataaactggtgtgcaccgacattgccgacgtctccgtgaaacagtgccaacaaaggtatgaggacatgaagaatcggcgggattccgagtatattttttctgccgagtttatcacagccgacagctccaaagagctcctcattgacaagttccgagatccacagatgtgcttcgatatctgctcttgtcaatttgtatgccactatagtttcgagtcgtacgaacaggcagatatgatgttacgcaatgcatgtgaaagactgtcaccgggcgggtatttcattgggactacgcctaactcttttgagctcattagacgcctggaagcttcagagaccgaatcctttggtaatgagatctacaccgttaagtttcagaaaaaaggtgattacccccttttcgggtgcaagtacgactttaatctggaaggagtagttgacgtacctgagttcctggtgtactttccactcttgaacgagatggccaagaaatataacatgaaactggtgtataaaaagacatttcttgaattttacgaagaaaagatcaaaaataatgagaacaaaatgctgctgaagcgaatgcaggctctggagccttaccctgccaacgagtcttcaaagcttgtctctgagaaggttgacgattatgagcacgcggcgaaatacatgaaaaactcccaggtgcgactgcctcttggcacactctccaagtccgaatgggaggccacttctatttatttggtctttgcctttgaaaagcagcagtag

SEQ ID NO: 140847 - DNA, 1431 bp, Artificial Sequence
  derived and/or modified sequence
atggctaattctgcaaaagccgaggaatatgagaaaatgtcgctcgagcaggctaaagctagtgtgaatagtgaaactgaatcttccttcaacataaatgagaataccactgcgagcggcacagggttatcagaaaagacttctgtatgtagacaggtggacattgcacgcaagagaaaggaatttgaagatgatctggtgaaggaaagttcctcctgcggcaaggatacaccgtccaagaaacggaagctcgaccctgaaatcgttcccgaagagaaggattgcggcgatgccgagggaaactctaaaaagcgtaaacgcgagacagaggatgttcctaaagataagtcgagcacaggggatgggactcagaataagagaaaaatcgccttagaggatgttccggagaaacagaagaacctggaagaaggacacagttctactgtcgccgctcattataacgagcttcaggaagttggactcgaaaaacggagccagtcccgcatattctatctccggaatttcaacaactggatgaagtccgttctgattggtgagttcctggagaaggtgcgacagaaaaagaagagagacataacagttctggatctgggctgtgggaagggcggagatctcttaaagtggaagaagggacgtatcaacaagctggtctgcacggacatcgccgacgtatctgtcaagcagtgtcagcagcggtacgaagacatgaagaatagacgtgacagcgagtacatatttagcgctgaatttattactgcggattccagtaaagagctactgatcgacaagtttcgcgatccgcagatgtgctttgacatctgcagttgtcagttcgtgtgtcactactctttcgaaagttacgagcaggcagacatgatgctacggaatgcctgtgaacggctctccccgggaggatactttataggaactacgccaaatagcttcgagctgatacggaggcttgaggcttctgaaactgaatctttcgggaacgagatctataccgtgaaattccagaagaaaggtgattacccactgttcggatgtaaatacgacttcaatctcgagggcgtggtagacgtccccgaattcctcgtgtacttccctttgttgaacgaaatggcgaagaaatataatatgaagctcgtctacaagaagaccttccttgaattctacgaggagaagatcaaaaacaatgagaataagatgctccttaagcgcatgcaagccctggagccgtatcccgctaacgagagctctaagctcgtgtctgagaaagtggacgactacgagcatgccgcaaaatacatgaagaacagccaggtgcgactacccctggggaccctttcaaaatctgagtgggaggccacgtcaatctacctggtgttcgcatttgagaagcagcagtag

SEQ ID NO: 140848 - DNA, 1431 bp, Artificial Sequence
  derived and/or modified sequence
atggcaaacagcgcgaaggctgaagaatatgaaaagatgtctttggaacaggcgaaggcatctgtaaacagcgagaccgaaagctctttcaatatcaacgagaacactactgcctctggaacgggcctgtccgagaagacgagtgtttgccgccaggtggatattgcccgaaagcggaaggagtttgaggacgacctggtgaaggagagctctagctgtggaaaagatactccaagcaagaaacggaagctggatccagagatagtccccgaagagaaggattgcggcgacgccgagggaaactctaagaagagaaagcgagagacagaagatgtcccaaaggacaaaagtagcacaggtgatggaacacaaaacaagcggaaaatagccctggaggacgttcccgagaagcagaagaacctagaggaaggccactcctccacagtggctgctcactacaacgaactgcaggaagtgggactggaaaaacgctcgcagtcacgcattttttatctccgaaacttcaataactggatgaagtccgttctcatcggcgaattcctagaaaaggtgcggcaaaaaaagaaaagagacattacagtgttagatttgggttgcggcaagggaggagacttgctgaagtggaaaaagggaagaatcaataagctcgtgtgtaccgacatcgctgatgtctctgttaaacagtgccagcagagatatgaagatatgaagaaccggagagactctgagtatattttctctgccgagttcatcactgccgacagcagcaaagaactcctgatcgataagtttcgggatccacagatgtgctttgatatctgctcctgtcaattcgtgtgccattatagctttgaaagctatgagcaggctgacatgatgctgcgaaacgcatgcgagaggctgtcacccggtggctattttattgggacgacaccaaattcctttgaactcataagaaggctggaggccagtgaaactgaatccttcggcaacgaaatctacacggtcaagtttcaaaagaaaggtgactacccgctgttcggatgcaagtatgatttcaacctcgagggagtcgtagacgtgcccgagttcctggtttactttcctctgctcaacgaaatggctaagaagtacaacatgaaactggtatataagaaaacattcctggaattctatgaggaaaaaatcaagaacaatgagaataagatgctccttaaacgaatgcaggccctggaaccctatccagctaacgagagctcaaagctggtatccgaaaaggtcgatgattatgagcacgccgcaaaatacatgaagaattctcaggttcgcctgccccttggcacccttagcaaatctgaatgggaagctactagcatctacctcgtgttcgcgtttgaaaagcagcagtag

SEQ ID NO: 140849 - DNA, 705 bp, Artificial Sequence
  derived and/or modified sequence
atgaagaataggcgggactctgagtacatcttctccgctgagtttatcaccgccgatagcagtaaagagctgctgatcgataagttcagagatccacaaatgtgctttgatatttgctcatgtcagtttgtgtgtcactacagcttcgagtcatatgaacaagcagatatgatgctgcgcaacgcctgcgaacgcctttctcccggaggttacttcatcggtaccactcccaactcttttgaactgatcagacgcctggaggcgtccgaaaccgagagttttggcaacgaaatctatactgtaaaattccagaaaaaaggagactacccactcttcggctgcaagtatgactttaacttggaaggtgtagtcgacgtcccagaatttctcgtctacttcccattactgaacgagatggccaaaaagtataacatgaaacttgtctacaaaaagacattcctggaattctatgaggagaaaattaaaaacaatgagaataagatgcttctaaagagaatgcaggcactggagccctatcctgccaatgagtcatcaaaacttgtgtcggaaaaggtggacgattatgagcatgcggctaaatacatgaagaattctcaagtgagactaccgctcgggacactgtccaagtctgagtgggaagcaaccagcatctatctagtgtttgcttttgaaaagcagcaatag

SEQ ID NO: 140850 - DNA, 1431 bp, Artificial Sequence
  derived and/or modified sequence
atggctaactcggccaaagccgaagagtatgagaagatgtcactagagcaggccaaggcatctgttaattctgagaccgagtcctccttcaacatcaacgaaaacactaccgcttcgggtacaggcctatctgagaagacgagcgtatgccggcaagttgatatcgccaggaaacgtaaagagttcgaggatgacctcgttaaggagtcatcttcctgcggaaaggacacaccgagtaaaaaaaggaagctggatcctgagattgtgcccgaggaaaaggactgcggggacgccgagggcaacagtaaaaaacgcaagagagaaacagaagacgtgcccaaagataagagtagcaccggggacggcacccaaaacaaacggaaaattgcattagaagacgtccccgaaaaacagaagaacttggaagaagggcattctagcacagtggccgcacactataatgagttacaggaagtcggattagagaaacggagtcaaagccggattttttaccttaggaacttcaacaactggatgaagtccgtcctgattggggagttcctggaaaaagtccgacagaagaagaagcgagacattacggtattggacctcggctgcggtaagggcggagatctcttgaagtggaagaagggcaggattaataaattagtgtgtaccgacatcgcagacgtgtccgtgaaacagtgtcagcagcgctacgaagacatgaaaaatagaagagacagcgagtatatctttagcgctgaatttataactgccgatagctccaaagaactgctgattgataaatttcgggatccccaaatgtgttttgatatctgcagctgccagtttgtgtgccattactcctttgaaagctacgaacaggcagacatgatgttgcgcaatgcttgcgagcggttgagccccggaggctacttcattggcaccacacccaacagttttgagctcatccgcaggctagaggcgtccgaaacagaatccttcgggaatgagatatacacagtgaaattccagaagaagggagactaccccctgtttggttgcaagtatgattttaacctcgagggtgtggttgacgtccctgaatttctggtgtattttccactgctcaacgagatggccaaaaagtataacatgaagcttgtctataagaaaacatttttggagttctacgaagagaagatcaagaataacgagaataaaatgttgcttaagaggatgcaagctctcgagccatacccggcaaacgaatcttctaagctggtctccgagaaggtcgacgactacgagcatgcagccaaatacatgaagaatagtcaggtaagactgccactgggcactctgagtaaatccgagtgggaggctacctcgatctatcttgtgttcgcctttgagaagcagcagtag

SEQ ID NO: 140851 - DNA, 6051 bp, Artificial Sequence
  derived and/or modified sequence
agtgttggttcatgaagttttaccatcaattcaagtaatcataaatggcaaattctgcaaaagcagaagaatatgaaaagatgtctcttgaacaggcaaaagcgtcagtgaattctgaaacagagtcttcattcaatattaatgaaaacacaacagcttctgggactgggctttctgaaaagacttctgtctgtaggcaagtagacatagcaagaaagagaaaagagtttgaagatgatcttgtaaaggaaagttctagttgtgggaaagacactccatccaagaagagaaaacttgatcctgaaattgtcccagaggaaaaagattgtggtgatgctgaaggcaattcaaagaaaagaaaaagagaaactgaggatgttccaaaagataaatcttctactggagatggcactcaaaataagagaaaaatagcacttgaggatgttcctgaaaagcagaaaaatctggaagaaggacacagctcaacagtggctgcccattacaatgaacttcaggaagttggtttggagaagcgtagtcaaagtcgtattttttacctaagaaactttaataattggatgaaaagtgttctcattggagaatttttggaaaaggtacgacagaagaaaaaacgtgatatcactgttttggacctgggatgtggtaaaggtggagatttgctgaaatggaaaaaaggaagaattaacaagctagtttgtactgatattgccgatgtttctgtcaaacagtgtcagcagcggtatgaggacatgaaaaatcgtcgtgatagtgaatatattttcagtgcagaatttataactgctgacagctcaaaggaacttctgattgacaaatttcgtgacccacaaatgtgttttgacatctgcagttgtcagtttgtctgtcattactcatttgagtcttatgagcaggctgacatgatgctgagaaatgcgtgtgagagacttagccctgggggctattttattggtactactcccaatagctttgaattgataagacgccttgaagcttcagaaacagaatcatttggaaatgaaatatatactgtgaaatttcagaagaaaggagattatcctttatttggctgcaaatatgacttcaacttggaaggtgttgtggatgttcctgaattcttggtctattttccattgctaaatgaaatggcaaagaagtacaatatgaaactagtctacaaaaaaacatttctggaattctacgaagaaaagattaagaacaatgaaaataaaatgctcttaaaacgaatgcaggccttggagccatatcctgcaaatgagagttctaaacttgtctctgagaaggtggatgactatgaacatgcagcaaagtacatgaagaacagtcaagtaaggttacctttgggaaccttaagtaaatcagaatgggaagctacaagtatttacttggtgtttgcctttgagaaacagcagtgagcacataggcagtagtcccagaggggccgtgttctgtcctgcacaaatttgaacaactcatctcgatatatttgatatttctctgtctgttgattttaattctaaatgtgcaggatgctgccagaaactccaatgtagaaattcaacatttgctgtctgtgacagatgaacttttgcatgtgtatataagaatgagttgggacctctgtctttaaaaatctatttttaggtaatgttctaagaattccatttgcctctatgatcttagctcataaaaatataatatgacttgataaagcaactaaactctttccacagtgttcagatttgtcctgtgtgtgtttacagtattcaatttattgcagttatagaattggtcagagagcattttcatagtgtgctcatttctatggttttgttatatagcatttttcaacatttaatggtctgtacagttgaatgtaagtgttcaatatgtattgctgaagttataagtttaaaactcaatttcagatgctcataaaagttacttagctaaaattttagcaatttattgcattttgaaataatcattaacatgctgcaattcaggagctggttagaacattttaagtggcagcatagaattttggaattttggggctttcttttcagaaattgctaccatagtaattaatgtttccagttatcaagattgtgattagacacatttacctttcttcattgaacaaatggtgccatagttatttttctcaaaatttagtgaaaatccctcccatgtagacatgttgcacattttttccaaatttatacatggaactgcagtaggaatattctcaccatctgatgccatgtacccacttcagaaataagcaatacttgttcctctgttacaacctcagcactttgcaccgtaggagccattgttaaagttgtcacttgtgtaactgactgcttttccaaaactggtacttatgtgaactgttgtccttgctttacaccaccatttggaaaacttaccagtttttagatgtagatgtagtgaaaaacttcaagaatgaagcagagcaattgagtattcttttttaaattattaagccatgatttacaaaaacattactttctgtaattcacaatacttgttttaaaaacatagtgtcttcattagtgtgcatctattaactgttcatggtgttagagttgcaaactttttagcaagaaaatatggatttcctcatttcagttccttctgcagcctgtgaatctccacaaagtgttaccagtttacaaaaataagtctttttgccttaagtcattttggaaataagtaatactgcatctgactctggtggctgtattagctaggaaaggtttgtaaatggtgtcagtgaggtggggaaaggaagtcttcctgtcacatatgcaggttcgttttcattctagggcagtgccaggaagtatattgatagctttgtaggtacaggaaaaacatcatcattatttcctctgttcacatttactggtcttaattaacaggtaataataatacatgtacttttagcctgaaacctcttccacgccatgggtaacttgggggagagaagaatcctccaaacgatggagtagccagtggtaatacaaagcagggagaacagaaaggtagagttactaaggccttcagtgaacagaaaggagcagagagcaagattagatctgagaagatgctctggggactgagcccactgttgttggtgtcagggaggcttactggagccacacctgcaggcgctgtgttcaggcaccaccttcctccttgagctttgcctgtctcttgccttatcagttcttcctccaccaccctacacccccctccccccggccccaagcccctgtgtctccttgttacaattaagtttctggatattgacttaagaactgttaggaagaggactagaaaaggcttcccctgcctatcctctccgatcaccaaggtggaagggagctagtaggactcttccttgacacaccttgtcgtctaaatgttcggtattctattcaggacttacggtaactattatgagggaggcatggctttccaccgtcgggccaggaagagcacctgttgctgcaagctcagtgaagtggggcactcccagacctgccatgcagtttatcctctgagaatggaattggaaatgaagacctaaccagctattggtgggaatgacggaactggggattgcgatgattgatctgggaacatggctggattgtgatttaaccaagaatgctgatgttgaattctttgggcctagaatatacttgagaaagcactagtggcttgtgttcagggagaggagctggcagtttttaaccacttctgtgggagccgtgttctaacctgtggaaagtattgcaattctgtgagagtgactctgcagagtcactgcaccatcaggcttggccctgctgtgccttcagtacccagccaggttctctgggtccagggtgactctccaaagaaattggccttcagctggagaaaacattgggtggagactctcacttatgttaatgcaatcttgaaatgactgaaaggtagattgccagcacagtgagtttcccagcctgctcccccatccacacttggaaattgagggagcatgaccgctctctgacttcacatgttaatagaggatcagagcagagttgggagtatattggtcaggatcatagaaaagaagacaaagcttgctcagccatgagatggccaggtatccagttttgttaactctctttgggaatttctttttcagcctgttttttagcttagtgccattatgtcattttgatttgtattcaagtactcttcaagtatctttgtaatgaaggtttggctacttgtataggtctgcctgcagggtgaaaatgccagtgtgaatattctagctaccaaacattgttttttgttgaaaaactgactttctgttgtctacctcaggccttgtgcatttgggttatctcaagccagtcaccacagagggtctctagggtctgcaaaatagaggccaaatccagggaccaggccctaataatagaagttgtaccaaaatgcctgtggtacttgatggcctgttggtcaaataggaagtacaagtgtgtgatgttagaacctccctagttgctgctatatcaaacactgcacacttgacaagtgttttcattccccgccctctgacagaacaacattcctaattctttgaaggcaaccagtgcaaaggctactacacttgtgtaatgatatttagcagatgcatacaggactggatcccagggcactgtcagttcttccctccctctcgtgctgctcagtttgtcctctgctcccatgtaggcctaaagtcaccccactccttagtgcctgcacctcaccacgatattgaggaagcacaggacatccaagggtactctccagtttggctgtggagacttgagcaagccctaaagtcccctgctccctggacttctcctgggttgtgcttttttgggggcaacataccttggacaaagctgagctgacagctaatgtttattagcctcctacctaagtcagtcactttgctaaattcttcacctgtggtaactcattttgattgttataacatctcagcaccgttattcccattttaatgatgaggaaactgagtcatagaggatacagacttgcccaaaggagagccaggattttcacaccccctcctcaagctgggcctgccctccaagtgcttgttatatacctccacgggtgtcagcccagatgactcctcacccatccaccacctgcagcttgagatgttaactattagagctccattcttttggttcaaaacgttgatacttacttagatgttccctgagaggagtgtttatttctgagtaaggggctttgttgaaagagggggttagagagagcaagacagcacttgagtgcactggcaggaagcagagataagacttgaatttcagtttggtagaccaccttctttagcagcccaacctgtagcaaatctagtttagcctgcatggcagggagagggattctcttcccaccctcaccatttgcaagtggcaggagctgagaatgccagtacgagagtgtagccaaagtgagaggctgagagcaaaggagacatttttttcagttttgagtcgagtatccagacagaggcaaatcattttgtttaactttttattaaagtgtaactatagaaacacatcaatgatttttcacaagtggagcacgtgcatacaatcggcaccccagaagccccccgtcagattcccttccagttaactacctctccaagggaaaccactatcctgagttctaagcgcatagattagttctgtctggtttggggagatatataaatggaattatgcattcttcgtatctggtttcttttcaccaatattatgtttgtgagatttttgttgcatgtatttgtacatggattttcattctcatggttgtataatatttcattgtgtgaataaaccacatactgtttatctg

SEQ ID NO: 140852 - DNA, 6250 bp, Artificial Sequence
  derived and/or modified sequence
agtgacgtaagcagacacgcgtggcgcgggccgccgtttccgcaaacagaatcgcgtttggctgtgctggatgtgtgaacctattgggtactgtacaacttcaagcctcgaaatcagataggcaccaccaacctcatttcctgtttcaccttgattttctgtgataccaaaatctcagcttcacaaagtcattgaaagtgttggttcatgaagttttaccatcaattcaagtaatcataaatggcaaattctgcaaaagcagaagaatatgaaaagatgtctcttgaacaggcaaaagcgtcagtgaattctgaaacagagtcttcattcaatattaatgaaaacacaacagcttctgggactgggctttctgaaaagacttctgtctgtaggcaagtagacatagcaagaaagagaaaagagtttgaagatgatcttgtaaaggaaagttctagttgtgggaaagacactccatccaagaagagaaaacttgatcctgaaattgtcccagaggaaaaagattgtggtgatgctgaaggcaattcaaagaaaagaaaaagagaaactgaggatgttccaaaagataaatcttctactggagatggcactcaaaataagagaaaaatagcacttgaggatgttcctgaaaagcagaaaaatctggaagaaggacacagctcaacagtggctgcccattacaatgaacttcaggaagttggtttggagaagcgtagtcaaagtcgtattttttacctaagaaactttaataattggatgaaaagtgttctcattggagaatttttggaaaaggtacgacagaagaaaaaacgtgatatcactgttttggacctgggatgtggtaaaggtggagatttgctgaaatggaaaaaaggaagaattaacaagctagtttgtactgatattgccgatgtttctgtcaaacagtgtcagcagcggtatgaggacatgaaaaatcgtcgtgatagtgaatatattttcagtgcagaatttataactgctgacagctcaaaggaacttctgattgacaaatttcgtgacccacaaatgtgttttgacatctgcagttgtcagtttgtctgtcattactcatttgagtcttatgagcaggctgacatgatgctgagaaatgcgtgtgagagacttagccctgggggctattttattggtactactcccaatagctttgaattgataagacgccttgaagcttcagaaacagaatcatttggaaatgaaatatatactgtgaaatttcagaagaaaggagattatcctttatttggctgcaaatatgacttcaacttggaaggtgttgtggatgttcctgaattcttggtctattttccattgctaaatgaaatggcaaagaagtacaatatgaaactagtctacaaaaaaacatttctggaattctacgaagaaaagattaagaacaatgaaaataaaatgctcttaaaacgaatgcaggccttggagccatatcctgcaaatgagagttctaaacttgtctctgagaaggtggatgactatgaacatgcagcaaagtacatgaagaacagtcaagtaaggttacctttgggaaccttaagtaaatcagaatgggaagctacaagtatttacttggtgtttgcctttgagaaacagcagtgagcacataggcagtagtcccagaggggccgtgttctgtcctgcacaaatttgaacaactcatctcgatatatttgatatttctctgtctgttgattttaattctaaatgtgcaggatgctgccagaaactccaatgtagaaattcaacatttgctgtctgtgacagatgaacttttgcatgtgtatataagaatgagttgggacctctgtctttaaaaatctatttttaggtaatgttctaagaattccatttgcctctatgatcttagctcataaaaatataatatgacttgataaagcaactaaactctttccacagtgttcagatttgtcctgtgtgtgtttacagtattcaatttattgcagttatagaattggtcagagagcattttcatagtgtgctcatttctatggttttgttatatagcatttttcaacatttaatggtctgtacagttgaatgtaagtgttcaatatgtattgctgaagttataagtttaaaactcaatttcagatgctcataaaagttacttagctaaaattttagcaatttattgcattttgaaataatcattaacatgctgcaattcaggagctggttagaacattttaagtggcagcatagaattttggaattttggggctttcttttcagaaattgctaccatagtaattaatgtttccagttatcaagattgtgattagacacatttacctttcttcattgaacaaatggtgccatagttatttttctcaaaatttagtgaaaatccctcccatgtagacatgttgcacattttttccaaatttatacatggaactgcagtaggaatattctcaccatctgatgccatgtacccacttcagaaataagcaatacttgttcctctgttacaacctcagcactttgcaccgtaggagccattgttaaagttgtcacttgtgtaactgactgcttttccaaaactggtacttatgtgaactgttgtccttgctttacaccaccatttggaaaacttaccagtttttagatgtagatgtagtgaaaaacttcaagaatgaagcagagcaattgagtattcttttttaaattattaagccatgatttacaaaaacattactttctgtaattcacaatacttgttttaaaaacatagtgtcttcattagtgtgcatctattaactgttcatggtgttagagttgcaaactttttagcaagaaaatatggatttcctcatttcagttccttctgcagcctgtgaatctccacaaagtgttaccagtttacaaaaataagtctttttgccttaagtcattttggaaataagtaatactgcatctgactctggtggctgtattagctaggaaaggtttgtaaatggtgtcagtgaggtggggaaaggaagtcttcctgtcacatatgcaggttcgttttcattctagggcagtgccaggaagtatattgatagctttgtaggtacaggaaaaacatcatcattatttcctctgttcacatttactggtcttaattaacaggtaataataatacatgtacttttagcctgaaacctcttccacgccatgggtaacttgggggagagaagaatcctccaaacgatggagtagccagtggtaatacaaagcagggagaacagaaaggtagagttactaaggccttcagtgaacagaaaggagcagagagcaagattagatctgagaagatgctctggggactgagcccactgttgttggtgtcagggaggcttactggagccacacctgcaggcgctgtgttcaggcaccaccttcctccttgagctttgcctgtctcttgccttatcagttcttcctccaccaccctacacccccctccccccggccccaagcccctgtgtctccttgttacaattaagtttctggatattgacttaagaactgttaggaagaggactagaaaaggcttcccctgcctatcctctccgatcaccaaggtggaagggagctagtaggactcttccttgacacaccttgtcgtctaaatgttcggtattctattcaggacttacggtaactattatgagggaggcatggctttccaccgtcgggccaggaagagcacctgttgctgcaagctcagtgaagtggggcactcccagacctgccatgcagtttatcctctgagaatggaattggaaatgaagacctaaccagctattggtgggaatgacggaactggggattgcgatgattgatctgggaacatggctggattgtgatttaaccaagaatgctgatgttgaattctttgggcctagaatatacttgagaaagcactagtggcttgtgttcagggagaggagctggcagtttttaaccacttctgtgggagccgtgttctaacctgtggaaagtattgcaattctgtgagagtgactctgcagagtcactgcaccatcaggcttggccctgctgtgccttcagtacccagccaggttctctgggtccagggtgactctccaaagaaattggccttcagctggagaaaacattgggtggagactctcacttatgttaatgcaatcttgaaatgactgaaaggtagattgccagcacagtgagtttcccagcctgctcccccatccacacttggaaattgagggagcatgaccgctctctgacttcacatgttaatagaggatcagagcagagttgggagtatattggtcaggatcatagaaaagaagacaaagcttgctcagccatgagatggccaggtatccagttttgttaactctctttgggaatttctttttcagcctgttttttagcttagtgccattatgtcattttgatttgtattcaagtactcttcaagtatctttgtaatgaaggtttggctacttgtataggtctgcctgcagggtgaaaatgccagtgtgaatattctagctaccaaacattgttttttgttgaaaaactgactttctgttgtctacctcaggccttgtgcatttgggttatctcaagccagtcaccacagagggtctctagggtctgcaaaatagaggccaaatccagggaccaggccctaataatagaagttgtaccaaaatgcctgtggtacttgatggcctgttggtcaaataggaagtacaagtgtgtgatgttagaacctccctagttgctgctatatcaaacactgcacacttgacaagtgttttcattccccgccctctgacagaacaacattcctaattctttgaaggcaaccagtgcaaaggctactacacttgtgtaatgatatttagcagatgcatacaggactggatcccagggcactgtcagttcttccctccctctcgtgctgctcagtttgtcctctgctcccatgtaggcctaaagtcaccccactccttagtgcctgcacctcaccacgatattgaggaagcacaggacatccaagggtactctccagtttggctgtggagacttgagcaagccctaaagtcccctgctccctggacttctcctgggttgtgcttttttgggggcaacataccttggacaaagctgagctgacagctaatgtttattagcctcctacctaagtcagtcactttgctaaattcttcacctgtggtaactcattttgattgttataacatctcagcaccgttattcccattttaatgatgaggaaactgagtcatagaggatacagacttgcccaaaggagagccaggattttcacaccccctcctcaagctgggcctgccctccaagtgcttgttatatacctccacgggtgtcagcccagatgactcctcacccatccaccacctgcagcttgagatgttaactattagagctccattcttttggttcaaaacgttgatacttacttagatgttccctgagaggagtgtttatttctgagtaaggggctttgttgaaagagggggttagagagagcaagacagcacttgagtgcactggcaggaagcagagataagacttgaatttcagtttggtagaccaccttctttagcagcccaacctgtagcaaatctagtttagcctgcatggcagggagagggattctcttcccaccctcaccatttgcaagtggcaggagctgagaatgccagtacgagagtgtagccaaagtgagaggctgagagcaaaggagacatttttttcagttttgagtcgagtatccagacagaggcaaatcattttgtttaactttttattaaagtgtaactatagaaacacatcaatgatttttcacaagtggagcacgtgcatacaatcggcaccccagaagccccccgtcagattcccttccagttaactacctctccaagggaaaccactatcctgagttctaagcgcatagattagttctgtctggtttggggagatatataaatggaattatgcattcttcgtatctggtttcttttcaccaatattatgtttgtgagatttttgttgcatgtatttgtacatggattttcattctcatggttgtataatatttcattgtgtgaataaaccacatactgtttatctgaca

SEQ ID NO: 140853 - DNA, 1343 bp, Artificial Sequence
  derived and/or modified sequence
gtaagcagacacgcgtggcgcgggccgccgtttccgcaaacagaatcgcgtttggctgtgctgaatctggaagaaggacacagctcaacagtggctgcccattacaatgaacttcaggaagttggtttggagaagcgtagtcaaagtcgtattttttacctaagaaactttaataattggatgaaaagtgttctcattggagaatttttggaaaaggtacgacagaagaaaaaacgtgatatcactgttttggacctgggatgtggtaaaggtggagatttgctgaaatggaaaaaaggaagaattaacaagctagtttgtactgatattgccgatgtttctgtcaaacagtgtcagcagcggtatgaggacatgaaaaatcgtcgtgatagtgaatatattttcagtgcagaatttataactgctgacagctcaaaggaacttctgattgacaaatttcgtgacccacaaatgtgttttgacatctgcagttgtcagtttgtctgtcattactcatttgagtcttatgagcaggctgacatgatgctgagaaatgcgtgtgagagacttagccctgggggctattttattggtactactcccaatagctttgaattgataagacgccttgaagcttcagaaacagaatcatttggaaatgaaatatatactgtgaaatttcagaagaaaggagattatcctttatttggctgcaaatatgacttcaacttggaaggtgttgtggatgttcctgaattcttggtctattttccattgctaaatgaaatggcaaagaagtacaatatgaaactagtctacaaaaaaacatttctggaattctacgaagaaaagattaagaacaatgaaaataaaatgctcttaaaacgaatgcaggccttggagccatatcctgcaaatgagagttctaaacttgtctctgagaaggtggatgactatgaacatgcagcaaagtacatgaagaacagtcaagtaaggttacctttgggaaccttaagtaaatcagaatgggaagctacaagtatttacttggtgtttgcctttgagaaacagcagtgagcacataggcagtagtcccagaggggccgtgttctgtcctgcacaaatttgaacaactcatctcgatatatttgatatttctctgtctgttgattttaattctaaatgtgcaggatgctgccagaaactccaatgtagaaattcaacatttgctgtctgtgacagatgaacttttgcatgtgtatataagaatgagttgggacctctgtctttaaaaatctatttttaggacttacggtaactattatgagggaggcatggctttc

SEQ ID NO: 140854 - DNA, 1825 bp, Artificial Sequence
  derived and/or modified sequence
gtggcgcgggccgccgtttccgcaaacagaatcgcgtttggctgtgctgtgttggttcatgaagttttaccatcaattcaagtaatcataaatggcaaattctgcaaaagcagaagaatatgaaaagatgtctcttgaacaggcaaaagcgtcagtgaattctgaaacagagtcttcattcaatattaatgaaaacacaacagcttctgggactgggctttctgaaaagacttctgtctgtaggcaagtagacatagcaagaaagagaaaagagtttgaagatgatcttgtaaaggaaagttctagttgtgggaaagacactccatccaagaagagaaaacttgatcctgaaattgtcccagaggaaaaagattgtggtgatgctgaaggcaattcaaagaaaagaaaaagagaaactgaggatgttccaaaagataaatcttctactggagatggcactcaaaataagagaaaaatagcacttgaggatgttcctgaaaagcagaaaaatctggaagaaggacacagctcaacagtggctgcccattacaatgaacttcaggaagttggtttggagaagcgtagtcaaagtcgtattttttacctaagaaactttaataattggatgaaaagtgttctcattggagaatttttggaaaaggtacgacagaagaaaaaacgtgatatcactgttttggacctgggatgtggtaaaggtggagatttgctgaaatggaaaaaaggaagaattaacaagctagtttgtactgatattgccgatgtttctgtcaaacagtgtcagcagcggtatgaggacatgaaaaatcgtcgtgatagtgaatatattttcagtgcagaatttataactgctgacagctcaaaggaacttctgattgacaaatttcgtgacccacaaatgtgttttgacatctgcagttgtcagtttgtctgtcattactcatttgagtcttatgagcaggctgacatgatgctgagaaatgcgtgtgagagacttagccctgggggctattttattggtactactcccaatagctttgaattgataagacgccttgaagcttcagaaacagaatcatttggaaatgaaatatatactgtgaaatttcagaagaaaggagattatcctttatttggctgcaaatatgacttcaacttggaaggtgttgtggatgttcctgaattcttggtctattttccattgctaaatgaaatggcaaagaagtacaatatgaaactagtctacaaaaaaacatttctggaattctacgaagaaaagattaagaacaatgaaaataaaatgctcttaaaacgaatgcaggccttggagccatatcctgcaaatgagagttctaaacttgtctctgagaaggtggatgactatgaacatgcagcaaagtacatgaagaacagtcaagtaaggttacctttgggaaccttaagtaaatcagaatgggaagctacaagtatttacttggtgtttgcctttgagaaacagcagtgagcacataggcagtagtcccagaggggccgtgttctgtcctgcacaaatttgaacaactcatctcgatatatttgatatttctctgtctgttgattttaattctaaatgtgcaggatgctgccagaaactccaatgtagaaattcaacatttgctgtctgtgacagatgaacttttgcatgtgtatataagaatgagttgggacctctgtctttaaaaatctatttttaggtaatgttctaagaattccatttgcctctatgatcttagctcataaaaatataatatgacttgataaagcaact

SEQ ID NO: 140855 - DNA, 939 bp, Artificial Sequence
  derived and/or modified sequence
gcgggccgccgtttccgcaaacagaatcgcgtttggctgtgctgaatctggaagaaggacacagctcaacagtggctgcccattacaatgaacttcaggaagttggtttggagaagcgtagtcaaagtcgtattttttacctaagaaactttaataattggatgaaaagtgttctcattggagaatttttggaaaaggtacgacagaagaaaaaacgtgatatcactgttttggacctgggatgtggtaaaggtggagatttgctgaaatggaaaaaaggaagaattaacaagctagtttgtactgatattgccgatgtttctgtcaaacagtgtcagcagcggtatgaggacatgaaaaatcgtcgtgatagtgaatatattttcagtgcagaatttataactgctgacagctcaaaggaacttctgattgacaaatttcgtgacccacaaatgtgttttgacatctgcagttgtcagtttgtctgtcattactcatttgagtcttatgagcaggctgacatgatgctgagaaatgcctgtggtacttgatggcctgttggtcaaataggaagtacaagtgtgtgatgttagaacctccctagttgctgctatatcaaacactgcacacttgacaagtgttttcattccccgccctctgacagaacaacattcctaattctttgaaggcaaccagtgcaaaggctactacacttgtgtaatgatatttagcagatgcatacaggactggatcccagggcactgtcagttcttccctccctctcgtgctgctcagtttgtcctctgctcccatgtaggcctaaagtcaccccactccttagtgcctgcacctcaccacgatattgaggaagcacaggacatccaagggtactctccagtttggctgtggagacttgagcaagccctaaagtcccctgct

SEQ ID NO: 140856 - DNA, 1431 bp, Artificial Sequence
  derived and/or modified sequence
atggccaacagcgccaaggccgaggagtacgagaagatgagcctggagcaggccaaggccagcgtgaacagcgagaccgagagcagcttcaacatcaacgagaacaccaccgccagcggcaccggcctgagcgagaagaccagcgtgtgcagacaggtggacatcgccagaaagagaaaggagttcgaggacgacctggtgaaggagagcagcagctgcggcaaggacacccccagcaagaagagaaagctggaccccgagatcgtgcccgaggagaaggactgcggcgacgccgagggcaacagcaagaagagaaagagagagaccgaggacgtgcccaaggacaagagcagcaccggcgacggcacccagaacaagagaaagatcgccctggaggacgtgcccgagaagcagaagaacctggaggagggccacagcagcaccgtggccgcccactacaacgagctgcaggaggtgggcctggagaagagaagccagagcagaatcttctacctgagaaacttcaacaactggatgaagagcgtgctgatcggcgagttcctggagaaggtgagacagaagaagaagagagacatcaccgtgctggacctgggctgcggcaagggcggcgacctgctgaagtggaagaagggcagaatcaacaagctggtgtgcaccgacatcgccgacgtgagcgtgaagcagtgccagcagagatacgaggacatgaagaacagaagagacagcgagtacatcttcagcgccgagttcatcaccgccgacagcagcaaggagctgctgatcgacaagttcagagacccccagatgtgcttcgacatctgcagctgccagttcgtgtgccactacagcttcgagagctacgagcaggccgacatgatgctgagaaacgcctgcgagagactgagccccggcggctacttcatcggcaccacccccaacagcttcgagctgatcagaagactggaggccagcgagaccgagagcttcggcaacgagatctacaccgtgaagttccagaagaagggcgactaccccctgttcggctgcaagtacgacttcaacctggagggcgtggtggacgtgcccgagttcctggtgtacttccccctgctgaacgagatggccaagaagtacaacatgaagctggtgtacaagaagaccttcctggagttctacgaggagaagatcaagaacaacgagaacaagatgctgctgaagagaatgcaggccctggagccctaccccgccaacgagagcagcaagctggtgagcgagaaggtggacgactacgagcacgccgccaagtacatgaagaacagccaggtgagactgcccctgggcaccctgagcaagagcgagtgggaggccaccagcatctacctggtgttcgccttcgagaagcagcagtag

SEQ ID NO: 140857 - DNA, 705 bp, Artificial Sequence
  derived and/or modified sequence
atgaagaacagaagagacagcgagtacatcttcagcgccgagttcatcaccgccgacagcagcaaggagctgctgatcgacaagttcagagacccccagatgtgcttcgacatctgcagctgccagttcgtgtgccactacagcttcgagagctacgagcaggccgacatgatgctgagaaacgcctgcgagagactgagccccggcggctacttcatcggcaccacccccaacagcttcgagctgatcagaagactggaggccagcgagaccgagagcttcggcaacgagatctacaccgtgaagttccagaagaagggcgactaccccctgttcggctgcaagtacgacttcaacctggagggcgtggtggacgtgcccgagttcctggtgtacttccccctgctgaacgagatggccaagaagtacaacatgaagctggtgtacaagaagaccttcctggagttctacgaggagaagatcaagaacaacgagaacaagatgctgctgaagagaatgcaggccctggagccctaccccgccaacgagagcagcaagctggtgagcgagaaggtggacgactacgagcacgccgccaagtacatgaagaacagccaggtgagactgcccctgggcaccctgagcaagagcgagtgggaggccaccagcatctacctggtgttcgccttcgagaagcagcagtag

SEQ ID NO: 140858 - DNA, 2535 bp, Artificial Sequence
  derived and/or modified sequence
atggatgccaacgtagtatcatcttctactattgcgacgtatatagacgctttagcgaagaatgcttcggaattagaacagaggtctaccgcatacgaaataaataatgaattggaactagtatttattaagccgccattgattactttgacaaatgtagtgaatatctctacgattcaggaatcgtttattcgatttaccgttactaataaggaaggtgttaaaattagaactaagattccattatctaaggtacatggtctagatgtaaaaaatgtacagttagtagatgctatagataacatagtttgggaaaagaaatcattagtgacggaaaatcgtcttcacaaagaatgcttgttgagactatcgacagaggaacgtcatatatttttggattacaagaaatatggatcctctatccgactagaattagtcaatcttattcaagcaaaaacaaaaaactttacgatagactttaagctaaaatattttctaggatccggtgcccagtctaaaagttctttattacacgctattaatcatccaaagtcaaggcctaatacatctctggaaatagaatttacacctagagacaatgaaacagttccatatgatgaactaataaaggaattgacgactctctcgcgtcatatatttatggcttctccagagaatgtaattctttctccgcctattaacgcgcctataaaaacctttatgttgcctaaacaagatatagtaggtttggatctggaaaatctatatgccgtaactaagactgacggcattcctataactatcagagttacatcaaacgggttgtattgttattttacacatcttggttatattattagatatcctgttaagagaataatagattccgaagtagtagtctttggtgaggcagttaaggataagaactggaccgtatatctcattaagctaatagagcctgtgaatgcaatcaatgatagactagaagaaagtaagtatgttgaatctaaactagtggatatttgtgatcggatagtattcaagtcaaagaaatacgaaggtccgtttactacaactagtgaagtcgtcgatatgttatctacatatttaccaaagcaaccagaaggtgttattctgttctattcaaagggacctaaatctaacattgattttaaaattaaaaaggaaaatactatagaccaaactgcaaatgtagtatttaggtacatgtccagtgaaccaattatctttggagagtcgtctatctttgtagagtataagaaatttagcaacgataaaggctttcctaaagaatatggttctggtaagattgtgttatataacggcgttaattatctaaataatatctattgtttggaatatattaatacacataatgaagtgggtattaagtccgtggttgtacctattaagtttatagcagaattcttagttaatggagaaatacttaaacctagaattgataaaaccatgaaatatattaactcagaagattattatggaaatcaacataatatcatagtcgaacatttaagagatcaaagcatcaaaataggagatatctttaacgaggataaactatcggatgtgggacatcaatacgccaataatgataaatttagattaaatccagaagttagttattttacgaataaacgaactagaggaccgttgggaattttatcaaactacgtcaagactcttcttatttctatgtattgttccaaaacatttttagacgattccaacaaacgaaaggtattggcgattgattttggaaacggtgctgacctggaaaaatacttttatggagagattgcgttattggtagcgacggatccggatgctgatgctatagctagaggaaatgaaagatacaacaaattaaactctggaattaaaaccaagtactacaaatttgactacattcaggaaactattcgatccgatacatttgtctctagtgtcagagaagtattctattttggaaagtttaatatcatcgactggcagtttgctatccattattcttttcatccgagacattatgctaccgtcatgaataacttatccgaactaactgcttctggaggcaaggtattaatcactaccatggacggagacaaattatcaaaattaacagataaaaagacttttataattcataagaatttacctagtagcgaaaactatatgtctgtagaaaaaatagctgatgatagaatagtggtatataatccatcaacaatgtctactccaatgactgaatacattatcaaaaagaacgatatagtcagagtgtttaacgaatacggatttgttcttgtagataacgttgatttcgctacaattatagaacgaagtaaaaagtttattaatggcgcatctacaatggaagatagaccatctacaagaaactttttcgaactaaatagaggagccattaaatgtgaaggtttagatgtcgaagacttacttagttactatgttgtttatgtcttttctaagcggtaa

SEQ ID NO: 140859 - protein, 541 aa, Artificial Sequence
  derived and/or modified sequence
MAHNKIPPRWLNCPRRGQPVAGRFLPLKTMLGPRYDSQVAEENRFHPSMLSNYLKSLKVKMGLLVDLTNTSRFYDRNDIEKEGIKYIKLQCKGHGECPTTENTETFIRLCERFNERNPPELIGVHCTHGFNRTGFLICAFLVEKMDWSIEAAVATFAQARPPGIYKGDYLKELFRRYGDIEEAPPPPLLPDWCFEDDEDEDEDEDGKKESEPGSSASFGKRRKERLKLGAIFLEGVTVKGVTQVTTQPKLGEVQQKCHQFCGWEGSGFPGAQPVSMDKQNIKLLDLKPYKVSWKADGTRYMMLIDGTNEVFMIDRDNSVFHVSNLEFPFRKDLRMHLSNTLLDGEMIIDRVNGQAVPRYLIYDIIKFNSQPVGDCDFNVRLQCIEREIISPRHEKMKTGLIDKTQEPFSVRNKPFFDICTSRKLLEGNFAKEVSHEMDGLIFQPTGKYKPGRCDDILKWKPPSLNSVDFRLKITRMGGEGLLPQNVGLLYVGGYERPFAQIKVCLFIFSVLFLDVLLSRIHQNLANNNQHIKISCSSTLGG

SEQ ID NO: 140860 - protein, 597 aa, Artificial Sequence
  derived and/or modified sequence
MAHNKIPPRWLNCPRRGQPVAGRFLPLKTMLGPRYDSQVAEENRFHPSMLSNYLKSLKVKMGLLVDLTNTSRFYDRNDIEKEGIKYIKLQCKGHGECPTTENTETFIRLCERFNERNPPELIGVHCTHGFNRTGFLICAFLVEKMDWSIEAAVATFAQARPPGIYKGDYLKELFRRYGDIEEAPPPPLLPDWCFEDDEDEDEDEDGKKESEPGSSASFGKRRKERLKLGAIFLEGVTVKGVTQVTTQPKLGEVQQKCHQFCGWEGSGFPGAQPVSMDKQNIKLLDLKPYKVSWKADGTRYMMLIDGTNEVFMIDRDNSVFHVSNLEFPFRKDLRMHLSNTLLDGEMIIDRVNGQAVPRYLIYDIIKFNSQPVGDCDFNVRLQCIEREIISPRHEKMKTGLIDKTQEPFSVRNKPFFDICTSRKLLEGNFAKEVSHEMDGLIFQPTGKYKPGRCDDILKWKPPSLNSVDFRLKITRMGGEGLLPQNVGLLYVGGYERPFAQIKVTKELKQYDNKIIECKFENNSWVFMRQRTDKSFPNAYNTAMAVCNSISNPVTKEMLFEFIDRCTAASQGQKRKHHLDPDTELMPPPPPKRPRPLT

SEQ ID NO: 140861 - protein, 568 aa, Artificial Sequence
  derived and/or modified sequence
MLGPRYDSQVAEENRFHPSMLSNYLKSLKVKMGLLVDLTNTSRFYDRNDIEKEGIKYIKLQCKGHGECPTTENTETFIRLCERFNERNPPELIGVHCTHGFNRTGFLICAFLVEKMDWSIEAAVATFAQARPPGIYKGDYLKELFRRYGDIEEAPPPPLLPDWCFEDDEDEDEDEDGKKESEPGSSASFGKRRKERLKLGAIFLEGVTVKGVTQVTTQPKLGEVQQKCHQFCGWEGSGFPGAQPVSMDKQNIKLLDLKPYKVSWKADGTRYMMLIDGTNEVFMIDRDNSVFHVSNLEFPFRKDLRMHLSNTLLDGEMIIDRVNGQAVPRYLIYDIIKFNSQPVGDCDFNVRLQCIEREIISPRHEKMKTGLIDKTQEPFSVRNKPFFDICTSRKLLEGNFAKEVSHEMDGLIFQPTGKYKPGRCDDILKWKPPSLNSVDFRLKITRMGGEGLLPQNVGLLYVGGYERPFAQIKVTKELKQYDNKIIECKFENNSWVFMRQRTDKSFPNAYNTAMAVCNSISNPVTKEMLFEFIDRCTAASQGQKRKHHLDPDTELMPPPPPKRPRPLT

SEQ ID NO: 140862 - DNA, 1626 bp, Artificial Sequence
  derived and/or modified sequence
atggcccataataaaatccccccccgttggctgaactgtccccgccggggccaacccgtcgcaggccgctttctccccctgaagacgatgctgggcccccgctacgacagtcaggtcgccgaggagaatcgctttcacccttctatgttgtcaaactatctaaaatcactgaaagtaaaaatgggacttctggtggacttaacaaacaccagcaggttctacgataggaatgatatcgagaaagagggaatcaagtacatcaagctgcaatgcaaaggccacggggaatgcccgactactgagaacacagaaacattcatacggctctgcgagagattcaatgagcgtaacccaccagaattaatcggcgtacattgtacccacggttttaacagaaccggcttcctgatctgtgcctttttggtggaaaagatggactggtctatcgaagccgcagttgcaaccttcgcacaggccagaccaccaggaatctataagggcgactatttaaaagaactgttcaggcgttatggcgatatagaagaggcccctccaccacctttactccctgactggtgttttgaagacgacgaagatgaggacgaagatgaggacggaaagaaggagagtgagccaggcagctccgcgtcatttggtaagcgccgcaaggaacggttgaagctaggagctatctttctggagggagttaccgtgaagggcgtgactcaagttaccacccagccaaagctgggtgaggtccagcagaagtgccatcagttctgcggctgggaggggtcaggattcccaggcgcccagcccgtgtctatggataagcagaacatcaagctgcttgacctaaagccttataaagtctcttggaaggccgacgggacaaggtatatgatgttgatagatgggacgaatgaagtcttcatgattgatagagacaatagtgtgtttcacgtcagcaatctcgagttccctttcaggaaagatttgcggatgcacctgtcgaatacactcctcgatggcgagatgattatagaccgcgtaaacggccaagccgtgccacgctacctaatctatgatatcatcaagtttaatagccagccggtcggtgattgcgatttcaacgtgcgtctgcagtgcatagagcgtgagatcatcagtccaaggcatgaaaagatgaagacaggactcattgataagacccaggagccgttttccgttaggaacaagcccttttttgatatctgcactagtagaaagttgctggaggggaacttcgccaaggaggtgagtcatgagatggatgggcttatattccagccaacaggaaagtacaaaccaggtaggtgcgacgacatcctaaaatggaaaccaccatctttgaattctgtggactttcgccttaaaattactcggatggggggtgagggactactgccgcagaatgtcggtctcctatacgttggtgggtatgaacgcccatttgctcagattaaggtgtgcctcttcatcttcagtgtgttgtttttggacgttctgctgtctagaatacaccaaaacctggctaataacaatcagcatatcaagatatcttgcagctcgaccctgggcggttag

SEQ ID NO: 140863 - DNA, 1794 bp, Artificial Sequence
  derived and/or modified sequence
atggcacataacaaaattcctcccaggtggctgaattgcccccgccgcggccagcccgtagcaggtaggttcttgccattgaagaccatgcttggcccccgttatgatagtcaggtggctgaggagaaccgcttccaccccagcatgcttagcaattatctgaaatctttgaaagtgaaaatggggttacttgtggacctgactaatacctccaggttctacgaccgcaacgacatcgagaaggagggcattaaatacatcaaactccagtgtaagggccatggagaatgtcccactacagaaaatacggagacattcattcgcctatgtgagcggtttaacgagagaaatccccccgaactaataggggtgcattgcacacatgggttcaatcggaccggattcctcatatgcgccttcctggtagagaaaatggactggtctattgaggccgcggtggctacctttgctcaagcacgaccgccagggatctataagggggattacttgaaggaactattccggagatacggagacatcgaagaagctcccccacctcccctactgcccgattggtgctttgaagatgacgaggacgaagacgaagatgaggatggcaagaaagaaagcgagcctggctcctctgcgtcttttggaaagcggaggaaggagcgcctgaaacttggagccatttttttggaaggagtcacagtgaaaggggttacacaagttacaacgcagccaaagctcggcgaggtacagcagaagtgccatcagttctgtggttgggaggggtccggatttcctggagcacagcctgtgtcaatggacaagcagaacatcaagctcctggatctgaagccttacaaggttagttggaaggctgatggtacccgatacatgatgcttatagacggaacaaatgaagttttcatgattgatagggacaacagcgttttccacgtgtccaatctggaatttcctttccgcaaagacctgcgcatgcacctgtctaacactcttctggacggtgagatgatcatcgaccgagtcaatggccaggccgtccccaggtaccttatttatgacatcattaagttcaacagccaacccgttggcgattgtgatttcaatgttcgactccagtgcattgagcgggagatcatcagcccaaggcacgagaaaatgaagaccgggctaatcgataagactcaggaacccttttccgtgagaaataagcccttcttcgatatttgtacgagtcggaaacttttagagggcaatttcgcaaaggaggtgtcacatgaaatggatggtctgatcttccaaccaactgggaagtacaagccaggaagatgcgacgacatcttaaaatggaagccgccatctctcaattcggtggatttccggctgaaaatcacaagaatggggggagaggggttgctgccacagaatgttggactcctgtacgtgggtgggtatgagcggccctttgcccagatcaaagtcacaaaggagctgaaacaatacgataataagatcatagagtgcaaattcgagaacaacagctgggtcttcatgcggcagagaacagacaaatcttttcccaacgcatacaataccgcaatggctgtgtgcaactcgatctctaatcccgtcacaaaagagatgctttttgaatttatagataggtgtacagcagccagccagggacagaagcggaaacaccatcttgatcctgatacagagctcatgccacccccaccccccaagcgaccacgccctcttacatag

SEQ ID NO: 140864 - DNA, 1707 bp, Artificial Sequence
  derived and/or modified sequence
atgctgggccctagatacgacagccaggtcgctgaagaaaaccggtttcacccttcaatgttgagcaattatctaaagtccctcaaggtaaaaatggggcttctggtcgacctcactaatacaagccggttctatgatagaaacgatattgaaaaagaaggtatcaagtatattaagctgcagtgtaagggccacggcgagtgccctacaactgaaaacactgagacttttatccggctttgtgaacggtttaatgaaaggaatcccccagaactgataggcgtgcactgcacacacggcttcaatcgcaccggtttcctcatttgcgctttcctggtagaaaaaatggattggtctatcgaggcggcggttgccactttcgcgcaggcccgacctcctggaatctacaagggggattacctcaaggaactattcagacgctacggcgacatcgaagaagccccccccccacctctgttgcccgattggtgcttcgaggacgacgaggacgaagacgaggatgaggacggaaaaaaggagtccgagccgggctctagcgcttccttcggtaagcgccgcaaggaacggctgaagctgggagcaattttccttgagggtgtcactgttaaaggggtcactcaggttacaacccaacctaagctgggcgaagtgcagcagaaatgtcaccaattctgtggatgggagggctcaggcttccctggagcccagccagtgtcgatggacaagcaaaatatcaagctcctggatctaaagccttacaaggtgtcttggaaggctgatggaacccgatatatgatgctgatagatgggactaacgaggtgtttatgattgaccgcgacaattcagtgtttcacgtatctaatttagagttcccattccggaaggatctgagaatgcacctgagcaacacacttctggacggagaaatgataatcgatcgggtgaatggacaggctgtgccaaggtacctcatatacgacatcattaaattcaattctcagcccgtgggagattgtgacttcaacgtgcggctccaatgcattgaacgagaaatcataagccctcgccacgaaaagatgaaaactggcctgatcgacaaaacacaagagcctttctcagttcgcaataagcccttctttgacatttgtacctctagaaagctgcttgaaggcaattttgcaaaggaggtgagtcacgagatggacggcttgatttttcagcctaccggcaaatataaacctggacgttgtgatgatatcttgaagtggaagccccccagtctgaactcagtggattttcgactaaaaatcactcgcatgggtggagagggactcttaccccagaacgtgggacttctctatgtgggcggctatgaacgcccctttgcacagataaaagtgacaaaggaactgaaacagtacgacaacaagatcattgagtgcaagttcgagaacaattcatgggttttcatgcgccaaagaaccgataaaagctttcctaatgcctacaacaccgccatggccgtctgtaattccattagcaatcctgtgactaaagaaatgttgttcgagttcatagataggtgcacagccgccagtcaggggcagaagcgtaagcatcacttagaccccgatactgaactcatgccaccgcctcctccgaagagaccccggccactgacatag

SEQ ID NO: 140865 - DNA, 1626 bp, Artificial Sequence
  derived and/or modified sequence
atggcccacaacaagatccccccacgctggctgaactgcccccggcggggccagcctgtggccggccgcttcctgcccctgaagaccatgctgggccccaggtatgacagccaggtggccgaggagaaccgcttccaccccagcatgctgagcaactacctgaagagcctgaaggtgaagatgggcctgctggtggacctgaccaacaccagccgcttctatgacagaaatgacatcgagaaggagggcatcaagtacatcaagctgcagtgcaagggccacggggagtgccccaccacagaaaatacagagaccttcatccggctgtgtgagcgcttcaatgaaagaaaccccccagagctgattggagtgcactgcacccacggcttcaacagaacaggcttcctgatctgtgccttcctggtggagaagatggactggagcattgaagctgctgtggccacctttgcccaggcccggcccccaggcatctacaagggggactacctgaaggagctgttcagaagatatggagacatcgaggaggcccctcctccacccctgctgcctgactggtgctttgaagatgatgaagatgaagatgaagatgaagatggcaagaaggagagcgagcccggcagcagcgccagctttgggaagaggaggaaggagcggctgaagctgggcgccatcttcctggagggcgtgacagtgaagggcgtgacccaggtgaccacccagcccaagctgggggaggtgcagcagaagtgccaccagttctgtggctgggagggcagcggcttccctggggcccagcctgtgtccatggacaagcagaacatcaagctgctggacctgaagccctacaaggtgtcctggaaggcagatggcacccgctacatgatgctgattgatggcaccaatgaggtgttcatgattgaccgggacaacagcgtcttccacgtgagcaacctggagttccccttcaggaaggacctgaggatgcacctgagcaacaccctgctggatggagagatgatcatcgacagagtgaatggccaggccgtgccccgctacctgatctatgacatcatcaagttcaacagccagcctgtgggggactgtgacttcaacgtgcggctgcagtgcatcgagcgggagatcatcagccccaggcatgagaagatgaagacaggcctgattgacaagacccaggagcccttctctgtgaggaacaagcccttctttgacatctgcaccagcaggaagctgctggagggcaactttgccaaggaggtgtcccatgagatggatggcctcatcttccagcccaccgggaagtacaagccaggccgctgtgatgacatcctgaagtggaagccacccagcctgaacagcgtggacttccggctgaagatcaccaggatgggcggggagggcctgctgccccagaatgtgggcctgctgtatgtgggcggctatgaaagaccatttgcccagatcaaggtgtgcctcttcatcttctctgtgctcttcctggatgtgctgctgagccgcatccaccagaacctggccaacaacaaccagcacatcaagatcagctgcagcagcaccctgggcggctag

SEQ ID NO: 140866 - DNA, 1794 bp, Artificial Sequence
  derived and/or modified sequence
atggcccacaacaagatccccccacgctggctgaactgcccccggcggggccagcctgtggccggccgcttcctgcccctgaagaccatgctgggccccaggtatgacagccaggtggccgaggagaaccgcttccaccccagcatgctgagcaactacctgaagagcctgaaggtgaagatgggcctgctggtggacctgaccaacaccagccgcttctatgacagaaatgacatcgagaaggagggcatcaagtacatcaagctgcagtgcaagggccacggggagtgccccaccacagaaaatacagagaccttcatccggctgtgtgagcgcttcaatgaaagaaaccccccagagctgattggagtgcactgcacccacggcttcaacagaacaggcttcctgatctgtgccttcctggtggagaagatggactggagcattgaagctgctgtggccacctttgcccaggcccggcccccaggcatctacaagggggactacctgaaggagctgttcagaagatatggagacatcgaggaggcccctcctccacccctgctgcctgactggtgctttgaagatgatgaagatgaagatgaagatgaagatggcaagaaggagagcgagcccggcagcagcgccagctttgggaagaggaggaaggagcggctgaagctgggcgccatcttcctggagggcgtgacagtgaagggcgtgacccaggtgaccacccagcccaagctgggggaggtgcagcagaagtgccaccagttctgtggctgggagggcagcggcttccctggggcccagcctgtgtccatggacaagcagaacatcaagctgctggacctgaagccctacaaggtgtcctggaaggcagatggcacccgctacatgatgctgattgatggcaccaatgaggtgttcatgattgaccgggacaacagcgtcttccacgtgagcaacctggagttccccttcaggaaggacctgaggatgcacctgagcaacaccctgctggatggagagatgatcatcgacagagtgaatggccaggccgtgccccgctacctgatctatgacatcatcaagttcaacagccagcctgtgggggactgtgacttcaacgtgcggctgcagtgcatcgagcgggagatcatcagccccaggcatgagaagatgaagacaggcctgattgacaagacccaggagcccttctctgtgaggaacaagcccttctttgacatctgcaccagcaggaagctgctggagggcaactttgccaaggaggtgtcccatgagatggatggcctcatcttccagcccaccgggaagtacaagccaggccgctgtgatgacatcctgaagtggaagccacccagcctgaacagcgtggacttccggctgaagatcaccaggatgggcggggagggcctgctgccccagaatgtgggcctgctgtatgtgggcggctatgaaagaccatttgcccagatcaaggtgaccaaggagctgaagcagtatgacaacaagatcatcgagtgcaagtttgagaacaacagctgggtgttcatgaggcagaggacagacaagagcttccccaatgcctacaacacagccatggctgtgtgcaacagcatcagcaaccctgtgaccaaggagatgctgtttgagttcatcgaccgctgcacagctgccagccagggccagaagaggaagcaccacctggaccctgacacagagctgatgcctcctcctccacccaagaggccccggcccctgacctag

SEQ ID NO: 140867 - DNA, 1707 bp, Artificial Sequence
  derived and/or modified sequence
atgctgggccccaggtatgacagccaggtggccgaggagaaccgcttccaccccagcatgctgagcaactacctgaagagcctgaaggtgaagatgggcctgctggtggacctgaccaacaccagccgcttctatgacagaaatgacatcgagaaggagggcatcaagtacatcaagctgcagtgcaagggccatggagaatgtcccaccacagagaacacagagaccttcatccggctgtgtgagcgcttcaatgaaagaaatcctcctgagctgattggagtgcactgcacccacggcttcaacagaacaggcttcctgatctgtgccttcctggtggagaagatggactggagcattgaggccgctgtggccacctttgcccaggcccggcccccaggcatctacaagggggactacctgaaggagctgttccgccgctacggggacatcgaggaggcccctcctccacccctgctgcctgactggtgctttgaagatgatgaagatgaagatgaagatgaagatggcaagaaggagagcgagcccggcagcagcgccagctttgggaagaggaggaaggagcggctgaagctgggcgccatcttcctggagggcgtgacagtgaagggcgtgacccaggtgaccacccagcccaagctgggggaggtgcagcagaagtgccaccagttctgtggctgggagggcagcggcttccctggggcccagcctgtgtccatggacaagcagaacatcaagctgctggacctgaagccctacaaggtgtcctggaaggcagatggcacccgctacatgatgctgattgatggcaccaatgaggtgttcatgattgaccgggacaacagcgtcttccacgtgagcaacctggagttccccttcaggaaggacctgaggatgcacctgagcaacaccctgctggatggagagatgatcatcgacagagtgaatggccaggccgtgccccgctacctgatctatgacatcatcaagttcaacagccagcctgtgggggactgtgacttcaacgtgcggctgcagtgcatcgagcgggagatcatcagccccaggcatgagaagatgaagacaggcctgattgacaagacccaggagcccttctctgtgaggaacaagcccttctttgacatctgcaccagcaggaagctgctggagggcaactttgccaaggaggtgtcccatgagatggatggcctcatcttccagcccaccgggaagtacaagccaggccgctgtgatgacatcctgaagtggaagccacccagcctgaacagcgtggacttccggctgaagatcaccaggatgggcggggagggcctgctgccccagaatgtgggcctgctgtatgtgggcggctatgagcggccctttgcccagatcaaggtgaccaaggagctgaagcagtatgacaacaagatcatcgagtgcaagtttgagaacaacagctgggtgttcatgaggcagaggacagacaagagcttccccaatgcctacaacacagccatggctgtgtgcaacagcatcagcaaccctgtgaccaaggagatgctgtttgagttcatcgaccgctgcacagctgccagccagggccagaagaggaagcaccacctggaccctgacacagagctgatgcctcctcctccacccaagaggccccggcccctgacctag

SEQ ID NO: 140868 - DNA, 1626 bp, Artificial Sequence
  derived and/or modified sequence
atggcccacaacaagatccccccccggtggctgaactgcccccggagaggccaacctgtggccggcagattcctgcctcttaagacaatgttgggccctagatatgacagccaggttgctgaagagaatcggtttcacccttctatgttgtctaattacctgaagagcctgaaggtgaaaatgggactcctggtggatctaacgaatacatcgcgcttctatgatcgaaacgatatcgaaaaagaaggaatcaaatacatcaaactccagtgtaaaggtcacggtgaatgtcctaccactgagaacaccgagacctttattcgcctctgcgaaagatttaacgaacgtaatccaccagagttgattggtgtccactgtacccatgggtttaataggacagggttcctcatctgtgcttttctcgtggagaaaatggattggagtatagaagccgccgtggctacattcgcccaggccagacctcccggcatctacaagggcgattacctcaaggaattattcaggcgctatggggacatcgaggaggccccccctccacctctgctcccagactggtgtttcgaggacgacgaggacgaggatgaagacgaggatggcaagaaagagagtgagcccggcagtagtgcgagcttcggaaaacgacggaaggagcgcttaaagctcggcgcgatatttttagaaggcgtaacagtgaaaggagttactcaggtgactacacagcccaagctcggagaggtgcaacaaaaatgccatcagttctgcgggtgggaaggatcaggctttcccggagcgcaacctgtctctatggacaagcagaacataaagttactggacttaaagccatataaagttagttggaaggccgacggcaccagatacatgatgttaatcgatgggactaatgaggtctttatgatcgatagagacaacagcgtgttccacgtatccaatcttgaatttccttttcgtaaggacctacggatgcacctatccaacactctgctggacggggagatgattatcgatagggtgaatggccaagcagtgcctaggtacttaatttacgacatcatcaagttcaacagccagcctgtcggcgactgtgactttaacgtccgtctgcaatgtatcgaacgcgagattattagcccccgacacgaaaagatgaagaccggattgattgataagacacaggagcctttttccgtcagaaataaaccattttttgatatttgcacatcaaggaagctactggaaggtaactttgctaaggaagttagtcacgaaatggatggcctgattttccagccaaccggcaaatataagccaggccgatgcgacgacatcctgaaatggaaaccaccttcgctgaattctgtggattttcgcctgaagatcacccgaatggggggggaaggcctgctgccccagaatgtcgggctgttatacgtggggggctacgagagacccttcgcgcaaatcaaagtctgcctttttatatttagcgtcctgttccttgatgttctgctgagcagaatacaccagaacctggctaataacaaccaacatattaaaatttcttgttcttcgactctcgggggctag

SEQ ID NO: 140869 - DNA, 1794 bp, Artificial Sequence
  derived and/or modified sequence
atggcccacaacaagatccccccccggtggctgaactgcccccggcgtggtcagcctgtggcggggaggttcctacccctcaaaacaatgctaggacccagatatgactcacaagtggctgaagaaaacaggttccacccatctatgctgtcgaattatctgaaaagtctgaaggtaaaaatggggctgctggtcgatcttaccaatacctcgaggttttatgatcgaaatgacatcgaaaaagaaggaatcaagtatatcaaacttcagtgtaagggtcacggtgagtgtcccacaaccgagaatactgaaacgttcatccgcctatgcgagagatttaatgaacgcaatcctccagaactgattggggttcattgcacccacggctttaaccggacgggtttcctgatatgcgctttcttggtcgaaaagatggattggtcaatagaagctgcagtggctactttcgcgcaggcccggcctcccggcatttataagggggactacctcaaggaactgttcaggagatatggggatatagaagaagccccgccaccacctctgctgcctgactggtgcttcgaggacgacgaggatgaggatgaggatgaagatgggaaaaaagaatcggagccaggctcttctgcgagcttcggcaaaaggagaaaggagaggctgaaacttggagcgatctttcttgagggagtcaccgtgaagggtgtgacacaggtgaccacacagcccaagttaggagaagtgcagcagaagtgccatcagttttgtggctgggagggcagtggcttcccgggcgctcagcccgtatccatggataagcaaaatatcaaactgctggatctgaaaccttacaaagtgtcttggaaagcagatggtacgcgttacatgatgctgattgacgggactaatgaggtgtttatgattgatagagacaacagcgtttttcatgtatcaaatctggaatttcccttccgaaaagatctacgcatgcacttgagcaatacactgctggacggcgagatgatcattgatcgagtgaacgggcaagcagtgccccgttacttgatctatgacatcatcaagtttaattctcagccggtgggagactgtgattttaacgtgagattgcagtgcattgagcgcgagatcatctctccacgccacgaaaagatgaagacaggcctaatcgacaagacccaagaaccatttagtgtccgaaacaaaccctttttcgacatttgcactagcaggaagctgcttgagggcaactttgctaaagaggtttcccacgagatggacggcctcatcttccagcctacaggaaaatataagcctgggaggtgtgacgatatactgaaatggaagcctccttctctgaactcagtcgattttagattgaaaatcactcgcatgggtggggagggactcctccctcagaatgtcggcctgctctatgttggcggatatgagcgtcctttcgcacaaattaaggtgacaaaggaactgaagcagtacgataacaagataatagaatgcaaatttgagaacaactcctgggtgttcatgagacagagaaccgataagagctttcccaacgcctacaatacagccatggcagtctgcaacagcatctcgaaccctgttaccaaagaaatgctcttcgagttcattgaccgatgtactgctgccagccaagggcagaagcgaaaacaccacctagaccccgatactgagcttatgcctcccccaccccccaagcgcccccgccccctcacatag

SEQ ID NO: 140870 - DNA, 1707 bp, Artificial Sequence
  derived and/or modified sequence
atgctgggcccccggtacgacagccaggtggccgaggagaaccggttccacccatctatgctcagtaattacctgaagagcctgaaagtcaagatgggacttctcgttgatctgacgaatacatccagattttacgacaggaacgacatcgaaaaggagggaattaaatatatcaagctgcagtgcaaagggcatggagagtgtcccaccaccgaaaatacagaaactttcatccgcctgtgtgaacggttcaatgaacggaatccccccgagctgatcggggtgcactgcacacacggcttcaatcgtactggattcctcatttgcgcattcctagtggagaaaatggactggtcaattgaggcagcagtcgctacgttcgctcaggcccgccccccaggaatctacaaaggagactatctgaaagaactgtttcggcggtacggcgacattgaggaggccccaccacctcctttgcttcccgattggtgcttcgaggacgacgaagatgaggacgaggacgaggacggcaagaaggagagtgagccaggatcttcggcatcattcggaaaaaggaggaaggagagattgaagctgggagctatcttcctggagggagtgacggtgaaaggggtgacacaggtaacgacccaacctaaactgggggaggttcagcaaaagtgccatcagttctgtgggtgggagggctcagggtttccaggagcccagcccgtttcaatggataagcagaacataaagttgttggatctcaaaccttacaaagtgtcttggaaggcagacggcacaaggtatatgatgctgatcgacggcacaaacgaagtgtttatgatcgaccgcgacaattcagtgtttcatgtgtccaatcttgagttcccttttcgcaaagatctgcgaatgcacctgtctaatacgctgctcgatggagaaatgattattgatagggtcaacggacaggccgtgcctagatacctaatttacgatataatcaaatttaattcacagcccgttggcgactgtgatttcaacgtgcggctccagtgtattgaacgagagatcatcagtcctcggcatgagaagatgaagactggattgatcgataagacccaagagccttttagtgtgaggaacaagccatttttcgatatatgcacatcccgaaaattattagagggtaacttcgctaaagaggttagccatgagatggatggcctgatattccagccaacaggaaaatacaaaccaggcagatgtgatgacattctgaagtggaagcctcctagcttgaacagtgtggattttcgtctgaaaattactcgaatgggcggggaaggcctgctaccacagaacgtcggcttgctctacgtcgggggctacgaacgcccctttgcgcagatcaaggtcaccaaagaactcaagcagtatgataacaaaattatcgaatgcaaatttgagaataactcttgggtattcatgagacagcggaccgataagagctttcctaacgcctataataccgcaatggctgtgtgcaattctatctcaaaccccgtgacaaaagagatgctgttcgagttcatcgaccggtgcaccgctgcctcccaagggcagaagcgcaaacaccatctggacccagatactgagctgatgcctcctccccctcccaaaaggccccgtccacttacatag

SEQ ID NO: 140871 - DNA, 1626 bp, Artificial Sequence
  derived and/or modified sequence
atggcccataacaagatcccacctagatggttgaattgccctagaagaggccagcctgtcgccggacggttcctgcctctcaagacaatgttaggaccacgctatgactcccaggtggcggaagagaaccgatttcatccatctatgctatccaactacttaaagtctctcaaagttaaaatggggctgctggttgacctgacaaatacttctagattctatgacagaaacgacatcgaaaaagagggcattaagtatatcaaactacagtgcaagggacacggagagtgccccactaccgagaacacagagacatttataaggctatgcgagcgcttcaatgagagaaacccacccgagctaattggagtccactgtacccacggctttaatcgtacaggtttcttaatttgtgcctttctggtcgagaaaatggattggtccattgaagccgctgtggctaccttcgcacaggcccgaccgccaggcatctacaaaggggattacctaaaggaactgttcaggcggtacggggacatcgaggaggcgccaccccctccccttctgcctgattggtgctttgaggacgacgaagatgaggacgaggacgaagatgggaaaaaggagtctgaacctggatcctccgcttcttttggcaaacgcaggaaagagcggctgaaactgggcgcaatattcctcgaaggagttaccgttaagggcgtgactcaggtaactactcagcccaaactcggcgaggtccaacaaaagtgtcaccaattctgcgggtgggaaggttccgggttccctggcgcacagcctgtttccatggataagcagaacataaagctcttggatctgaaaccatacaaggtcagctggaaggcggacggtacacggtacatgatgctaattgatggcacaaatgaagtgttcatgatcgacagagacaactccgtgtttcacgttagtaatctggaattcccatttagaaaagatctcaggatgcacttgtccaatacattattggacggagagatgatcatcgatcgggttaatggccaagccgtcccacgctatctgatctacgacatcattaaatttaacagccagcccgtaggggattgcgactttaacgttaggttgcagtgtattgagagggagataattagccctcgccacgaaaagatgaagacgggactgattgataaaacacaagagcctttttcagtaagaaacaagccattcttcgatatttgtacatctcgcaaattgctagaagggaatttcgccaaagaggtgagtcatgagatggatggtttgatctttcagcctacaggaaagtataaacctggaagatgtgatgatatccttaaatggaagcccccttctttgaacagcgtggacttcaggctgaaaataaccaggatgggcggagaggggctcttaccacaaaatgtcggcctgttgtacgtcgggggatacgagagaccttttgcccaaattaaagtgtgcctattcatcttctccgtgttgtttctcgacgtgttactgtcgcgcatacaccagaatctcgccaataacaatcagcacatcaaaatatcttgtagctccacactgggcggttag

SEQ ID NO: 140872 - DNA, 1794 bp, Artificial Sequence
  derived and/or modified sequence
atggctcacaacaagatccctccgagatggctcaactgccccagacgaggccagcctgtggcaggccgattcctgcccctgaaaactatgctggggccaagatacgattcacaggtggccgaggaaaatagattccatccctccatgttgagcaactacttaaaatctctgaaagttaaaatgggactcctcgtcgaccttactaatacctctagattctacgaccgcaacgacatcgaaaaagagggtatcaagtatatcaagctgcaatgcaagggccacggtgaatgtcctacaactgagaataccgaaacctttatcaggttgtgcgagaggttcaacgagcgtaaccccccagagctaatcggcgtgcactgcacgcatgggtttaaccgcacaggctttttgatttgcgcgttcctggtggagaagatggattggagtattgaggccgcagtggctaccttcgcccaagcccgaccgcctggtatttataaaggagactacctcaaagaattatttcgcagatatggtgacattgaggaagcccctccaccacccctgctgccagactggtgcttcgaagatgacgaggatgaagacgaggacgaggatggcaagaaagagtctgaacccggttcatctgcatccttcggtaagaggcgaaaagaacgactgaaacttggggctatttttttagaaggagtcacagttaaaggagtgactcaggtgactacccagccgaaactgggagaagtgcagcagaaatgtcaccagttctgcggatgggaggggtccgggtttccaggagcgcagcctgtgtctatggacaagcaaaatataaagctgttggacctgaaaccctacaaggtgtcatggaaggctgatggcactcgatacatgatgttgatcgatgggactaatgaggtgtttatgatagatagggataattctgtgtttcacgtgtcaaatcttgagtttccttttcgcaaagacttgaggatgcacttatctaataccctactcgatggggagatgatcatagatcgtgtgaacggacaagcggtgcctcggtacctgatctacgatattattaagtttaattcacagcccgtgggggactgcgactttaacgttagactacagtgcattgagcgggaaatcatctctcctcgccatgaaaagatgaaaaccggattaatagataaaactcaggaacctttctccgtgagaaacaagcccttcttcgacatctgcacaagtagaaaattactcgaggggaacttcgctaaggaagtgtcccacgagatggatggacttattttccagccaaccggtaagtacaagccaggtcggtgcgatgatatactcaaatggaagcctccaagtttaaacagtgttgatttccgactcaaaatcacgcggatggggggtgaggggctccttcctcagaacgtgggactgctttacgtgggaggctacgagcggccattcgctcagataaaggttacaaaggagttgaagcaatacgacaacaagattattgagtgcaaatttgaaaataacagttgggtgtttatgcgtcagcgtacggacaaatcctttcctaatgcttataataccgccatggccgtttgtaattcaatctctaaccctgtaaccaaagaaatgctgttcgagttcatcgataggtgcaccgctgcttcacaaggacagaaaaggaagcaccatctcgacccggatactgagctgatgcctcccccacctccaaagcgacctaggcctcttacctag

SEQ ID NO: 140873 - DNA, 1707 bp, Artificial Sequence
  derived and/or modified sequence
atgttagggccacgatatgactctcaggtcgctgaggagaacagattccacccttccatgctgagcaactacctgaagtccctcaaggtaaagatgggcctgctggtggatctgacaaacacaagcaggttttatgacagaaacgacattgagaaggagggaataaaatacattaagctgcaatgtaaaggccacggcgagtgtcccaccacagagaatacggagacctttattcgcctttgcgagcgatttaacgagaggaatcccccagaactcatcggtgttcattgcactcacgggtttaaccgcaccggctttcttatttgtgcctttctggtcgaaaagatggactggtccatcgaggccgctgtcgccacctttgcgcaggccaggcccccagggatttacaaaggcgactacctaaaagagttatttcggagatatggggatatagaagaggcccctcccccacccctgttgcctgactggtgcttcgaggacgatgaagatgaagatgaagacgaggatggtaaaaaggaatccgagccgggtagctccgcctctttcggaaaacggaggaaggaacgattgaagctgggcgctattttcctggaaggcgttactgtaaaaggcgtgacacaagtgaccacccagccaaagctaggtgaggttcaacagaagtgtcaccagttctgtggatgggagggctctggcttccccggtgcccagcctgtgtcgatggacaagcagaacattaaattgctggacctcaagccctacaaggtgtcatggaaggctgacgggaccagatacatgatgctgattgacggtacgaatgaagtcttcatgattgacagagacaactcagtctttcacgtgtctaatcttgagtttccctttaggaaagacctacggatgcacctgagcaacaccttgctcgatggtgaaatgattatcgatcgcgttaatggccaggcggttcccaggtatctaatctacgacatcatcaaatttaactcgcagccagtaggcgactgtgattttaatgtgcgcttacagtgtatagaacgagagattatctctccgaggcacgaaaagatgaaaactggcctgatcgataaaacccaagagccattttccgtgcggaacaagccctttttcgatatatgcacgtcacgcaagctgctggaaggcaacttcgctaaggaggtcagccatgagatggacggtctgatcttccagccaacaggaaaatataagcctgggagatgcgatgatatcctgaagtggaaacccccttcactgaattccgtagattttagactgaagatcacccggatggggggtgaaggcctcttgccgcagaacgtaggattgctatacgtgggaggctacgagagaccttttgctcagatcaaggtgaccaaggaactcaaacagtatgataacaaaattatcgaatgcaagtttgagaacaactcttgggtgttcatgaggcagagaaccgacaaatctttcccaaatgcatataatacagctatggccgtgtgtaacagcattagcaatccggttacaaaggaaatgttgtttgaatttattgaccgatgcacagccgctagtcaaggacaaaagcgtaaacaccacctggaccccgacactgaattgatgccgccaccaccccctaaacgtccgagaccgctgacctag

SEQ ID NO: 140874 - DNA, 2017 bp, Artificial Sequence
  derived and/or modified sequence
ccctgacgttacccggatcggagaggttggaattcagattacggctgcgattcgggtgtctcggaccccggtgtgcaccggaccacggggaggcggctccaaaggcgcggtgaacgttggtgagggagggcagctctgcgcagccccaagacatggctcacaacaagatcccgccgcggtggctgaactgtccccggcgcggccagccggtggcaggaagattcttacctctgaagacaatgttaggaccaagatatgatagtcaagttgctgaagaaaatcggttccatcccagcatgctctcaaattacctaaagagcctaaaggttaaaatgggcttgttggtggacctgacaaatacttcaaggttctatgaccgaaatgacatagaaaaagaaggaatcaaatatataaaacttcagtgtaaaggacatggtgagtgccctaccactgagaatactgagacctttattcgtctgtgtgagcggtttaatgaaagaaatccacctgaacttataggtgttcattgtactcatggcttcaatcgcactggtttcctcatatgtgcctttttggtggagaaaatggattggagtatcgaagcagcagttgctacttttgcccaagccagaccaccaggaatctacaagggtgattatttgaaggaactttttcgtcggtatggtgacatagaggaagcaccacccccacctctattgccagattggtgttttgaggatgatgaagacgaagatgaggatgaggatggaaagaaggaatcagaacccgggtcaagtgcttcttttggcaaaaggagaaaagaacggttaaaactgggcgctattttcttggaaggtgttactgttaaaggtgtaactcaagtaacaacacaaccaaagttaggagaggtacagcagaagtgtcatcaattctgtggctgggaagggtctggattccctggagcacagcctgtttccatggacaagcaaaatattaaacttttagacctgaagccatacaaagtaagctggaaagcagatggtactcggtacatgatgttgattgatggcacaaatgaagtttttatgattgatagagacaattcagtatttcatgtttcaaatctggaatttccatttcgtaaagatcttcgtatgcatttatcaaatactctcttggatggcgagatgattattgacagagtaaatggacaggctgttcctagatatttgatatatgacataattaaattcaattcacagcccgttggagattgtgattttaatgttcgtctgcagtgtatagaacgagaaattataagtcctcgacacgaaaaaatgaagactgggctcattgacaaaacacaggaaccatttagcgtcagaaataagccgttttttgacatctgtacttcaagaaagctacttgaaggaaattttgccaaagaagtgagccatgaaatggatggacttatttttcagcctactggaaaatacaaacctggtcgatgtgatgatattttgaaatggaagcctcccagtctgaattctgtggattttcgtctaaaaataacaagaatgggaggagaagggttacttcctcagaatgttggcctcctgtatgttggaggttatgaaagaccctttgcacaaatcaaggtatgtttgttcattttcagtgtacttttcctggatgttctcttatctagaatccatcaaaaccttgctaataataatcaacatataaaaatatcgtgttccagcactttgggaggctaagacaggtggatcacttgagcccaggaggttgagaccatgctgggaaccctgtctctacaaaaagaaaaattttttgtcattagccaagttcagtggcatgtgcctatagtcccagctactctggaggctgaggtgggaagatcacttaagccccatgagtttgaggctgcagtgagccgtgatcacaccactgtactccagcctgggtgacagagtgagaccctgtctcaaaaaaaaaa

SEQ ID NO: 140875 - DNA, 4434 bp, Artificial Sequence
  derived and/or modified sequence
tgtggagttgatcctgaatgaaagtggcgcgccgcccctgacgttacccggatcggagaggttggaattcagattacggctgcgattcgggtgtctcggaccccggtgtgcaccggaccacggggaggcggctccaaaggcgcggtgaacgttggtgagggagggcagctctgcgcagccccaagacatggctcacaacaagatcccgccgcggtggctgaactgtccccggcgcggccagccggtggcaggaagattcttacctctgaagacaatgttaggaccaagatatgatagtcaagttgctgaagaaaatcggttccatcccagcatgctctcaaattacctaaagagcctaaaggttaaaatgggcttgttggtggacctgacaaatacttcaaggttctatgaccgaaatgacatagaaaaagaaggaatcaaatatataaaacttcagtgtaaaggacatggtgagtgccctaccactgagaatactgagacctttattcgtctgtgtgagcggtttaatgaaagaaatccacctgaacttataggtgttcattgtactcatggcttcaatcgcactggtttcctcatatgtgcctttttggtggagaaaatggattggagtatcgaagcagcagttgctacttttgcccaagccagaccaccaggaatctacaagggtgattatttgaaggaactttttcgtcggtatggtgacatagaggaagcaccacccccacctctattgccagattggtgttttgaggatgatgaagacgaagatgaggatgaggatggaaagaaggaatcagaacccgggtcaagtgcttcttttggcaaaaggagaaaagaacggttaaaactgggcgctattttcttggaaggtgttactgttaaaggtgtaactcaagtaacaacacaaccaaagttaggagaggtacagcagaagtgtcatcaattctgtggctgggaagggtctggattccctggagcacagcctgtttccatggacaagcaaaatattaaacttttagacctgaagccatacaaagtaagctggaaagcagatggtactcggtacatgatgttgattgatggcacaaatgaagtttttatgattgatagagacaattcagtatttcatgtttcaaatctggaatttccatttcgtaaagatcttcgtatgcatttatcaaatactctcttggatggcgagatgattattgacagagtaaatggacaggctgttcctagatatttgatatatgacataattaaattcaattcacagcccgttggagattgtgattttaatgttcgtctgcagtgtatagaacgagaaattataagtcctcgacacgaaaaaatgaagactgggctcattgacaaaacacaggaaccatttagcgtcagaaataagccgttttttgacatctgtacttcaagaaagctacttgaaggaaattttgccaaagaagtgagccatgaaatggatggacttatttttcagcctactggaaaatacaaacctggtcgatgtgatgatattttgaaatggaagcctcccagtctgaattctgtggattttcgtctaaaaataacaagaatgggaggagaagggttacttcctcagaatgttggcctcctgtatgttggaggttatgaaagaccctttgcacaaatcaaggtgacaaaagagctgaaacagtatgacaacaaaattatagaatgcaaatttgagaacaacagctgggtcttcatgagacagagaacagacaaaagttttcctaatgcctacaacactgccatggctgtgtgtaacagcatctcaaaccctgtcaccaaggagatgctgtttgagttcatcgacagatgtactgcagcttctcaaggacagaagcgaaaacatcatctggaccctgacacggagctcatgccaccaccacctcccaaaagaccacgccctttaacctaagacctgcctgtgacttgagggttaagaagaaagaggaatgaggaaaaaacgctgttgcccatttttgtagccagagaaattgaaaaacgactgtggcttgatgttgatacacatttgaattttttttaaaaaaagaaagttatcgtagccagcctgtaaatacttgatgcattcgtttcctcagtgctgcaatacatcgtggacttaaacatcttatttatctgataaactcagccttaccttgtggaatctgaagattgaaatatccaaaggtttaaacaagatggaaatcaatgaaaaagaggccttgtttatatatgggtagcttcacatttaatttataaagttaacaatctggaaactgtgagcccataaaacagtattttttagaagttgtgttacaactgtagcaaattttccttttaaaaaatccaggcaatggcattaaacattcttgctatcatttaccatggatttcctacatttctgagatccctgtattcaaaaacaaatgacagggttgttaagttgtactatattaaacaacttggtctggtttatatcattttaacaagttttttggaaatgtaaaagaaaaaagtaaagctccatttttgtgaattgcattgtttctaaaggaagtattttgagtattttcatctgtttgtattgtttcgactatgatatcagatatccagtgtgtccattctggcagtggttttgagttacttcatggaacttggacatacaccaccaggtcctttatgtgttgttctcctgggagacttctttttttaaatgccagggctacttctgctttacctcagtggtatcagcacattgtaaattacgttaaaacacacaactcactgtgatctatgggagtgatatcaaatacaaacgatgttgtgttccttctctcgaacaaaacagcaaagggaatgccagctaacttctttgattagaaggtaatgtcatggaatagaatgctgtcaccagaaaatgctctcccactgctagataaatgcagaggcaaagtgtagacatctgtaggaactaaatatcaaggaaatcaagacatttattttcaaagcgagaattctatctacattctattctgcggatgttatttctgttatacatctgaattttaaaatgtttactgatagataatggatttaaagggcggctaattgattgtctgccattgttgataaactgttctaattggtttgtgaaagaactctgagaattagctaaatggaggctagtgtatttatttttagaggtacatgttttaagtaaatgtatttaaaacaaattttcatggtctgaattgtatatgtaaatgcatatctgtgtaagtatatgcaagtgtatattcttctactgattcagtcagacacgaaatccaactgaattacccggtagactgaatatctgacgggatttctatatggacatagcacagatgaaccaaaaatgtatttatattcacctgagttttaatgtttttaaacaaagttttctcctgcagtgcttttctatatgaaatagttgagtcaagcttgggcttttttcttcgttgttcccaagtcatgtaatgtatagtgaatttatccaaaacgccattgtaacgttttttactagagtgtttttgcacatttgggcgctaaagggattaaaacaactgatgccacaatgactattgaaggagggaaaattctcaaggttccatagtatcttttacaaaatggattaaaaaaaaaatgcctatgcaacttcaaatagtctgatgcctgcttccccaggacgagtgactcttccacggtgtgctgctttccctccgagcctgtggaaaggcagagcccttttgcagatacgaaagcaagcttttgccaatgatctttaatggagttaaaatgtttatggtaattgtaacctttcaaatgagttacgtgaaaagagcatctcacttttaatacacccagatattttcttcaagtctttgtgcattttagcaggacttaattttcttaatttattctttcctttcaattatagtgacatagagtagttggccttataagtagatcccatttagcccctgaacataataccatctgcagtattataaaagtcatttagaaggtcagggggataatctagaggcaggattttggacattgtgaaggaaatgtgctccttctcagctcacttcaataactattttctgagactgaagttttttagacaagaataagaaaactttgctttcttcagttatcacatgtgaaagcttttgctttttgttaggaaaaggtgtggatgactctactgcgtggatggttacatttgctttccgtgaaatgctcagaaaatgtcaggacattccttttccaattgtgtgtcagtgcgtattgtaataaaactactgatttaaattagcataa

SEQ ID NO: 140876 - DNA, 2082 bp, Artificial Sequence
  derived and/or modified sequence
agctgtggagttgatcctgaatgaaagtggcgcgccgcccctgacgttacccggatcggagaggttggaattcagattacggctgcgattcgggtgtctcggaccccggtgtgcaccggaccacggggaggcggctccaaaggcgcggccagccggtggcaggaagattcttacctctgaagacaatgttaggaccaagatatgatagtcaagttgctgaagaaaatcggttccatcccagcatgctctcaaattacctaaagagcctaaaggttaaaatgggcttgttggtggacctgacaaatacttcaaggttctatgaccgaaatgacatagaaaaagaaggaatcaaatatataaaacttcagtgtaaaggacatggtgagtgccctaccactgagaatactgagacctttattcgtctgtgtgagcggtttaatgaaagaaatccacctgaacttataggtgttcattgtactcatggcttcaatcgcactggtttcctcatatgtgcctttttggtggagaaaatggattggagtatcgaagcagcagttgctacttttgcccaagccagaccaccaggaatctacaagggtgattatttgaaggaactttttcgtcggtatggtgacatagaggaagcaccacccccacctctattgccagattggtgttttgaggatgatgaagacgaagatgaggatgaggatggaaagaaggaatcagaacccgggtcaagtgcttcttttggcaaaaggagaaaagaacggttaaaactgggcgctattttcttggaaggtgttactgttaaaggtgtaactcaagtaacaacacaaccaaagttaggagaggtacagcagaagtgtcatcaattctgtggctgggaagggtctggattccctggagcacagcctgtttccatggacaagcaaaatattaaacttttagacctgaagccatacaaagtaagctggaaagcagatggtactcggtacatgatgttgattgatggcacaaatgaagtttttatgattgatagagacaattcagtatttcatgtttcaaatctggaatttccatttcgtaaagatcttcgtatgcatttatcaaatactctcttggatggcgagatgattattgacagagtaaatggacaggctgttcctagatatttgatatatgacataattaaattcaattcacagcccgttggagattgtgattttaatgttcgtctgcagtgtatagaacgagaaattataagtcctcgacacgaaaaaatgaagactgggctcattgacaaaacacaggaaccatttagcgtcagaaataagccgttttttgacatctgtacttcaagaaagctacttgaaggaaattttgccaaagaagtgagccatgaaatggatggacttatttttcagcctactggaaaatacaaacctggtcgatgtgatgatattttgaaatggaagcctcccagtctgaattctgtggattttcgtctaaaaataacaagaatgggaggagaagggttacttcctcagaatgttggcctcctgtatgttggaggttatgaaagaccctttgcacaaatcaaggtgacaaaagagctgaaacagtatgacaacaaaattatagaatgcaaatttgagaacaacagctgggtcttcatgagacagagaacagacaaaagttttcctaatgcctacaacactgccatggctgtgtgtaacagcatctcaaaccctgtcaccaaggagatgctgtttgagttcatcgacagatgtactgcagcttctcaaggacagaagcgaaaacatcatctggaccctgacacggagctcatgccaccaccacctcccaaaagaccacgccctttaacctaagacctgcctgtgacttgagggttaagaagaaagaggaatgaggaaaaaacgctgttgcccatttttgtagccagagaaattgaaaaacgactgtggcttgatgttgatacacatttgaattttttttaaaaaaagaaagttatcgtagccagcctgtaaatacttgatgcattcgtttcctcagtgctgc

SEQ ID NO: 140877 - DNA, 1626 bp, Artificial Sequence
  derived and/or modified sequence
atggcccacaacaagatcccccccagatggctgaactgccccagaagaggccagcccgtggccggcagattcctgcccctgaagaccatgctgggccccagatacgacagccaggtggccgaggagaacagattccaccccagcatgctgagcaactacctgaagagcctgaaggtgaagatgggcctgctggtggacctgaccaacaccagcagattctacgacagaaacgacatcgagaaggagggcatcaagtacatcaagctgcagtgcaagggccacggcgagtgccccaccaccgagaacaccgagaccttcatcagactgtgcgagagattcaacgagagaaacccccccgagctgatcggcgtgcactgcacccacggcttcaacagaaccggcttcctgatctgcgccttcctggtggagaagatggactggagcatcgaggccgccgtggccaccttcgcccaggccagaccccccggcatctacaagggcgactacctgaaggagctgttcagaagatacggcgacatcgaggaggccccccccccccccctgctgcccgactggtgcttcgaggacgacgaggacgaggacgaggacgaggacggcaagaaggagagcgagcccggcagcagcgccagcttcggcaagagaagaaaggagagactgaagctgggcgccatcttcctggagggcgtgaccgtgaagggcgtgacccaggtgaccacccagcccaagctgggcgaggtgcagcagaagtgccaccagttctgcggctgggagggcagcggcttccccggcgcccagcccgtgagcatggacaagcagaacatcaagctgctggacctgaagccctacaaggtgagctggaaggccgacggcaccagatacatgatgctgatcgacggcaccaacgaggtgttcatgatcgacagagacaacagcgtgttccacgtgagcaacctggagttccccttcagaaaggacctgagaatgcacctgagcaacaccctgctggacggcgagatgatcatcgacagagtgaacggccaggccgtgcccagatacctgatctacgacatcatcaagttcaacagccagcccgtgggcgactgcgacttcaacgtgagactgcagtgcatcgagagagagatcatcagccccagacacgagaagatgaagaccggcctgatcgacaagacccaggagcccttcagcgtgagaaacaagcccttcttcgacatctgcaccagcagaaagctgctggagggcaacttcgccaaggaggtgagccacgagatggacggcctgatcttccagcccaccggcaagtacaagcccggcagatgcgacgacatcctgaagtggaagccccccagcctgaacagcgtggacttcagactgaagatcaccagaatgggcggcgagggcctgctgccccagaacgtgggcctgctgtacgtgggcggctacgagagacccttcgcccagatcaaggtgtgcctgttcatcttcagcgtgctgttcctggacgtgctgctgagcagaatccaccagaacctggccaacaacaaccagcacatcaagatcagctgcagcagcaccctgggcggctag

SEQ ID NO: 140878 - DNA, 1794 bp, Artificial Sequence
  derived and/or modified sequence
atggcccacaacaagatcccccccagatggctgaactgccccagaagaggccagcccgtggccggcagattcctgcccctgaagaccatgctgggccccagatacgacagccaggtggccgaggagaacagattccaccccagcatgctgagcaactacctgaagagcctgaaggtgaagatgggcctgctggtggacctgaccaacaccagcagattctacgacagaaacgacatcgagaaggagggcatcaagtacatcaagctgcagtgcaagggccacggcgagtgccccaccaccgagaacaccgagaccttcatcagactgtgcgagagattcaacgagagaaacccccccgagctgatcggcgtgcactgcacccacggcttcaacagaaccggcttcctgatctgcgccttcctggtggagaagatggactggagcatcgaggccgccgtggccaccttcgcccaggccagaccccccggcatctacaagggcgactacctgaaggagctgttcagaagatacggcgacatcgaggaggccccccccccccccctgctgcccgactggtgcttcgaggacgacgaggacgaggacgaggacgaggacggcaagaaggagagcgagcccggcagcagcgccagcttcggcaagagaagaaaggagagactgaagctgggcgccatcttcctggagggcgtgaccgtgaagggcgtgacccaggtgaccacccagcccaagctgggcgaggtgcagcagaagtgccaccagttctgcggctgggagggcagcggcttccccggcgcccagcccgtgagcatggacaagcagaacatcaagctgctggacctgaagccctacaaggtgagctggaaggccgacggcaccagatacatgatgctgatcgacggcaccaacgaggtgttcatgatcgacagagacaacagcgtgttccacgtgagcaacctggagttccccttcagaaaggacctgagaatgcacctgagcaacaccctgctggacggcgagatgatcatcgacagagtgaacggccaggccgtgcccagatacctgatctacgacatcatcaagttcaacagccagcccgtgggcgactgcgacttcaacgtgagactgcagtgcatcgagagagagatcatcagccccagacacgagaagatgaagaccggcctgatcgacaagacccaggagcccttcagcgtgagaaacaagcccttcttcgacatctgcaccagcagaaagctgctggagggcaacttcgccaaggaggtgagccacgagatggacggcctgatcttccagcccaccggcaagtacaagcccggcagatgcgacgacatcctgaagtggaagccccccagcctgaacagcgtggacttcagactgaagatcaccagaatgggcggcgagggcctgctgccccagaacgtgggcctgctgtacgtgggcggctacgagagacccttcgcccagatcaaggtgaccaaggagctgaagcagtacgacaacaagatcatcgagtgcaagttcgagaacaacagctgggtgttcatgagacagagaaccgacaagagcttccccaacgcctacaacaccgccatggccgtgtgcaacagcatcagcaaccccgtgaccaaggagatgctgttcgagttcatcgacagatgcaccgccgccagccagggccagaagagaaagcaccacctggaccccgacaccgagctgatgcccccccccccccccaagagacccagacccctgacctag

SEQ ID NO: 140879 - DNA, 1707 bp, Artificial Sequence
  derived and/or modified sequence
atgctgggccccagatacgacagccaggtggccgaggagaacagattccaccccagcatgctgagcaactacctgaagagcctgaaggtgaagatgggcctgctggtggacctgaccaacaccagcagattctacgacagaaacgacatcgagaaggagggcatcaagtacatcaagctgcagtgcaagggccacggcgagtgccccaccaccgagaacaccgagaccttcatcagactgtgcgagagattcaacgagagaaacccccccgagctgatcggcgtgcactgcacccacggcttcaacagaaccggcttcctgatctgcgccttcctggtggagaagatggactggagcatcgaggccgccgtggccaccttcgcccaggccagaccccccggcatctacaagggcgactacctgaaggagctgttcagaagatacggcgacatcgaggaggccccccccccccccctgctgcccgactggtgcttcgaggacgacgaggacgaggacgaggacgaggacggcaagaaggagagcgagcccggcagcagcgccagcttcggcaagagaagaaaggagagactgaagctgggcgccatcttcctggagggcgtgaccgtgaagggcgtgacccaggtgaccacccagcccaagctgggcgaggtgcagcagaagtgccaccagttctgcggctgggagggcagcggcttccccggcgcccagcccgtgagcatggacaagcagaacatcaagctgctggacctgaagccctacaaggtgagctggaaggccgacggcaccagatacatgatgctgatcgacggcaccaacgaggtgttcatgatcgacagagacaacagcgtgttccacgtgagcaacctggagttccccttcagaaaggacctgagaatgcacctgagcaacaccctgctggacggcgagatgatcatcgacagagtgaacggccaggccgtgcccagatacctgatctacgacatcatcaagttcaacagccagcccgtgggcgactgcgacttcaacgtgagactgcagtgcatcgagagagagatcatcagccccagacacgagaagatgaagaccggcctgatcgacaagacccaggagcccttcagcgtgagaaacaagcccttcttcgacatctgcaccagcagaaagctgctggagggcaacttcgccaaggaggtgagccacgagatggacggcctgatcttccagcccaccggcaagtacaagcccggcagatgcgacgacatcctgaagtggaagccccccagcctgaacagcgtggacttcagactgaagatcaccagaatgggcggcgagggcctgctgccccagaacgtgggcctgctgtacgtgggcggctacgagagacccttcgcccagatcaaggtgaccaaggagctgaagcagtacgacaacaagatcatcgagtgcaagttcgagaacaacagctgggtgttcatgagacagagaaccgacaagagcttccccaacgcctacaacaccgccatggccgtgtgcaacagcatcagcaaccccgtgaccaaggagatgctgttcgagttcatcgacagatgcaccgccgccagccagggccagaagagaaagcaccacctggaccccgacaccgagctgatgcccccccccccccccaagagacccagacccctgacctag

SEQ ID NO: 140880 - protein, 621 aa, Artificial Sequence
  derived and/or modified sequence
MGLLSDPVRRRALARLVLRLNAPLCVLSYVAGIAWFLALVFPPLTQRTYMSENAMGSTMVEEQFAGGDRARAFARDFAAHRKKSGALPVAWLERTMRSVGLEVYTQSFSRKLPFPDETHERYMVSGTNVYGILRAPRAASTESLVLTVPCGSDSTNSQAVGLLLALAAHFRGQIYWAKDIVFLVTEHDLLGTEAWLEAYHDVNVTGMQSSPLQGRAGAIQAAVALELSSDVVTSLDVAVEGLNGQLPNLDLLNLFQTFCQKGGLLCTLQGKLQPEDWTSLDGPLQGLQTLLLMVLRQASGRPHGSHGLFLRYRVEALTLRGINSFRQYKYDLVAVGKALEGMFRKLNHLLERLHQSFFLYLLPGLSRFVSIGLYMPAVGFLLLVLGLKALELWMQLHEAGMGLEEPGGAPGPSVPLPPSQGVGLASLVAPLLISQAMGLALYVLPVLGQHVATQHFPVAEAEAVVLTLLAIYAAGLALPHNTHRVVSTQAPDRGWMALKLVALIYLALQLGCIALTNFSLGFLLATTMVPTAALAKPHGPRTLYAALLVLTSPAATLLGSLFLWRELQEAPLSLAEGWQLFLAALAQGVLEHHTYGALLFPLLSLGLYPCWLLFWNVLFWK

SEQ ID NO: 140881 - protein, 561 aa, Artificial Sequence
  derived and/or modified sequence
MGLLSDPVRRRALARLVLRLNAPLWALPVAWLERTMRSVGLEVYTQSFSRKLPFPDETHERYMVSGTNVYGILRAPRAASTESLVLTVPCGSDSTNSQAVGLLLALAAHFRGQIYWAKDIVFLVTEHDLLGTEAWLEAYHDVNVTGMQSSPLQGRAGAIQAAVALELSSDVVTSLDVAVEGLNGQLPNLDLLNLFQTFCQKGGLLCTLQGKLQPEDWTSLDGPLQGLQTLLLMVLRQASGRPHGSHGLFLRYRVEALTLRGINSFRQYKYDLVAVGKALEGMFRKLNHLLERLHQSFFLYLLPGLSRFVSIGLYMPAVGFLLLVLGLKALELWMQLHEAGMGLEEPGGAPGPSVPLPPSQGVGLASLVAPLLISQAMGLALYVLPVLGQHVATQHFPVAEAEAVVLTLLAIYAAGLALPHNTHRVVSTQAPDRGWMALKLVALIYLALQLGCIALTNFSLGFLLATTMVPTAALAKPHGPRTLYAALLVLTSPAATLLGSLFLWRELQEAPLSLAEGWQLFLAALAQGVLEHHTYGALLFPLLSLGLYPCWLLFWNVLFWK

SEQ ID NO: 140882 - DNA, 1866 bp, Artificial Sequence
  derived and/or modified sequence
atgggcctgctaagcgatcccgttagacgacgagcgctcgccagattggtgttaagattaaacgcccctctctgtgtcctttcgtatgttgctgggatcgcttggttcttggccctggtgtttcctcctctgacacagcggacgtatatgtctgagaatgctatgggatccacaatggtggaagaacagtttgccggaggagaccgtgcaagggccttcgccagagattttgctgcccaccgaaaaaaatctggggcgttgcctgtggcttggttagagcgaaccatgagatctgtgggcctggaagtctacacccagagttttagccgaaagctaccatttcctgacgagacacacgagcggtacatggtttcgggaaccaatgtgtacggaatcctgagggccccacgagcggccagcaccgagtctctcgtgctgaccgttccttgcgggtccgatagcactaattctcaggctgtcggcctactgctggccctggctgcgcacttccgcgggcagatttactgggccaaggatatcgttttcctggtgactgagcatgacctgctcgggaccgaggcatggctcgaagcgtaccatgacgtaaatgttactgggatgcagtccagccctctccagggaagggccggagccatccaggccgcagtggccttggagctgtcttcggatgtggtgacctccttggacgtggctgtggaagggttaaatgggcaactgcccaaccttgacttgctgaacctttttcagaccttctgtcagaaaggcgggctgctatgcactcttcagggcaagctgcagcccgaagattggacatccctggatggcccactacagggtttgcagaccctcctcttgatggtcctgcgccaggcatctgggcgaccacacgggtcacacgggctgttcctgcgctatagggttgaagctctgaccttacgtggcataaactcctttcgccagtacaagtacgatctagttgccgttggaaaagcactagagggtatgtttcggaagctcaaccacctgctagagcgcctccaccagtcattttttctgtacctgctccctggactctcaagatttgtgtccataggcctgtacatgcccgcggtgggattcttactgctcgtgctggggctgaaagctctcgagctgtggatgcaactccatgaagccggaatgggcctcgaggaaccaggaggcgccccaggcccaagcgttccattgccaccatcccagggagtggggttagctagcctcgtcgcaccgctcctcatatctcaagcaatgggcctggccctttatgtcctgcctgttctggggcagcacgtcgctacgcagcattttcctgtggccgaggccgaagcggtcgttctgaccctgctagcgatctacgccgcgggacttgcgcttccccacaatactcaccgcgtggtttcaactcaagcaccagacagagggtggatggcactcaagctcgtggccctgatttatctggccctgcagctgggatgtatagccctaaccaacttcagtctcggttttctcctggccactactatggttccaaccgcagccctcgccaaaccacatggtcctcgcactttgtatgctgccctactggtgctgacgtcacccgccgccaccttactggggtcacttttcctctggcgcgagctgcaggaagcccctttgtctctggcagagggctggcagctgtttttagccgcgcttgcccagggtgtgttggagcaccacacatacggcgcactgttatttcctctgttgtcgctggggttatatccatgttggttgttgttttggaatgtgcttttttggaaatag

SEQ ID NO: 140883 - DNA, 1686 bp, Artificial Sequence
  derived and/or modified sequence
atgggtctgttatccgaccccgtgaggagaagagctctggcccgactggtgttgcggctgaacgcccctctgtgggcattgcccgtggcttggttggagagaactatgagaagtgtgggtctggaggtgtatactcaatcatttagccgcaaactgcctttcccagacgaaacacacgagcgatacatggtttccggcaccaacgtgtatggaatcctccgtgcccccagggctgcctccacagagagcttagtgctgacggtcccatgcggtagtgatagcaccaattcccaggctgtaggcctcctgctggcattagccgctcactttaggggccagatttattgggcaaaggatattgtgttcctggttaccgaacatgaccttctcggaaccgaagcttggctcgaagcctatcatgacgtgaatgtgaccggcatgcagagcagcccattgcagggacgcgccggcgccatccaggccgccgtcgcactggaactaagcagtgacgttgtgaccagtctggacgtggccgtcgaggggctgaacgggcagctccccaaccttgatctcttgaatctgtttcagactttctgtcagaagggcggccttctgtgtaccctccagggcaaactgcagcccgaggattggacttcactagatgggcccctccagggactgcagaccctgctgctcatggttttgcgccaggcaagcgggcgtccccacgggagtcacggcttgttcctcagataccgggtggaagccctgacccttagaggcatcaacagttttcgccagtataagtacgacctggtcgcggtcggcaaggcactggaggggatgtttcggaagttaaatcatttgcttgagcgcctccaccagtcctttttcctgtacctcctgccagggctctcaaggttcgtgagcattggcctgtatatgcctgctgttggtttcctgttgttggtgctgggtctgaaggccctagaattatggatgcagcttcacgaagccgggatgggccttgaggagcccggcggcgcccccgggccctccgtcccgcttccaccatctcagggcgtggggcttgcctctcttgtcgcccccctgctgattagccaggctatggggctcgccctatacgtgctgcccgtgctagggcagcacgtagccacccaacatttccccgtcgctgaggcagaagcagtagtgcttacgcttctcgcaatatacgccgctggcctcgctttgccgcacaacacacacagagtggtcagcacccaggccccagatcgggggtggatggctctgaagctggtagccctcatatacctagcgctgcagcttgggtgtattgccctcactaatttctcactcggattcttactcgcgacaactatggtacccaccgctgccctcgcaaagcctcatggaccccgcacactgtacgctgccctgttagtgctgacatcccctgcagcaaccctgctggggagcttattcctttggcgcgaactacaggaggcacccctgagtcttgctgaaggatggcagctgttcctggcagccttggcacaaggggtgctcgagcatcacacctacggggcgctcctctttccgctgttgtccctcgggctttatccatgctggcttcttttttggaatgtccttttttggaagtag

SEQ ID NO: 140884 - DNA, 2078 bp, Artificial Sequence
  derived and/or modified sequence
gtctctgggaccggaagtgcgggcgagcgcgggtccccgggtctgacaggagcagcctgtgggcaccgcggcggtagttggaggcgggagagggtccgtagccgcgccgccctgccccgccatgggcctcctgtcggacccggttcgccggcgcgcgctcgcccgcctagtgctgcgcctcaacgcgccgttgtgcgtgctgagctacgtggcgggcatcgcctggttcttggcgctggttttcccgccgctgacccagcgcacttacatgtcggagaacgccatgggctccaccatggtggaggagcagtttgcgggcggagaccgtgcccgggcttttgcccgggacttcgccgcccaccgcaagaagtcgggggctctgccagtggcctggcttgaacggacgatgcggtcagtagggctggaggtctacacgcagagtttctcccggaaactgcccttcccagatgagacccacgagcgctatatggtgtcgggcaccaacgtgtacggcatcctgcgggccccgcgtgctgccagcaccgagtcgcttgtgctcaccgtgccctgtggctctgactctaccaacagccaggctgtggggctgctgctggcactggctgcccacttccgggggcagatttattgggccaaagatatcgtcttcctggtaacagaacatgaccttctgggcactgaggcttggcttgaagcctaccacgatgtcaatgtcactggcatgcagtcgtctcccctgcagggccgagctggggccattcaggcagccgtggccctggagctgagcagtgatgtggtcaccagcctcgatgtggccgtggaggggcttaacgggcagctgcccaaccttgacctgctcaatctcttccagaccttctgccagaaagggggcctgttgtgcacgcttcagggcaagctgcagcccgaggactggacatcattggatggaccgctgcagggcctgcagacactgctgctcatggttctgcggcaggcctccggccgcccccacggctcccatggcctcttcctgcgctaccgtgtggaggccctaaccctgcgtggcatcaatagcttccgccagtacaagtatgacctggtggcagtgggcaaggctttggagggcatgttccgcaagctcaaccacctcctggagcgcctgcaccagtccttcttcctctacttgctccccggcctctcccgcttcgtctccatcggcctctacatgcccgctgtcggcttcttgctcctggtccttggtctcaaggctctggaactgtggatgcagctgcatgaggctggaatgggccttgaggagcccgggggtgcccctggccccagtgtaccccttcccccatcacagggtgtggggctggcctcgctcgtggcacctctgctgatctcacaggccatgggactggccctctatgtcctgccagtgctgggccaacacgttgccacccagcacttcccagtggcagaggctgaggctgtggtgctgacactgctggcgatttatgcagctggcctggccctgccccacaatacccaccgggtggtaagcacacaggccccagacaggggctggatggcactgaagctggtagccctgatctacctagcactgcagctgggctgcatcgccctcaccaacttctcactgggcttcctgctggccaccaccatggtgcccactgctgcgcttgccaagcctcatgggccccggaccctctatgctgccctgctggtgctgaccagcccggcagccacgctccttggcagcctgttcctgtggcgggagctgcaggaggcgccactgtcactggccgagggctggcagctcttcctggcagcgctagcccagggtgtgctggagcaccacacctacggcgccctgctcttcccactgctgtccctgggcctctacccctgctggctgcttttctggaatgtgctcttctggaagtgagatctgcctgtccgggctgggacagagactccccaaggaccccattctgcctccttctggggaaataaatgagtgtctgtttcagcagcta

SEQ ID NO: 140885 - DNA, 1840 bp, Artificial Sequence
  derived and/or modified sequence
gtgggcaccgcggcggtagttggaggcgggagagggtccgtagccgcgccgccctgccccgccatgggcctcctgtcggacccggttcgccggcgcgcgctcgcccgcctagtgctgcgcctcaacgcgccgttgtgggctctgccagtggcctggcttgaacggacgatgcggtcagtagggctggaggtctacacgcagagtttctcccggaaactgcccttcccagatgagacccacgagcgctatatggtgtcgggcaccaacgtgtacggcatcctgcgggccccgcgtgctgccagcaccgagtcgcttgtgctcaccgtgccctgtggctctgactctaccaacagccaggctgtggggctgctgctggcactggctgcccacttccgggggcagatttattgggccaaagatatcgtcttcctggtaacagaacatgaccttctgggcactgaggcttggcttgaagcctaccacgatgtcaatgtcactggcatgcagtcgtctcccctgcagggccgagctggggccattcaggcagccgtggccctggagctgagcagtgatgtggtcaccagcctcgatgtggccgtggaggggcttaacgggcagctgcccaaccttgacctgctcaatctcttccagaccttctgccagaaagggggcctgttgtgcacgcttcagggcaagctgcagcccgaggactggacatcattggatggaccgctgcagggcctgcagacactgctgctcatggttctgcggcaggcctccggccgcccccacggctcccatggcctcttcctgcgctaccgtgtggaggccctaaccctgcgtggcatcaatagcttccgccagtacaagtatgacctggtggcagtgggcaaggctttggagggcatgttccgcaagctcaaccacctcctggagcgcctgcaccagtccttcttcctctacttgctccccggcctctcccgcttcgtctccatcggcctctacatgcccgctgtcggcttcttgctcctggtccttggtctcaaggctctggaactgtggatgcagctgcatgaggctggaatgggccttgaggagcccgggggtgcccctggccccagtgtaccccttcccccatcacagggtgtggggctggcctcgctcgtggcacctctgctgatctcacaggccatgggactggccctctatgtcctgccagtgctgggccaacacgttgccacccagcacttcccagtggcagaggctgaggctgtggtgctgacactgctggcgatttatgcagctggcctggccctgccccacaatacccaccgggtggtaagcacacaggccccagacaggggctggatggcactgaagctggtagccctgatctacctagcactgcagctgggctgcatcgccctcaccaacttctcactgggcttcctgctggccaccaccatggtgcccactgctgcgcttgccaagcctcatgggccccggaccctctatgctgccctgctggtgctgaccagcccggcagccacgctccttggcagcctgttcctgtggcgggagctgcaggaggcgccactgtcactggccgagggctggcagctcttcctggcagcgctagcccagggtgtgctggagcaccacacctacggcgccctgctcttcccactgctgtccctgggcctctacccctgctggctgcttttctggaatgtgctcttctggaagtgagatctgcctgtccgggctgggacagagactccccaaggaccccattctgcctccttctggggaaataaatgagtgtctgtttcagcagcta

SEQ ID NO: 140886 - DNA, 1866 bp, Artificial Sequence
  derived and/or modified sequence
atgggcctgctgagtgaccctgtgagaagaagagccctggcccggctggtgctgcggctgaatgcccccctgtgtgtgctgtcctatgtggccggcatcgcctggttcctggccctggtgttcccccccctgacccagaggacctacatgtctgaaaatgccatgggcagcaccatggtggaggagcagtttgctggaggagaccgggcccgggcctttgcccgggactttgctgcccacaggaagaagagcggggccctgcctgtggcctggctggagaggaccatgaggtctgtgggcctggaggtgtacacccagagcttcagcaggaagctgcccttcccagatgagacccatgagcgctacatggtgtctggcaccaacgtgtatggcatcctgcgggccccccgggccgccagcacagagagcctggtgctgactgtgccctgtggcagtgacagcaccaacagccaggccgtgggcctgctgctggccctggccgcccacttccggggccagatctactgggccaaggacatcgtgttcctggtgacagaacatgacctgctgggcacagaggcctggctggaggcctaccatgatgtgaatgtgacaggcatgcagagcagccccctgcagggccgggccggggccatccaggccgctgtggccctggagctgagcagtgatgtggtgaccagcctggatgtggccgtggagggcctgaatggccagctgcccaacctggacctgctgaacctcttccagaccttctgccagaagggcggcctgctgtgcaccctgcagggcaagctgcagcctgaggactggaccagcctggatggccccctgcagggcctgcagaccctgctgctgatggtgctgcggcaggccagcggccggccccacggcagccacggcctcttcctgcgctacagagtggaggccctgaccctgcggggcatcaacagcttccggcagtacaagtatgacctggtggccgtgggcaaggccctggagggcatgttcaggaagctgaaccacctgctggagcggctgcaccagagcttcttcctgtacctgctgcccggcctgagcagatttgtgtccatcggcctgtacatgcctgctgtgggcttcctgctgctggtgctgggcctgaaggccctggagctgtggatgcagctgcatgaagctggcatgggcctggaggagcccggcggggcccctggccccagcgtgcccctgccccccagccagggcgtgggcctggccagcctggtggcccccctgctgatcagccaggccatgggcctggccctgtatgtgctgcctgtgctgggccagcacgtggccacccagcacttccctgtggccgaggccgaggccgtggtgctgaccctgctggccatctatgctgctggcctggccctgccccacaacacccaccgggtggtgtccacccaggccccagaccggggctggatggccctgaagctggtggccctgatctacctggccctgcagctgggctgcatcgccctgaccaacttcagcctgggcttcctgctggccaccaccatggtgcccacagctgccctggccaagccccacggccccaggaccctgtatgctgccctgctggtgctgaccagccctgctgccaccctgctgggcagcctcttcctgtggagggagctgcaggaggcccccctgagcctggccgagggctggcagctgttcctggccgccctggcccagggcgtgctggagcaccacacctatggagccctgctcttccccctgctgagcctgggcctgtacccctgctggctgctcttctggaatgtgctcttctggaagtag

SEQ ID NO: 140887 - DNA, 1686 bp, Artificial Sequence
  derived and/or modified sequence
atgggcctgctgagtgaccctgtgagaagaagagccctggcccggctggtgctgcggctgaatgcccccctgtgggccctgcctgtggcctggctggagaggaccatgaggtctgtgggcctggaggtgtacacccagagcttcagcaggaagctgcccttcccagatgagacccatgagcgctacatggtgtctggcaccaacgtgtatggcatcctgcgggccccccgggccgccagcacagagagcctggtgctgactgtgccctgtggcagtgacagcaccaacagccaggccgtgggcctgctgctggccctggccgcccacttccggggccagatctactgggccaaggacatcgtgttcctggtgacagaacatgacctgctgggcacagaggcctggctggaggcctaccatgatgtgaatgtgacaggcatgcagagcagccccctgcagggccgggccggggccatccaggccgctgtggccctggagctgagcagtgatgtggtgaccagcctggatgtggccgtggagggcctgaatggccagctgcccaacctggacctgctgaacctcttccagaccttctgccagaagggcggcctgctgtgcaccctgcagggcaagctgcagcctgaggactggaccagcctggatggccccctgcagggcctgcagaccctgctgctgatggtgctgcggcaggccagcggccggccccacggcagccacggcctcttcctgcgctacagagtggaggccctgaccctgcggggcatcaacagcttccggcagtacaagtatgacctggtggccgtgggcaaggccctggagggcatgttcaggaagctgaaccacctgctggagcggctgcaccagagcttcttcctgtacctgctgcccggcctgagcagatttgtgtccatcggcctgtacatgcctgctgtgggcttcctgctgctggtgctgggcctgaaggccctggagctgtggatgcagctgcatgaagctggcatgggcctggaggagcccggcggggcccctggccccagcgtgcccctgccccccagccagggcgtgggcctggccagcctggtggcccccctgctgatcagccaggccatgggcctggccctgtatgtgctgcctgtgctgggccagcacgtggccacccagcacttccctgtggccgaggccgaggccgtggtgctgaccctgctggccatctatgctgctggcctggccctgccccacaacacccaccgggtggtgtccacccaggccccagaccggggctggatggccctgaagctggtggccctgatctacctggccctgcagctgggctgcatcgccctgaccaacttcagcctgggcttcctgctggccaccaccatggtgcccacagctgccctggccaagccccacggccccaggaccctgtatgctgccctgctggtgctgaccagccctgctgccaccctgctgggcagcctcttcctgtggagggagctgcaggaggcccccctgagcctggccgagggctggcagctgttcctggccgccctggcccagggcgtgctggagcaccacacctatggagccctgctcttccccctgctgagcctgggcctgtacccctgctggctgctcttctggaatgtgctcttctggaagtag

SEQ ID NO: 140888 - DNA, 1866 bp, Artificial Sequence
  derived and/or modified sequence
atgggcctgctgagcgaccccgtgcggcggcgggccctggcccggctggtgttgcgcctgaacgctcccctctgtgtactctcctatgtggctggcattgcatggtttctggccctggtctttccgccacttacccaaagaacttacatgagtgagaacgcgatgggctctactatggttgaagagcagttcgcaggaggtgacagggcgagggctttcgcgagagacttcgccgcccatagaaaaaagtcaggagccctccccgtggcctggttggaaaggaccatgcgctccgtggggcttgaggtatacacacagagcttttcaagaaagctgcccttcccagatgaaactcatgaacgttatatggtatccggaacaaatgtgtacggaatccttagagctcccagggccgcgtcaactgagtccctcgttctcaccgtcccctgcggaagcgatagtaccaacagccaggccgttgggctcctgctcgcgctagcggcgcacttcagagggcaaatttactgggccaaagacatcgtgttcctggtcaccgaacacgatctgttgggcactgaagcttggctcgaggcctatcacgacgtgaatgtgactgggatgcagtcaagcccccttcagggaagagctggagctatccaagccgctgtggccctggagctgtctagtgatgtcgtgacctccttggatgtagctgttgaaggtcttaacgggcagctgcccaacctggatctactaaatctgttccagacattttgccagaagggcggactcctctgcacacttcaaggaaagttacagcccgaagattggacctcattggacggaccgctacaaggacttcaaacgctgctgctgatggtgcttcgccaggcgagtggtcggccacacggttcgcacgggcttttcttgcgctatcgggtcgaggccctgaccttgagggggatcaattcttttcggcagtacaagtacgacttagtagcggtcggtaaggcattggaagggatgtttcgcaaactgaatcatctgctggagagactccatcagagttttttcctgtaccttcttccgggcctgagccgttttgtgtctattgggctttacatgcctgccgtgggtttcctccttttggtgctgggtctaaaagccctggagctttggatgcaattacacgaggctggaatgggattggaagagcctggcggagcacccggaccctcagtcccacttcctcccagccagggcgtgggcctagcgtctctggtggctccactcttaatttcccaggctatgggtttggcgctgtacgttcttccggtcttgggacaacacgtagccactcagcacttccccgtagcagaggccgaggctgtagtcctgactctcctcgctatctacgccgctgggctcgcccttccacataacacacatcgggtggtgtctacccaggcccctgataggggatggatggcgctcaaactagtcgcgctcatctacctagcgttacagttagggtgtattgcccttactaatttctctctcggttttctactcgctaccaccatggtgcctacagccgctctggctaaaccgcatggccccagaaccttgtatgccgccttactggtactcacttcacccgccgctacacttctcggtagtctgtttctgtggcgagagctgcaggaagcgccactctctctggcggagggctggcagttgttcttagccgctctcgcacagggcgttctcgaacatcacacttatggcgccctgttgttccctttgctatcactgggcctgtacccctgttggctgttgttctggaacgtgctgttctggaagtag

SEQ ID NO: 140889 - DNA, 1686 bp, Artificial Sequence
  derived and/or modified sequence
atgggcctgctgagcgaccccgtgcggcggcgggccctggcccggttggttttgcgtctgaatgctcccctttgggctttgcctgttgcttggctggaaagaaccatgagatcagtcgggcttgaagtgtatacacagtcattctcaagaaagctacctttccccgacgagactcacgaacggtatatggtgagtggcacaaatgtgtatggcatcctgagagcgcctagggctgcctcaacagaatcgctggtattaaccgtgccgtgcggtagcgattcaacgaatagccaggccgtgggcctcctcctggctctggctgcccactttcgggggcaaatttattgggccaaagacattgtgtttcttgtgacggagcatgatctgctcggcaccgaagcatggcttgaggcctaccacgacgtcaatgtcactggaatgcagagcagtccgctacagggcagggccggggctatacaggccgcagtcgctctcgaactgagcagcgacgtggttacaagtctggatgttgcagtggaaggtctgaatggtcagctccctaatttggacctgctgaatttatttcagaccttttgtcagaagggaggtctgctgtgtacgctccaaggcaaacttcagcccgaagattggacctccttagacgggccgcttcaggggctgcaaaccctgctcttgatggtactccggcaggccagcggacgcccgcacggctcccatgggctattccttcgatatcgagtggaggctctgacgctgaggggcataaattcatttcggcaatacaagtacgatttggttgctgtaggtaaggccctggaggggatgttccggaaactcaatcacttgctagagcgactccaccagagtttctttctgtacctcctaccaggcctgtcgcgctttgtctccatcggcctgtatatgccggcagtagggtttcttttactcgtgctcggcctgaaggcacttgagctgtggatgcagctgcacgaagccggaatgggcctggaggaaccaggaggggccccaggaccctccgtcccactcccgcctagtcagggggtggggctggcctctctcgtggcacccctccttatttcgcaagctatgggattagccttgtacgtccttcccgtcttggggcagcatgtggccacgcagcacttcccagtggcagaggcagaggccgtggtactgactcttctggctatctacgccgcggggctggcccttccccataacacacaccgcgtggtctcaacccaggctcctgatcgtgggtggatggcgctcaaactggtggcacttatttacttagccctgcagctgggatgtattgccctgactaacttttcgctcgggtttcttttggcaactactatggtacctaccgccgctctggccaaaccacatggaccccgaactttatatgcagctctgttagtcctgacttctcctgctgccacactactcggctcactgtttctctggagagagctccaggaagctccattaagtctcgccgagggatggcagctgttcttggccgccctcgctcagggggtattggagcatcatacctatggggccctcctattcccactcctgtcgctcgggctgtacccttgttggctattgttctggaacgtcctcttctggaaatag

SEQ ID NO: 140890 - DNA, 1866 bp, Artificial Sequence
  derived and/or modified sequence
atgggtcttctttcagatccagtgagaagacgtgccctcgccagactggtcttacgactgaacgccccactgtgtgtacttagctatgtggccggaatagcgtggttcttagcgcttgtatttccccctctcacacagaggacatatatgagtgaaaatgctatgggatcaacaatggtggaagagcagtttgcaggcggagatagagcacgggcttttgctcgcgacttcgcagcacaccgcaaaaaatccggagcgctccctgtagcctggctcgagaggaccatgagatctgtgggattggaagtctatacccaaagtttctcgcggaagctgccattcccagatgaaactcacgagcgttacatggtgagcggcaccaatgtgtacggcatcttgagagcgccacgggcagctagtaccgaatccctggtgctcactgttccttgcggatccgactccacgaatagccaagccgtgggtctactacttgctctcgcagctcacttcaggggccagatctattgggctaaggacattgtcttcctggtaaccgaacacgacttgttgggtacagaagcatggctagaggcatatcacgatgtgaacgtaaccggtatgcagtcaagtcccctgcagggcagagctggcgctatccaggctgcggttgcattggaactctcctcggacgtggttacctccctggatgtagcggtagaggggttgaatggccaacttcctaatctggatttgctgaaccttttccagaccttttgccagaagggagggctgttatgcacacttcagggaaagttgcagcctgaggactggacctctctggatggcccactgcaggggctgcagacattactgctgatggtgctgaggcaagcatcaggtcgccctcatgggagccatgggctttttttaagatacagagtcgaggcgctcactctgaggggcatcaacagcttccgacagtacaagtacgacctggtcgctgtggggaaggctctggaaggaatgttcagaaagctcaatcacttgctcgagcgccttcaccagtctttttttctctacttgctgcctggattatcccgttttgtctctattggcttgtatatgcctgcagtcggttttctgctcctggtgttaggcctcaaagccctggagttatggatgcagctacacgaagcgggtatgggcctcgaagagcccggaggggctcccggtccatccgtgccattacccccatcacaaggcgtgggactggccagccttgtcgcacctctgctcatcagccaggctatgggattggccttgtacgtgctgcctgtgctgggccaacacgtggctacccaacactttccagttgccgaagcagaagccgtcgtcctgactttgttggcaatttatgcggctggcctagcactgccccacaatacgcaccgagtggtgtcaacgcaggcaccagacaggggctggatggctctgaaactggttgcgctcatctatctagctctgcagctcggatgcatcgctcttacaaacttctccttgggctttctgctggccaccacaatggtgccaacagcggcattggctaagcctcacgggcctcgaactctgtacgccgctctgctggtcctcacaagccctgcagcaaccctgttgggatcactgttcctgtggcgagagttacaggaggcccctttgtctctggccgagggatggcaactctttctggcagccctcgcgcaaggggtgctggagcaccacacctacggtgccctcctttttcctctactctctctcgggctgtatccatgttggctgttattctggaatgtactattttggaagtag

SEQ ID NO: 140891 - DNA, 1686 bp, Artificial Sequence
  derived and/or modified sequence
atgggcctgctttcggatccagtgaggcggagagcccttgcacgtctggtgctgcggttgaacgctcccctttgggccctgcccgtcgcttggcttgaaagaacaatgagaagtgttggcctcgaggtctacacccagtctttctctcgtaagctgcccttccctgacgagacccacgagcgctacatggtcagcgggactaacgtgtacgggatcttgcgagctccccgagccgcaagcaccgaaagcctcgtgctcaccgtgccgtgtggttcagactccaccaattctcaggcagttggccttctcttggcactcgctgcccacttcaggggccagatctattgggcaaaagacattgtcttcctggtcacagagcatgatctgctgggtacagaggcatggctggaggcctaccacgacgtaaatgtgaccggtatgcagagcagccctttacagggaagggccggagctatccaggccgctgttgccctcgagctgtctagcgatgtggtgacaagcctggatgtggcagtggaaggcttaaacggtcagttgcccaatttagacctgctgaatctctttcagaccttttgccaaaaaggtgggttgctgtgcaccctgcagggcaagctccagcccgaggattggacttctctcgacggcccactgcaggggctgcagaccttattgctgatggtgctgaggcaagcctccgggcgaccacatggatcccatgggctgttcctgcgctatcgagtcgaagccttaacgctcagagggattaactcttttaggcagtacaagtacgatttggtggctgtcggcaaagctctggagggaatgtttcggaagctcaaccacctcctcgagagactgcaccaaagctttttcctttatctgcttcccggactcagccgctttgtttctatcggactttacatgcctgctgtgggttttcttctgctggtgttgggccttaaggccctcgaactgtggatgcagctgcacgaagccggtatgggcctcgaagaacccggtggtgccccaggcccatctgttcctcttcctccatctcagggggtaggcctcgcctctttagtcgctccacttcttatatcacaggctatgggactggccctttatgttctgcctgtgttagggcagcatgttgctacacagcactttccagtggccgaggctgaggccgtagtgctcacactcctggccatatatgcagcaggtcttgccctgccgcacaatacacacagggtggtctcgacccaggccccagatagaggctggatggcccttaaactggttgctctgatctacctggctctacagttgggttgtattgcgctgactaacttctcgctcggcttcttgctggccaccaccatggtcccgactgccgctctggccaagccacacggcccacgaacactgtatgcagctctgttggttcttacctccccagcagcaaccctgctgggatcattatttctgtggcgagagctgcaggaggcaccactttctctcgccgaaggctggcaactgttcctcgcagccttagcacagggggtgctcgaacatcatacctacggagccctgctctttcctctcctgtcgctcggcttgtacccctgctggctgctgttctggaatgtcctgttctggaagtag

SEQ ID NO: 140892 - DNA, 1866 bp, Artificial Sequence
  derived and/or modified sequence
atgggcctgctgagcgaccccgtgagaagaagagccctggccagactggtgctgagactgaacgcccccctgtgcgtgctgagctacgtggccggcatcgcctggttcctggccctggtgttcccccccctgacccagagaacctacatgagcgagaacgccatgggcagcaccatggtggaggagcagttcgccggcggcgacagagccagagccttcgccagagacttcgccgcccacagaaagaagagcggcgccctgcccgtggcctggctggagagaaccatgagaagcgtgggcctggaggtgtacacccagagcttcagcagaaagctgcccttccccgacgagacccacgagagatacatggtgagcggcaccaacgtgtacggcatcctgagagcccccagagccgccagcaccgagagcctggtgctgaccgtgccctgcggcagcgacagcaccaacagccaggccgtgggcctgctgctggccctggccgcccacttcagaggccagatctactgggccaaggacatcgtgttcctggtgaccgagcacgacctgctgggcaccgaggcctggctggaggcctaccacgacgtgaacgtgaccggcatgcagagcagccccctgcagggcagagccggcgccatccaggccgccgtggccctggagctgagcagcgacgtggtgaccagcctggacgtggccgtggagggcctgaacggccagctgcccaacctggacctgctgaacctgttccagaccttctgccagaagggcggcctgctgtgcaccctgcagggcaagctgcagcccgaggactggaccagcctggacggccccctgcagggcctgcagaccctgctgctgatggtgctgagacaggccagcggcagaccccacggcagccacggcctgttcctgagatacagagtggaggccctgaccctgagaggcatcaacagcttcagacagtacaagtacgacctggtggccgtgggcaaggccctggagggcatgttcagaaagctgaaccacctgctggagagactgcaccagagcttcttcctgtacctgctgcccggcctgagcagattcgtgagcatcggcctgtacatgcccgccgtgggcttcctgctgctggtgctgggcctgaaggccctggagctgtggatgcagctgcacgaggccggcatgggcctggaggagcccggcggcgcccccggccccagcgtgcccctgccccccagccagggcgtgggcctggccagcctggtggcccccctgctgatcagccaggccatgggcctggccctgtacgtgctgcccgtgctgggccagcacgtggccacccagcacttccccgtggccgaggccgaggccgtggtgctgaccctgctggccatctacgccgccggcctggccctgccccacaacacccacagagtggtgagcacccaggcccccgacagaggctggatggccctgaagctggtggccctgatctacctggccctgcagctgggctgcatcgccctgaccaacttcagcctgggcttcctgctggccaccaccatggtgcccaccgccgccctggccaagccccacggccccagaaccctgtacgccgccctgctggtgctgaccagccccgccgccaccctgctgggcagcctgttcctgtggagagagctgcaggaggcccccctgagcctggccgagggctggcagctgttcctggccgccctggcccagggcgtgctggagcaccacacctacggcgccctgctgttccccctgctgagcctgggcctgtacccctgctggctgctgttctggaacgtgctgttctggaagtag

SEQ ID NO: 140893 - DNA, 1686 bp, Artificial Sequence
  derived and/or modified sequence
atgggcctgctgagcgaccccgtgagaagaagagccctggccagactggtgctgagactgaacgcccccctgtgggccctgcccgtggcctggctggagagaaccatgagaagcgtgggcctggaggtgtacacccagagcttcagcagaaagctgcccttccccgacgagacccacgagagatacatggtgagcggcaccaacgtgtacggcatcctgagagcccccagagccgccagcaccgagagcctggtgctgaccgtgccctgcggcagcgacagcaccaacagccaggccgtgggcctgctgctggccctggccgcccacttcagaggccagatctactgggccaaggacatcgtgttcctggtgaccgagcacgacctgctgggcaccgaggcctggctggaggcctaccacgacgtgaacgtgaccggcatgcagagcagccccctgcagggcagagccggcgccatccaggccgccgtggccctggagctgagcagcgacgtggtgaccagcctggacgtggccgtggagggcctgaacggccagctgcccaacctggacctgctgaacctgttccagaccttctgccagaagggcggcctgctgtgcaccctgcagggcaagctgcagcccgaggactggaccagcctggacggccccctgcagggcctgcagaccctgctgctgatggtgctgagacaggccagcggcagaccccacggcagccacggcctgttcctgagatacagagtggaggccctgaccctgagaggcatcaacagcttcagacagtacaagtacgacctggtggccgtgggcaaggccctggagggcatgttcagaaagctgaaccacctgctggagagactgcaccagagcttcttcctgtacctgctgcccggcctgagcagattcgtgagcatcggcctgtacatgcccgccgtgggcttcctgctgctggtgctgggcctgaaggccctggagctgtggatgcagctgcacgaggccggcatgggcctggaggagcccggcggcgcccccggccccagcgtgcccctgccccccagccagggcgtgggcctggccagcctggtggcccccctgctgatcagccaggccatgggcctggccctgtacgtgctgcccgtgctgggccagcacgtggccacccagcacttccccgtggccgaggccgaggccgtggtgctgaccctgctggccatctacgccgccggcctggccctgccccacaacacccacagagtggtgagcacccaggcccccgacagaggctggatggccctgaagctggtggccctgatctacctggccctgcagctgggctgcatcgccctgaccaacttcagcctgggcttcctgctggccaccaccatggtgcccaccgccgccctggccaagccccacggccccagaaccctgtacgccgccctgctggtgctgaccagccccgccgccaccctgctgggcagcctgttcctgtggagagagctgcaggaggcccccctgagcctggccgagggctggcagctgttcctggccgccctggcccagggcgtgctggagcaccacacctacggcgccctgctgttccccctgctgagcctgggcctgtacccctgctggctgctgttctggaacgtgctgttctggaagtag

SEQ ID NO: 140894 - protein, 1938 aa, Artificial Sequence
  derived and/or modified sequence
MSSDAEMAIFGEAAPYLRKPEKERIEAQNRPFDSKKACFVADNKEMYVKGMIQTRENDKVIVKTLDDRMLTLNNDQVFPMNPPKFDKIEDMAMMTHLHEPAVLYNLKERYAAWMIYTYSGLFCVTVNPYKWLPVYKPEVVAAYRGKKRQEAPPHIFSISDNAYQFMLTDRDNQSILITGESGAGKTVNTKRVIQYFATIAVTGDKKKETQPGKMQGTLEDQIIQANPLLEAFGNAKTVRNDNSSRFGKFIRIHFGATGKLASADIETYLLEKSRVTFQLSSERSYHIFYQIMSNKKPELIDLLLISTNPFDFPFVSQGEVTVASIDDSEELLATDNAIDILGFSSEEKVGIYKLTGAVMHYGNMKFKQKQREEQAEPDGTEVADKAGYLMGLNSAEMLKGLCCPRVKVGNEYVTKGQNVQQVTNSVGALAKAVYEKMFLWMVTRINQQLDTKQPRQYFIGVLDIAGFEIFDFNSLEQLCINFTNEKLQQFFNHHMFVLEQEEYKKEGIEWEFIDFGMDLAACIELIEKPMGIFSILEEECMFPKATDTSFKNKLYDQHLGKSNNFQKPKPAKGKAEAHFSLVHYAGTVDYNIAGWLDKNKDPLNETVVGLYQKSSLKLLSFLFSNYAGAETGDSGGSKKGGKKKGSSFQTVSAVFRENLNKLMTNLRSTHPHFVRCLIPNETKTPGVMDHYLVMHQLRCNGVLEGIRICRKGFPSRILYADFKQRYRILNASAIPEGQFIDSKNASEKLLNSIDVDREQFRFGNTKVFFKAGLLGLLEEMRDEKLVTLMTSTQAVCRGYLMRVEFKKMMERRDSIFCIQYNIRSFMNVKHWPWMNLFFKIKPLLKSAEAEKEMATMKEDFERTKEELARSEARRKELEEKMVSLLQEKNDLQLQVQSETENLMDAEERCEGLIKSKILLEAKVKELTERLEEEEEMNSELVAKKRNLEDKCSSLKRDIDDLELTLTKVEKEKHATENKVKNLSEEMTALEENISKLTKEKKSLQEAHQQTLDDLQVEEDKVNGLIKINAKLEQQTDDLEGSLEQEKKLRADLERAKRKLEGDLKMSQESIMDLENDKQQIEEKLKKKEFELSQLQAKIDDEQVHSLQFQKKIKELQARIEELEEEIEAEHTLRAKIEKQRSDLARELEEISERLEEASGATSAQIEMNKKREAEFQKMRRDLEEATLQHEATAATLRKKQADSVAELGEQIDNLQRVKQKLEKEKSELKMEIDDMASNIEALSKSKSNIERTCRTVEDQFSEIKAKDEQQTQLIHDLNMQKARLQTQNGELSHRVEEKESLISQLTKSKQALTQQLEELKRQMEEETKAKNAMAHALQSSRHDCDLLREQYEEEQEAKAELQRALSKANSEVAQWRTKYETDAIQRTEELEEAKKKLAQRLQEAEENTETANSKCASLEKTKQRLQGEVEDLMRDLERSHTACATLDKKQRNFDKVLAEWKQKLDESQAELEAAQKESRSLSTELFKMRNAYEEVVDQLETLRRENKNLQEEISDLTEQIAETGKNLQEAEKTKKLVEQEKSDLQVALEEVEGSLEHEESKILRVQLELSQVKSELDRKVIEKDEEIEQLKRNSQRAAEALQSVLDAEIRSRNDALRLKKKMEGDLNEMEIQLGHSNRQMAETQKHLRTVQGQLKDSQLHLDDALRSNEDLKEQLAIVERRNGLLLEELEEMKVALEQTERTRRLSEQELLDASDRVQLLHSQNTSLINTKKKLEADIAQCQAEVENSIQESRNAEEKAKKAITDAAMMAEELKKEQDTSAHLERMKKNLEQTVKDLQHRLDEAEQLALKGGKKQIQKLENRVRELENELDVEQKRGAEALKGAHKYERKVKEMTYQAEEDHKNILRLQDLVDKLQAKVKSYKRQAEEAEEQANTQLSRCRRVQHELEEAAERADIAESQVNKLRAKSRDVGSQKMEE

SEQ ID NO: 140895 - protein, 666 aa, Artificial Sequence [sequence omitted]

SEQ ID NO: 140896 - DNA, 5817 bp, Artificial Sequence
  derived and/or modified sequence
atgagcagtgatgctgagatggccatcttcggtgaagctgctccataccttcgcaagccagagaaagagaggatcgaggcacagaacaggcccttcgactcgaagaaagcttgctttgtagcagataacaaggaaatgtacgtgaaggggatgatccaaacccgcgaaaacgataaagtcattgtcaaaacactagacgaccgaatgctgacactgaacaatgaccaagtctttcccatgaaccctcccaagtttgacaagatagaggatatggcaatgatgacacatctgcacgaaccagctgtgctgtacaacctcaaagagcggtatgcagcttggatgatttatacctactctggtcttttctgcgtcactgtcaacccgtataaatggttgcccgtatataaacctgaagtggtcgccgcctatagagggaagaagcgtcaggaagcaccgccccacatcttcagcatttctgataacgcctatcaatttatgctgacagaccgggataatcagagcatcctcattaccggtgagagtggagctggaaaaacagtgaatacaaaaagggtcattcaatattttgcaacgattgctgtgacaggcgacaagaagaaggaaacgcagcctgggaaaatgcagggcaccctggaagatcaaatcattcaagccaaccctctactggaggccttcgggaacgcgaagaccgtccgtaacgacaacagctccagattcggcaagttcatcaggattcacttcggggccacgggtaaactggcctctgcagacatcgagacttatttgctcgagaagtctcgagtcacctttcagctgtcttccgagcgctcataccacatcttttaccagataatgagcaacaaaaagcccgagctaatcgatctgttgcttatatccactaatccttttgacttccctttcgtaagccaaggcgaggttaccgtggcctctattgacgattccgaagaactgctggccacagacaatgctatcgacattctcggatttagctctgaagaaaaagtcgggatttacaagctgacgggagcagttatgcactacggtaacatgaagttcaagcagaagcaaagggaagaacaagcagagccggacgggactgaagtcgctgataaggcagggtacttgatgggcctgaactccgccgaaatgctcaaagggctgtgttgtccccgagtgaaggtgggaaatgaatacgtcactaagggccagaatgtgcagcaggtgacaaactcggtcggagctctggcaaaggccgtctacgagaaaatgttcctttggatggtgacgcgcattaaccagcaactggatactaaacagccccggcagtatttcatcggcgtgttggatatcgctggttttgagattttcgacttcaactctctggagcagctctgtattaacttcacaaacgagaaacttcagcagtttttcaaccatcacatgtttgttcttgaacaggaagagtataagaaagagggcatagaatgggaattcatcgattttggtatggaccttgccgcctgcattgagctgatcgaaaaaccaatggggatcttttccatactggaggaagagtgtatgtttccaaaggccactgatacatccttcaaaaataaactgtatgaccaacacttaggaaaaagcaacaattttcagaaaccaaagcctgccaaaggaaaggccgaagctcattttagcctggttcactatgctggcacagttgattacaatattgcgggctggctcgacaaaaataaggaccccctgaatgagactgtcgttggactataccaaaagagctcgctgaaactcctcagctttctgttcagcaattatgccggcgccgagactggcgacagtgggggctccaagaagggcggcaagaagaagggaagtagttttcagaccgtgagtgctgtttttcgcgagaatctaaataagttaatgaccaacttacggtccacgcacccacactttgtgcggtgtctgataccaaatgagactaaaacgcccggagtgatggaccattatcttgtgatgcatcagttaaggtgtaatggagttctcgaagggattcgcatctgccgcaaaggatttccatcccgaattctctatgcagactttaaacagaggtataggatcctcaacgcaagtgcgattcctgagggacagttcattgatagcaagaacgctagcgaaaaactgttaaacagtattgatgtggacagggaacagtttcggtttggaaacaccaaggtgttctttaaggccggtctgctgggactgcttgaggagatgagggacgagaaattagtgacccttatgacgagtacacaggcggtgtgtagaggctacctaatgagggttgagttcaagaagatgatggaacgcagagattccatcttctgtattcagtataatattcgatcttttatgaatgtgaagcactggccttggatgaatctgttctttaaaatcaaaccacttctgaagtcggcagaagctgagaaggaaatggctaccatgaaagaagatttcgagcggactaaagaggagttggctagatcagaggcccggaggaaagagctggaggaaaagatggtcagtctgcttcaggaaaagaacgacctgcagttgcaggtccaatctgagaccgagaatctaatggacgctgaggaaaggtgcgaggggttgattaagagtaagatattgctggaagccaaggtaaaggagctgacggaaaggctggaggaggaggaggagatgaacagcgagctcgttgctaagaaacgaaacctcgaggacaagtgcagcagccttaagcgtgacattgatgacctggagcttactctgaccaaggttgagaaggaaaaacacgccacagaaaataaagtgaaaaacttgtctgaagagatgaccgcattggaggagaatatcagcaagctcactaaggagaagaaatcgctacaggaggctcatcagcagacattggatgatttgcaggtcgaggaagataaggttaatggcctgattaaaataaacgctaaattagagcagcagaccgacgatctcgagggcagtttagaacaggagaaaaaactcagggctgacctcgagcgcgccaagcggaaattggagggggatctaaaaatgtcccaggagagcatcatggatctcgaaaatgacaaacagcagatagaggaaaagctgaaaaagaaagagttcgagctcagccaactccaggcaaagatcgacgatgaacaggtgcatagcctccagttccagaagaagatcaaagaacttcaggcccggatcgaagagctagaggaagagatcgaagccgaacacacactccgcgctaagatcgagaaacaaaggagcgacctggctcgtgaactggaagaaattagcgaacgcctagaagaggctagcggagctacctctgcccaaatcgaaatgaacaaaaagcgtgaggctgaattccaaaagatgagaagagatctagaagaagctacactccaacacgaagctactgccgccactctgagaaagaaacaggccgactccgtcgcggaacttggtgagcagatagacaacttacagcgcgttaaacagaagttggagaaggagaagtctgaactgaagatggagattgacgatatggcatccaacattgaagccctgagcaagtcgaagtccaacatcgagcggacctgtaggactgtagaagatcagttcagcgaaataaaagccaaggacgaacagcagacacagctcatccacgatctgaatatgcagaaggcgcggctgcaaactcagaacggggagctctcccaccgggtggaagagaaagagtccctgatctcacagctcaccaagagcaaacaggctttgacccagcagctcgaggagctcaagcgacagatggaggaggaaacaaaagctaaaaacgccatggctcacgccttgcaatcctcgcgccacgattgtgacctgctcagggagcaatacgaggaggagcaagaagccaaggcggagctccagagggccttgtccaaagcaaattccgaggttgcccagtggcgaacaaagtatgagaccgatgctatccaaaggacagaggagctggaagaggcgaaaaagaagctagcccaacgcctgcaagaggcagaagagaacactgagacggctaatagcaagtgcgcatctctggaaaaaactaaacagaggctgcagggcgaggtcgaagatctgatgcgtgacctggaacgatcacataccgcctgtgcaaccctcgacaagaagcagcgaaactttgataaggtgctggcagagtggaagcagaagctcgacgagagccaggccgagctagaagctgcccagaaagagtcacgttctcttagcaccgagctcttcaagatgaggaacgcttatgaagaagttgttgatcaactggaaaccctgagaagagagaataaaaacctgcaggaagagatctccgatctcacagagcaaatagcagagaccggaaaaaacttgcaggaggccgaaaaaacaaagaagctggtggaacaagaaaaatcagatcttcaggttgccttggaagaagtcgaaggttccctggaacacgaggagtcgaagatcctgcgtgttcaacttgaactgagtcaggtaaaatcggagctggacaggaaagtgatcgagaaagatgaggagatcgaacaattgaagaggaacagccagcgcgccgccgaagcactgcaatccgtattggacgccgagatccggtcccgcaacgacgcccttaggctgaaaaagaagatggagggggatctcaacgagatggaaattcaactagggcattcaaaccgacagatggccgagacacaaaaacatttgaggaccgtgcagggccagctgaaagactcgcagctgcacttggatgacgctcttcgctctaacgaggatcttaaggaacagttagctatcgtcgaacgaagaaacggtctgctgctagaggagctggaggaaatgaaagtggccctggagcagaccgagcggacaagacgactttccgaacaggaattgctggacgctagcgatcgagtgcagctgttgcatagtcagaacacttccctcatcaacaccaaaaaaaagctcgaggcggatattgcccaatgtcaggcggaggtggaaaactccatccaggaatctcgcaacgccgaagagaaagccaagaaagcgatcacagacgcggcaatgatggcagaggagttgaaaaaagaacaggatacctccgctcatcttgagaggatgaagaagaacctggagcagactgtcaaggatttgcagcatagacttgacgaggcagaacaactggcgctgaaaggaggaaaaaagcagatccagaaacttgagaaccgcgtcagagaattggagaatgaactcgatgtggagcagaaacggggtgccgaggcgttgaaaggcgctcataaatacgagaggaaggtgaaggagatgacttaccaggccgaggaggaccacaaaaatatccttcgattgcaggatctggtggacaaactgcaggcaaaggtgaagtcctacaagaggcaggcagaggaggcagaggagcaggcaaacacgcagctttccagatgccgaagagtacagcacgaactggaggaagccgcagaacgggccgatatcgcggaaagccaggtcaacaaattgcgagccaagtcccgtgatgttggcagccaaaagatggaggagtag

SEQ ID NO: 140897 - DNA, 5817 bp, Artificial Sequence
  derived and/or modified sequence
atgagttcagatgccgagatggccatttttggagaggccgccccatacctgcgcaaacctgagaaagagcgcatagaggcccaaaataggccattcgactccaaaaaagcatgtttcgttgcggataacaaggagatgtatgtgaaaggcatgatccagacccgggaaaacgacaaagtgatcgtcaagaccctggatgaccgcatgctgaccctgaacaatgatcaggtgttccccatgaatcctcccaagttcgataagatagaagatatggcaatgatgacccatctgcacgagcctgctgtcctttacaacctcaaagaacgctatgctgcctggatgatttatacttactcggggctgttctgcgtcactgtcaatccttacaagtggctacctgtttataagcctgaggtcgtagcggcttaccggggcaaaaaacgccaggaagcgcctccccacattttcagcatatctgataacgcataccagtttatgttgaccgacagggacaaccagagcatccttatcacaggagagtcaggagccggaaaaacagttaacacgaaacgtgtcatccaatattttgcaacaatcgccgtaaccggcgataaaaaaaaggagacgcaaccgggtaagatgcaaggaaccttagaggatcagatcatccaggccaatccactcttggaggccttcggcaacgcaaagactgtacgcaatgacaactctagtcggtttggcaaattcatcagaattcactttggagccaccggcaaactcgcgagtgcagacatcgaaacttatctcctcgaaaagagtagagtgacattccagctcagcagcgagcgctcttaccacattttttaccagataatgtccaacaaaaagccagaactgattgatctattgctgatttctacaaacccatttgacttcccatttgttagccagggagaggttaccgtggccagcatcgatgactcggaggagctgcttgctaccgataatgccattgacatcctgggctttagttcagaggaaaaggtaggtatctacaagctaaccggcgcagtgatgcattacgggaatatgaagttcaaacagaaacagcgggaggagcaggccgagcctgacggcaccgaagtggcggacaaagccggatacctgatggggttgaacagtgccgaaatgctgaaaggtttgtgttgccctagagttaaggtggggaacgagtacgtgaccaaggggcagaatgtccagcaggtcactaattccgtcggcgcgctcgccaaagccgtgtatgaaaaaatgttcttgtggatggtgacccggatcaatcagcagctggacactaagcagcctaggcaatactttataggagtgcttgacattgccggcttcgagatctttgactttaattccctcgaacagctctgcatcaatttcaccaacgaaaaactccagcaattttttaaccatcatatgtttgtcttggaacaggaggaatacaagaaggaggggatagagtgggaattcattgatttcggcatggatcttgcagcctgtatcgagcttattgagaagcctatggggattttctccatccttgaagaagagtgtatgtttccaaaagccacagatacatcgtttaaaaataagctctacgaccagcatttgggtaaaagcaataattttcagaaacccaagccggcgaaaggcaaagcagaggcccacttctcactggtgcattatgctgggacagtggattataatatcgccggctggctagataaaaacaaagatcctctcaatgaaacagtggtgggcttgtatcagaaaagctccctgaagcttctaagcttcttgtttagcaactatgcaggcgccgagaccggcgactccggtgggtccaagaagggagggaaaaagaaagggagtagctttcagaccgttagtgcagtatttagagagaacctgaacaaattgatgaccaacttacggagcacccatccacatttcgtcaggtgcttgattccaaacgagacaaagacccccggtgtgatggaccactacctggtcatgcatcagctacggtgcaacggggtcttagaaggcattcgcatatgccgcaagggttttccttcaagaattctctatgcggacttcaaacagcgctaccggatcctgaatgccagtgccatacctgaaggccagttcatagatagcaagaatgcaagtgagaaacttctgaattccattgatgtggatcgcgagcaattcaggttcggcaataccaaagttttttttaaagccggcctactgggtctactcgaagagatgagggacgagaaactggtcacgttgatgactagcacgcaggccgtttgccgtggctacctgatgcgcgtagagttcaagaaaatgatggagcggcgggactccatcttttgcatccagtataacattagatccttcatgaatgtgaaacattggccttggatgaacctcttctttaaaattaagccgctgctgaaatcagccgaggcagagaaggagatggctaccatgaaggaagatttcgagcgaacgaaagaagaattggcgagaagcgaggcccgcagaaaggagcttgaggagaagatggtcagcctattgcaggagaaaaacgaccttcagcttcaggttcaatctgagacagaaaacctaatggatgccgaggaaaggtgcgaaggacttattaaatcaaagattctgctggaggctaaggtgaaggaattaaccgaaaggctggaagaggaggaagagatgaattccgaactcgtggctaagaaacggaatcttgaggataaatgctcctctttaaagcgtgatattgacgacctggagttaaccctcaccaaggtcgagaaagagaagcacgcaacagaaaataaggtaaagaatctctcggaggagatgacggcgctggaggagaatattagtaagctgaccaaggaaaagaagtctctgcaggaagcccatcagcagacgctcgacgatctccaagttgaggaagacaaggtgaacggcttgataaagattaatgcaaagctggagcagcagactgatgacttggagggctccctggaacaggagaaaaagttgagagcagacttggagcgcgctaaaagaaagctggagggcgacttaaagatgtctcaggaatccataatggaccttgagaacgataaacaacagatagaagaaaaactaaagaagaaagaatttgagttatctcagctccaggcaaagattgacgatgaacaggtccactcactccagtttcagaaaaaaattaaagagctgcaggctaggatcgaggagctcgaggaggagatcgaggccgagcacacgctcagagcgaagatcgagaaacagcggtctgacctggctcgcgaactggaagagattagcgagcggctcgaagaggcaagtggagccactagcgcgcagatagaaatgaacaaaaagagagaagctgagttccaaaagatgcgccgagatttagaagaggcgaccttgcagcacgaggccacagctgctactcttaggaagaagcaggccgatagcgtggccgagctcggagagcagatcgacaatctccagcgggtcaagcagaaattagagaaggagaagtccgagctgaagatggagatcgacgatatggcatctaatatcgaggccctctccaaatcgaaatccaatattgagcggacatgcagaacagtggaggatcagttttcagagattaaagcaaaagacgagcagcagacccaattaattcatgacctgaacatgcagaaagctagactgcaaacccaaaatggggaactttcacacagagtggaggaaaaggagagcctgatcagtcagctgacaaagagcaagcaggcactgactcagcagctcgaagaactgaaaagacagatggaagaggagaccaaagctaaaaatgccatggctcacgccctacaatctagcaggcacgactgtgacctgctaagggagcagtacgaggaggagcaggaggcaaaggctgagctgcagagagcgctgtccaaagcgaactccgaggtggcccaatggcggaccaaatacgagactgatgctatccagaggactgaggagctcgaggaagctaaaaagaaattggctcagcggctgcaggaagccgaggagaacactgagacagctaactctaagtgcgcgtcattggagaaaacaaagcagcgtttgcagggagaagttgaggatctgatgagggacctcgagcgcagccacacagcatgcgctacactggataaaaagcagaggaactttgacaaagtcctagccgagtggaagcaaaaactcgatgagagccaggccgagcttgaggcggcacagaaggagtcccgcagcttaagtaccgaactgttcaaaatgcgtaacgcatacgaggaagtagtagaccagctggagactttgcggcgggaaaacaaaaacctccaggaggaaattagtgatttaacagagcagatagctgaaacaggaaaaaacttgcaggaggccgagaagacaaagaagctggtggaacaggaaaaatccgatctccaggtggcgctagaggaggtggagggctccctggagcacgaggaaagtaaaattctccgtgttcaactggagctgtcccaggttaaatctgagcttgaccggaaagttatcgagaaagatgaggagatcgagcagcttaagcgtaatagtcagagggctgccgaggcactccagtcagttttggatgccgaaatccgttctcgcaatgatgcattgcgcttgaaaaagaagatggaaggcgacctgaacgaaatggagattcagttgggacattccaaccggcaaatggcagaaacacagaagcatctcaggacagtacagggacagttgaaggacagtcagctgcaccttgatgacgcgctgcgatcaaacgaagacctcaaagagcaattggccatcgtggagcgcaggaatgggctgctgcttgaggagctggaagagatgaaggtggcccttgaacagacagagagaactaggcggttgtcagaacaggagcttttggacgcctctgaccgggttcagctcttgcactcccagaacaccagcttaattaatactaagaaaaagctcgaggccgacatagcccagtgtcaggcagaagtcgaaaacagcattcaagaatctcggaatgcggaagagaaggccaagaaggcaataaccgatgccgcgatgatggctgaagaacttaagaaagaacaagatacatccgcccacctggaaaggatgaagaaaaaccttgagcaaacagtcaaggacctgcagcatagacttgacgaggccgagcagctggccctgaaaggaggaaagaaacagattcagaaacttgagaaccgggttcgagaactagaaaacgaattggacgttgagcaaaagcgtggggcagaggccctaaagggcgcccacaaatacgagcgcaaggtgaaagagatgacctaccaagccgaggaggaccacaagaacattctgcgtcttcaggatctcgtggataaactgcaggccaaagttaagtcctacaagcgccaagccgaggaagccgaggaacaggcgaacacccagctgtcccgctgtagaagggtccaacacgaactggaagaagctgcggagcgggccgatattgccgaatcccaggtgaacaagctgagagctaaaagtagggatgttggttcccagaagatggaagagtag

SEQ ID NO: 140898 - DNA, 2001 bp, Artificial Sequence
  derived and/or modified sequence
atgttgtctcatatgttgtacaagaaggagaacgccatcgatattctgggattttcgagtgaggagaaggtagggatatacaagctgactggggcagtgatgcactacggaaacatgaaattcaagcagaagcaaagagaggagcaggcagaacctgacggcacggaagttgcagacaaggccggatatctgatgggcctaaactccgccgaaatgctgaaaggattgtgctgccctagggtcaaggttgggaacgaatacgttacgaagggccaaaatgtgcagcaggtcactaattctgtcggcgccttggcaaaagctgtctatgagaaaatgttcctgtggatggtgacacggataaatcagcagctggatacaaagcagcctaggcagtactttataggcgtgctcgacatcgccggtttcgaaatctttgacttcaatagcctggaacaactttgcatcaattttactaacgagaagctgcagcagtttttcaaccatcacatgttcgttctagagcaggaagagtacaagaaggaaggaatcgagtgggagtttattgattttggcatggatctagccgcgtgcattgagttgatcgagaaacccatggggattttttccatacttgaggaagagtgcatgttcccaaaagcaaccgacacaagttttaagaataaactgtacgaccaacacttgggcaagtcaaataattttcaaaaacctaaacccgccaagggcaaggcggaggcccacttctctctagtgcattacgccggcactgtggactacaatatagcaggctggctggataaaaataaagatcccctcaatgaaacagtggttggcctctatcaaaagtcaagtcttaaattgctgagcttcctattttccaattatgcaggagccgagaccggagacagcggcgggtccaaaaagggcggcaagaagaaggggagttcttttcagacggtgagtgctgtgtttagagaaaatcttaacaagctgatgacaaatttacggtccacccacccgcatttcgttcggtgcctgattccaaacgaaaccaaaacccccggtgtgatggaccactaccttgttatgcaccagctccgctgcaatggcgtgttagagggtatccgtatctgtcgcaagggattcccaagtcggatcctgtacgcggacttcaagcagagatatcgcatcttaaacgcctctgctatccctgagggtcaattcatcgactctaagaacgcctctgagaaacttctcaacagtattgatgtggatcgggagcaattccggtttgggaacactaaagtattctttaaagcgggcctgctgggcctactggaagaaatgcgggatgaaaaattggtgacactgatgactagcactcaggccgtctgtaggggctatctgatgagagtggaattcaaaaaaatgatggagagacgtgatagtatattttgtattcagtacaacattcgtagtttcatgaacgtgaagcattggccctggatgaacctctttttcaagatcaagcctttgctgaaaagtgccgaagccgagaaagaaatggccaccatgaaagaagacttcgagcgaactaaggaggaactggcacgctctgaggcgcggagaaaagaactgaccgagaggctggaggaagaggaagaaatgaactcggagcttgtcgccaagaagaggaatctggaggacaagtgttccagcctcaagagggatattgacgacctggagctgactctgactaaggtcgagaaagaaaagcacgccacggaaaataaagtgaaaaacttgagtgaagaaatgacagcacttgaggaaaacatttctaaactcaccaaggagaaaaaatccttgcaggaagcccaccagcaaacattggatgatttacaagtggaggaggacaaggtgaacggattgattaaaataaacgctaaacttgaacagcagacagacgacgagggcgtgtag

SEQ ID NO: 140899 - DNA, 5817 bp, Artificial Sequence
  derived and/or modified sequence
atgagcagtgatgctgagatggccatctttggagaggccgccccctacctgaggaagccagagaaggagagaattgaggcccagaaccggccctttgacagcaagaaggcctgctttgtggccgacaacaaggagatgtatgtgaagggcatgatccagacccgggagaatgacaaggtgattgtgaagaccctggatgacaggatgctgaccctgaacaatgaccaggtgttccccatgaacccccccaagtttgacaagattgaggacatggccatgatgacccacctgcacgagcctgctgtgctgtacaacctgaaggagagatatgctgcctggatgatctacacctacagcggcctcttctgtgtgacagtgaacccctacaagtggctgcctgtgtacaagccagaggtggtggccgcctaccggggcaagaagaggcaggaggccccaccccacatcttcagcatcagtgacaatgcctaccagttcatgctgacagaccgggacaaccagagcatcctgatcaccggggagagcggggccggcaagacagtgaacaccaagagggtcatccagtactttgccaccatcgctgtgactggagacaagaagaaggagacccagcccgggaagatgcagggcaccctggaggaccagatcatccaggccaaccccctgctggaggcctttggaaatgccaagacagtgagaaatgacaacagcagcagatttgggaagttcatccgcatccactttggagccaccgggaagctggccagcgctgacatcgagacctacctgctggagaagagccgggtgaccttccagctgagcagcgagaggagctaccacatcttctaccagatcatgagcaacaagaagccagagctgattgacctgctgctgatcagcaccaacccctttgacttcccctttgtgtcccagggcgaggtgacagtggccagcattgatgacagcgaggagctgctggccacagacaatgccatcgacatcctgggcttcagcagcgaggagaaggtgggcatctacaagctgactggagctgtgatgcactacggcaacatgaagttcaagcagaagcagcgggaggagcaggccgagccagatggaacagaggtggccgacaaggccggctacctgatgggcctgaacagcgctgagatgctgaagggcctgtgctgcccccgggtgaaggtgggcaatgaatatgtgaccaagggccagaatgtgcagcaggtgaccaacagcgtgggcgccctggccaaggctgtgtatgagaagatgttcctgtggatggtgacccgcatcaaccagcagctggacaccaagcagccccggcagtacttcatcggcgtgctggacattgctggctttgagatctttgacttcaacagcctggagcagctgtgcatcaacttcaccaatgagaagctgcagcagttcttcaaccaccacatgtttgtgctggagcaggaggagtacaagaaggagggcatcgagtgggagttcatcgactttggcatggacctggccgcctgcatcgagctgattgagaagcccatgggcatcttcagcatcctggaggaggagtgcatgttccccaaggccacagacaccagcttcaagaacaagctgtatgaccagcacctgggcaagagcaacaacttccagaagcccaagccagccaagggcaaggccgaggcccacttcagcctggtgcactacgccggcaccgtggactacaacattgctggctggctggacaagaacaaggaccccctgaatgagaccgtggtgggcctgtaccagaagagcagcctgaagctgctgtccttcctgttcagcaactatgctggagctgagactggagacagcggcggcagcaagaagggcggcaagaagaagggcagcagcttccagacagtgtctgctgtgttccgggagaacctgaacaagctgatgaccaacctgcggagcacccacccccactttgtgcgctgcctgatccccaatgagaccaagaccccaggagtgatggaccactacctggtgatgcaccagctgcgctgcaatggagtgctggagggcatccgcatctgcaggaagggcttccccagccgcatcctgtatgctgacttcaagcagcgctaccgcatcctgaatgccagcgccatccctgagggccagttcatcgacagcaagaatgccagcgagaagctgctgaacagcattgatgtggaccgggagcagttccgcttcggcaacaccaaggtgttcttcaaggccggcctgctgggcctgctggaggagatgagagatgagaagctggtgaccctgatgaccagcacccaggccgtgtgccggggctacctgatgagggtggagttcaagaagatgatggagcggcgggacagcatcttctgcatccagtacaacatccgctccttcatgaatgtgaagcactggccctggatgaacctcttcttcaagatcaagcccctgctgaagtctgctgaggccgagaaggagatggccaccatgaaggaggactttgagaggaccaaggaggagctggcccggtctgaggcccggaggaaggagctggaggagaagatggtgtccctgctgcaggagaagaatgacctgcagctgcaggtgcagagcgagacagagaacctgatggatgctgaggagcgctgtgagggcctcatcaagagcaagatcctgctggaggccaaggtgaaggagctgacagagcggctggaggaggaggaggagatgaacagcgagctggtggccaagaagaggaacctggaggacaagtgcagcagcctgaagagggacattgatgacctggagctgaccctgaccaaggtggagaaggagaagcacgccacagagaacaaggtgaagaacctgtctgaggagatgacagccctggaggagaacatcagcaagctgaccaaggagaagaagagcctgcaggaggcccaccagcagaccctggatgacctgcaggtggaggaggacaaggtgaatggcctcatcaagatcaatgccaagctggagcagcagacagatgacctggagggcagcctggagcaggagaagaagctgcgggctgacctggagcgggccaagaggaagctggagggggacctgaagatgagccaggagagcatcatggacctggagaatgacaagcagcagatcgaggagaagctgaagaagaaggagtttgagctgagccagctgcaggccaagattgatgatgagcaggtgcacagcctgcagttccagaagaagatcaaggagctgcaggccagaattgaggagctggaggaggagattgaggccgagcacaccctgcgggccaagattgagaagcagaggagtgacctggcccgggagctggaggagatcagcgagcggctggaggaggccagcggggccaccagcgcccagatcgagatgaacaagaagcgggaggccgagttccagaagatgagaagagacctggaggaggccaccctgcagcacgaggccacagctgccaccctgaggaagaagcaggccgacagcgtggccgagctgggggagcagattgacaacctgcagagggtgaagcagaagctggagaaggagaagtctgagctgaagatggagattgatgacatggccagcaacatcgaggccctgagcaagagcaagagcaacattgaaagaacctgcaggacagtggaggaccagttcagcgagatcaaggccaaggatgagcagcagacccagctgattcatgacctgaacatgcagaaggcccggctgcagacccagaatggagagctgagccaccgggtggaggagaaggagagcctcatcagccagctgaccaagagcaagcaggccctgacccagcagctggaggagctgaagaggcagatggaggaggagaccaaggccaagaatgccatggcccacgccctgcagagcagcagacatgactgtgacctgctgcgggagcagtatgaggaggagcaggaggccaaggccgagctgcagagggccctgagcaaggccaacagcgaggtggcccagtggaggaccaagtatgaaacagatgccatccagaggacagaggagctggaggaggccaagaagaagctggcccagaggctgcaggaggccgaggagaacacagaaacagccaacagcaaatgtgccagcctggagaagaccaagcagaggctgcagggcgaggtggaggacctgatgagggacctggagaggagccacacagcctgtgccaccctggacaagaagcagaggaactttgacaaggtgctggccgagtggaagcagaagctggatgagagccaggccgagctggaggccgcccagaaggagagccgcagcctgagcacagagctgttcaagatgagaaatgcctatgaggaggtggtggaccagctggagaccctgcggcgggagaacaagaacctgcaggaggagatcagtgacctgacagagcagattgctgagaccgggaagaacctgcaggaggccgagaagaccaagaagctggtggagcaggagaagagtgacctgcaggtggccctggaggaggtggagggcagcctggagcacgaggagagcaagatcctgcgggtgcagctggagctgagccaggtgaagtctgagctggacaggaaggtgattgagaaggatgaggagattgagcagctgaagaggaacagccagagagctgctgaggccctgcagagcgtgctggatgctgagatccgcagcagaaatgatgccctgcggctgaagaagaagatggagggggacctgaatgagatggagatccagctgggccacagcaaccggcagatggccgagacccagaagcacctgaggacagtgcagggccagctgaaggacagccagctgcacctggatgatgccctgcggagcaatgaagacctgaaggagcagctggccatcgtggagaggagaaatggcctgctgctggaggagctggaggagatgaaggtggccctggagcagacagagaggacccggcggctgtctgagcaggagctgctggatgccagtgacagagtgcagctgctgcacagccagaacaccagcctcatcaacaccaagaagaagctggaggccgacatcgcccagtgccaggccgaggtggagaacagcatccaggagagcagaaatgctgaggagaaggccaagaaggccatcacagatgctgccatgatggccgaggagctgaagaaggagcaggacaccagcgcccacctggagaggatgaagaagaacctggagcagacagtgaaggacctgcagcaccggctggatgaggccgagcagctggccctgaagggcggcaagaagcagatccagaagctggagaacagagtgcgggagctggagaatgagctggatgtggagcagaagagaggagctgaggccctgaagggggcccacaagtatgaaaggaaggtgaaggagatgacctaccaggccgaggaggaccacaagaacatcctgcggctgcaggacctggtggacaagctgcaggccaaggtgaagagctacaagaggcaggccgaggaggccgaggagcaggccaacacccagctgagccgctgcagaagagtgcagcacgagctggaggaggccgctgagagagctgacattgctgagagccaggtgaacaagctgcgggccaagagcagagatgtgggcagccagaagatggaggagtag

SEQ ID NO: 140900 - DNA, 2001 bp, Artificial Sequence
  derived and/or modified sequence
atgctgagccacatgctgtacaagaaggaaaatgccatcgacatcctgggcttcagcagcgaggagaaggtgggcatctacaagctgaccggggctgtgatgcactacggcaacatgaagttcaagcagaagcagcgggaggagcaggccgagccagatggaacagaggtggccgacaaggccggctacctgatgggcctgaacagcgctgagatgctgaagggcctgtgctgcccccgggtgaaggtgggcaatgaatatgtgaccaagggccagaatgtgcagcaggtgaccaacagcgtgggcgccctggccaaggctgtgtatgagaagatgttcctgtggatggtgacccgcatcaaccagcagctggacaccaagcagccccggcagtacttcatcggcgtgctggacattgctggctttgagatctttgacttcaacagcctggagcagctgtgcatcaacttcaccaatgagaagctgcagcagttcttcaaccaccacatgtttgtgctggagcaggaggagtacaagaaggagggcatcgagtgggagttcatcgactttggcatggacctggccgcctgcatcgagctgattgagaagcccatgggcatcttcagcatcctggaggaggagtgcatgttccccaaggccacagacaccagcttcaagaacaagctgtatgaccagcacctgggcaagagcaacaacttccagaagcccaagccagccaagggcaaggccgaggcccacttcagcctggtgcactacgccggcaccgtggactacaacattgctggctggctggacaagaacaaggaccccctgaatgaaacagtggtgggcctgtaccagaagagcagcctgaagctgctgtccttcctgttcagcaactatgctggagctgagaccggggacagcggcggcagcaagaagggcggcaagaagaagggcagcagcttccagacagtgtctgctgtgttccgggagaacctgaacaagctgatgaccaacctgcggagcacccacccccactttgtgcgctgcctgatccccaatgagaccaagaccccaggagtgatggaccactacctggtgatgcaccagctgcgctgcaatggagtgctggagggcatccgcatctgcaggaagggcttccccagccgcatcctgtatgctgacttcaagcagcgctaccgcatcctgaatgccagcgccatccctgagggccagttcatcgacagcaagaatgccagcgagaagctgctgaacagcattgatgtggaccgggagcagttccgctttggaaacaccaaggtgttcttcaaggccggcctgctgggcctgctggaggagatgagagatgagaagctggtgaccctgatgaccagcacccaggccgtgtgccggggctacctgatgagggtggagttcaagaagatgatggagcggcgggacagcatcttctgcatccagtacaacatccgctccttcatgaatgtgaagcactggccctggatgaacctcttcttcaagatcaagcccctgctgaagtctgctgaggccgagaaggagatggccaccatgaaggaggactttgagaggaccaaggaggagctggcccggtctgaggcccggaggaaggagctgacagagcggctggaggaggaggaggagatgaacagcgagctggtggccaagaagaggaacctggaggacaagtgcagcagcctgaagagggacattgatgacctggagctgaccctgaccaaggtggagaaggagaagcacgccacagagaacaaggtgaagaacctgtctgaggagatgacagccctggaggagaacatcagcaagctgaccaaggagaagaagagcctgcaggaggcccaccagcagaccctggatgacctgcaggtggaggaggacaaggtgaatggcctcatcaagatcaatgccaagctggagcagcagacagatgatgaaggagtgtag

SEQ ID NO: 140901 - DNA, 6222 bp, Artificial Sequence
  derived and/or modified sequence
aaattgctgtgaccgcagcatctctaggaagacgctttattcctgaaggacactgactgtcacttgggaaccaagaagccctctgcagtcatgagctctgacgcagaaatggccatttttggagaagcagctccctacctccggaaaccagagaaggagagaatcgaggctcaaaatcgtccattcgattccaagaaagcctgctttgtagcggataataaggaaatgtatgtgaaaggcatgatccagactagggaaaatgacaaagtcatagtcaagaccctcgatgaccggatgctcactctgaacaatgaccaggtcttccccatgaaccctcccaaatttgacaagatcgaggacatggccatgatgactcacctgcatgaacctgctgttctgtacaacctcaaagagcgctatgcagcctggatgatctacacctactcaggcctcttctgtgtcaccgtcaacccctacaagtggctgccggtgtacaagcccgaggtggtggctgcctacagaggcaaaaagcgccaggaggccccgccccacatcttctccatctctgacaatgcctatcagttcatgctgactgatcgagacaaccagtctatcctcatcaccggagaatccggggctgggaagactgtgaacaccaagcgtgtcatccagtattttgcaacaattgcagttaccggggacaagaagaaggagacacagccaggcaaaatgcagggaaccctagaggatcagatcatccaggccaacccactgctggaggcctttggaaatgccaagactgtgaggaatgacaactcctcaagatttgggaagttcattcggattcattttggagccacaggaaagctggcatcggcagacatcgaaacttatctgttagaaaaatccagagtgacgtttcaattatccagtgagagaagctatcatattttctaccaaattatgtcaaacaagaagccagaactaattgacctgcttctgatctccaccaaccccttcgacttccccttcgtgagccaaggagaggtcacggtagccagtatcgatgacagtgaagaactgctggcgacagataatgccattgacatcctgggcttcagctcagaggagaaagtcgggatctacaaactgacgggagccgtgatgcattatgggaacatgaagttcaagcagaagcagcgtgaggagcaggcggagccagacggcaccgaagtggctgacaaagccggatacctgatgggactgaattctgcagaaatgctgaagggcctgtgctgtccaagggtgaaggttggcaatgaatatgtcactaaagggcaaaatgtccagcaggtgaccaattcggtgggtgctctggccaaagccgtctacgagaagatgttcctgtggatggtcacccgcatcaaccagcagctggacaccaagcagcccaggcagtacttcatcggggtcttggacattgctggctttgagatctttgatttcaacagcctggagcagctgtgcatcaacttcaccaatgagaaactgcaacagtttttcaaccaccacatgttcgtgctggagcaggaagagtacaagaaggaaggcatcgagtgggagttcattgacttcggaatggacctggctgcctgcatcgagctcatcgagaagcctatgggcatcttctccatcctggaagaggagtgcatgttccccaaggcaacagacacctccttcaagaacaagctgtatgaccagcatcttggaaaatccaacaacttccagaagcccaagcctgccaaaggcaaggctgaggctcacttctcgctggtgcactatgccggcaccgtggactacaacatcgccggctggctggacaaaaacaaggaccccctgaacgagactgtggtggggctgtaccagaagtcttcgctgaagcttctctccttccttttttccaactatgctggtgcagagacaggcgactccggaggaagcaagaagggcgggaagaagaagggctcctctttccagaccgtgtcggccgtgttcagggaaaatttaaacaaattgatgactaacttaaggagcacccaccctcactttgtacgatgtctgattcccaatgagaccaagactcctggtgtgatggaccactacttggtcatgcaccagctgcgctgtaacggggtcctcgagggcatccggatttgcaggaagggattccccagccggatcctctatgctgacttcaagcagcggtaccggatcctcaatgccagtgctatccctgaagggcagttcattgacagcaaaaatgcctcagagaagctcctcaactccatcgatgtggaccgggagcagttcaggttcggcaacaccaaggtgtttttcaaagctgggctcctgggacttttggaggagatgagagatgagaagctggtgacgctgatgacaagcacgcaggcggtgtgcagggggtacctgatgcgggtggagttcaagaagatgatggagaggagggactccatcttctgcatccagtacaacatccgctcttttatgaacgtcaagcactggccctggatgaacctgttcttcaaaatcaagcccctgctgaagagtgcagaggccgagaaggagatggccaccatgaaggaagactttgagaggaccaaggaagaactggcccgatctgaggctcgccggaaggagctggaggagaaaatggtctccctcctgcaggagaagaatgacctccaattgcaggtccagtctgaaacagaaaatctgatggacgctgaggaacggtgtgaaggactcatcaaaagcaagatcctactggaagcaaaagtcaaggagctgacggagagattggaagaggaagaggagatgaattctgaattggttgccaagaagaggaatctggaagataaatgctcctctctcaagagagacattgatgacctggagctgaccttgacgaaagttgaaaaggagaagcatgccacagagaacaaggtaaagaatctttccgaagaaatgacagcacttgaagaaaacatttccaaattgaccaaagaaaagaaatctctacaggaggcccatcagcaaacactggatgatcttcaggtggaagaagataaagtcaatggtctaatcaaaataaatgccaagcttgaacagcaaacagatgatcttgagggttccttagagcaggagaagaaactgcgggcggacttggaaagggcgaagaggaagctggaaggagatctgaaaatgtcccaggaatccattatggatctagaaaatgacaagcagcaaatagaagagaaattgaaaaagaaggagtttgaactcagtcagttacaagccaaaatagatgacgaacaagtccacagtttgcagtttcaaaagaagattaaagaactgcaagcccgcatagaagagctggaggaggaaattgaagcggaacacacgctcagagccaagattgagaagcagcgctcagatctggccagggaactggaggagatcagcgagaggctggaagaagccagtggggccacttcagcccagattgagatgaacaagaagagggaggctgagttccagaaaatgcgcagggacctggaggaggccaccctgcagcacgaagccacagcagccaccctgaggaagaagcaagcagatagtgtggccgagcttggggagcagattgacaacctgcagcgggtgaagcagaagctggagaaggagaagagcgagctgaagatggagattgacgacatggccagcaacatcgaggctctctccaagtcaaagagtaacatagaaagaacgtgccggacggtagaagatcaatttagtgaaatcaaagccaaggacgagcaacagacacagttgatccatgatctgaacatgcagaaagcaagactgcagacccaaaatggggagctgagccaccgagtggaagagaaggagtctctgatttcacagctgaccaaaagcaagcaggccctcacccagcagctggaggagcttaagaggcaaatggaagaagaaaccaaggccaagaacgccatggcgcacgccctgcagtcctcccgccacgactgtgacctgctgcgggaacagtatgaggaggagcaggaagccaaggccgagctgcagagggcgctgtccaaggccaacagtgaggttgcccagtggaggaccaaatacgagacggacgccattcagcgcacagaggagctggaggaggccaagaaaaaactggcccagaggctccaggaagcagaggagaacacggagacggcgaactccaagtgcgcatcgttggagaaaaccaagcagaggctgcagggagaggtggaggatctgatgcgggatctggagcgctcccacaccgcctgtgccacactggacaagaagcagaggaacttcgacaaggtccttgcagagtggaagcaaaagctggacgaaagccaggctgagttggaagctgctcagaaggagtccaggtcactcagcactgaactcttcaagatgaggaatgcctatgaggaggtggtggaccagttagagacactgaggcgagagaacaaaaatctgcaagaagagatttccgacttaactgagcagattgcagaaactggcaagaatcttcaggaagcggaaaagaccaagaagctagtggagcaggaaaagtcagatctgcaggtcgccttagaagaagtggagggttccttggaacacgaggagagcaagatcttgcgcgtgcagctagagctgagccaggtgaaatccgagctagaccgcaaggtcattgagaaggatgaagaaatcgagcagctaaaaagaaacagccagcgggcagcagaggccctgcagagcgtgctggatgctgaaatccgcagccggaacgacgccctgaggctaaagaagaagatggagggagaccttaatgagatggagattcagctgggccactccaaccgccagatggcagagacccagaagcatctgcgcacggtccagggccagctcaaggactcccagctgcatctcgatgacgccctgaggagcaatgaggacctcaaggagcagctggccatcgtggagcgcaggaatggcctcctgctggaggagctggaggaaatgaaggtggccctggaacagacggagcggacccgcaggctgtcagagcaggagctgctggacgccagcgaccgcgtgcagctcctgcactcccagaacacaagcctgataaataccaagaaaaaactggaggctgacatagctcagtgccaggcagaggtggagaactcgatccaggagtccaggaacgcagaggagaaggccaagaaggccatcacggatgctgccatgatggctgaggagctaaagaaggaacaggacaccagcgcccacctggagcggatgaagaagaacctggagcagacggtgaaggacctgcagcaccgtctagatgaggctgaacaactggcgctgaagggcgggaagaagcagatccagaaactggagaaccgggtgcgggagctggaaaatgagcttgatgtggaacagaagaggggagctgaagccctgaagggagcccacaagtacgaacgcaaagtcaaggagatgacttaccaggctgaggaggaccacaagaatatccttaggctccaggacctggtggacaagctgcaggccaaagtgaagtcttacaagaggcaggctgaggaggcggaggagcaggccaacacgcagctgtccagatgccggagagtccagcatgagctagaggaggccgcggagagggcggacatcgctgagtcccaggtcaacaagctgagggccaagagccgagacgtgggcagccagaagatggaagaatgaggctcacctgatgctcgttgccatgggacacctccgagagagtggagggaaaatgtgtgagaaataaattctcctaaatactcggattcccggctctgctgtgtttattatcatggtccattcctcttctatgaagctgatatttagattcttgctgctctatcgtaaatataaaataaggaatgtgaaagtggaggatctttgctccaagtagaaaacatggaaatccaacccatggccagattctccttttcatctcatcaccagcccaccccaaatgcctttgacacagtggggttggaaattgaggaggat

SEQ ID NO: 140902 - DNA, 5992 bp, Artificial Sequence
  derived and/or modified sequence
aaattgctgtgaccgcagcatctctaggaagacgctttattcctgaaggacactgactgtcacttgggaaccaagaagccctctgcagtcatgagctctgacgcagaaatggccatttttggagaagcagctccctacctccggaaaccagagaaggagagaatcgaggctcaaaatcgtccattcgattccaagaaagcctgctttgtagcggataataaggaaatgtatgtgaaaggcatgatccagactagggaaaatgacaaagtcatagtcaagaccctcgatgaccggatgctcactctgaacaatgaccaggtcttccccatgaaccctcccaaatttgacaagatcgaggacatggccatgatgactcacctgcatgaacctgctgttctgtacaacctcaaagagcgctatgcagcctggatgatctacacctactcaggcctcttctgtgtcaccgtcaacccctacaagtggctgccggtgtacaagcccgaggtggtggctgcctacagaggcaaaaagcgccaggaggccccgccccacatcttctccatctctgacaatgcctatcagttcatgctgactgatcgagacaaccagtctatcctcatcaccggagaatccggggctgggaagactgtgaacaccaagcgtgtcatccagtattttgcaacaattgcagttaccggggacaagaagaaggagacacagccaggcaaaatgcagggaaccctagaggatcagatcatccaggccaacccactgctggaggcctttggaaatgccaagactgtgaggaatgacaactcctcaagatttgggaagttcattcggattcattttggagccacaggaaagctggcatcggcagacatcgaaacttatctgttagaaaaatccagagtgacgtttcaattatccagtgagagaagctatcatattttctaccaaattatgtcaaacaagaagccagaactaattgacctgcttctgatctccaccaaccccttcgacttccccttcgtgagccaaggagaggtcacggtagccagtatcgatgacagtgaagaactgctggcgacagataatgccattgacatcctgggcttcagctcagaggagaaagtcgggatctacaaactgacgggagccgtgatgcattatgggaacatgaagttcaagcagaagcagcgtgaggagcaggcggagccagacggcaccgaagtggctgacaaagccggatacctgatgggactgaattctgcagaaatgctgaagggcctgtgctgtccaagggtgaaggttggcaatgaatatgtcactaaagggcaaaatgtccagcaggtgaccaattcggtgggtgctctggccaaagccgtctacgagaagatgttcctgtggatggtcacccgcatcaaccagcagctggacaccaagcagcccaggcagtacttcatcggggtcttggacattgctggctttgagatctttgatttcaacagcctggagcagctgtgcatcaacttcaccaatgagaaactgcaacagtttttcaaccaccacatgttcgtgctggagcaggaagagtacaagaaggaaggcatcgagtgggagttcattgacttcggaatggacctggctgcctgcatcgagctcatcgagaagcctatgggcatcttctccatcctggaagaggagtgcatgttccccaaggcaacagacacctccttcaagaacaagctgtatgaccagcatcttggaaaatccaacaacttccagaagcccaagcctgccaaaggcaaggctgaggctcacttctcgctggtgcactatgccggcaccgtggactacaacatcgccggctggctggacaaaaacaaggaccccctgaacgagactgtggtggggctgtaccagaagtcttcgctgaagcttctctccttccttttttccaactatgctggtgcagagacaggcgactccggaggaagcaagaagggcgggaagaagaagggctcctctttccagaccgtgtcggccgtgttcagggaaaatttaaacaaattgatgactaacttaaggagcacccaccctcactttgtacgatgtctgattcccaatgagaccaagactcctggtgtgatggaccactacttggtcatgcaccagctgcgctgtaacggggtcctcgagggcatccggatttgcaggaagggattccccagccggatcctctatgctgacttcaagcagcggtaccggatcctcaatgccagtgctatccctgaagggcagttcattgacagcaaaaatgcctcagagaagctcctcaactccatcgatgtggaccgggagcagttcaggttcggcaacaccaaggtgtttttcaaagctgggctcctgggacttttggaggagatgagagatgagaagctggtgacgctgatgacaagcacgcaggcggtgtgcagggggtacctgatgcgggtggagttcaagaagatgatggagaggagggactccatcttctgcatccagtacaacatccgctcttttatgaacgtcaagcactggccctggatgaacctgttcttcaaaatcaagcccctgctgaagagtgcagaggccgagaaggagatggccaccatgaaggaagactttgagaggaccaaggaagaactggcccgatctgaggctcgccggaaggagctggaggagaaaatggtctccctcctgcaggagaagaatgacctccaattgcaggtccagtctgaaacagaaaatctgatggacgctgaggaacggtgtgaaggactcatcaaaagcaagatcctactggaagcaaaagtcaaggagctgacggagagattggaagaggaagaggagatgaattctgaattggttgccaagaagaggaatctggaagataaatgctcctctctcaagagagacattgatgacctggagctgaccttgacgaaagttgaaaaggagaagcatgccacagagaacaaggtaaagaatctttccgaagaaatgacagcacttgaagaaaacatttccaaattgaccaaagaaaagaaatctctacaggaggcccatcagcaaacactggatgatcttcaggtggaagaagataaagtcaatggtctaatcaaaataaatgccaagcttgaacagcaaacagatgatcttgagggttccttagagcaggagaagaaactgcgggcggacttggaaagggcgaagaggaagctggaaggagatctgaaaatgtcccaggaatccattatggatctagaaaatgacaagcagcaaatagaagagaaattgaaaaagaaggagtttgaactcagtcagttacaagccaaaatagatgacgaacaagtccacagtttgcagtttcaaaagaagattaaagaactgcaagcccgcatagaagagctggaggaggaaattgaagcggaacacacgctcagagccaagattgagaagcagcgctcagatctggccagggaactggaggagatcagcgagaggctggaagaagccagtggggccacttcagcccagattgagatgaacaagaagagggaggctgagttccagaaaatgcgcagggacctggaggaggccaccctgcagcacgaagccacagcagccaccctgaggaagaagcaagcagatagtgtggccgagcttggggagcagattgacaacctgcagcgggtgaagcagaagctggagaaggagaagagcgagctgaagatggagattgacgacatggccagcaacatcgaggctctctccaagtcaaagagtaacatagaaagaacgtgccggacggtagaagatcaatttagtgaaatcaaagccaaggacgagcaacagacacagttgatccatgatctgaacatgcagaaagcaagactgcagacccaaaatggggagctgagccaccgagtggaagagaaggagtctctgatttcacagctgaccaaaagcaagcaggccctcacccagcagctggaggagcttaagaggcaaatggaagaagaaaccaaggccaagaacgccatggcgcacgccctgcagtcctcccgccacgactgtgacctgctgcgggaacagtatgaggaggagcaggaagccaaggccgagctgcagagggcgctgtccaaggccaacagtgaggttgcccagtggaggaccaaatacgagacggacgccattcagcgcacagaggagctggaggaggccaagaaaaaactggcccagaggctccaggaagcagaggagaacacggagacggcgaactccaagtgcgcatcgttggagaaaaccaagcagaggctgcagggagaggtggaggatctgatgcgggatctggagcgctcccacaccgcctgtgccacactggacaagaagcagaggaacttcgacaaggtccttgcagagtggaagcaaaagctggacgaaagccaggctgagttggaagctgctcagaaggagtccaggtcactcagcactgaactcttcaagatgaggaatgcctatgaggaggtggtggaccagttagagacactgaggcgagagaacaaaaatctgcaagaagagatttccgacttaactgagcagattgcagaaactggcaagaatcttcaggaagcggaaaagaccaagaagctagtggagcaggaaaagtcagatctgcaggtcgccttagaagaagtggagggttccttggaacacgaggagagcaagatcttgcgcgtgcagctagagctgagccaggtgaaatccgagctagaccgcaaggtcattgagaaggatgaagaaatcgagcagctaaaaagaaacagccagcgggcagcagaggccctgcagagcgtgctggatgctgaaatccgcagccggaacgacgccctgaggctaaagaagaagatggagggagaccttaatgagatggagattcagctgggccactccaaccgccagatggcagagacccagaagcatctgcgcacggtccagggccagctcaaggactcccagctgcatctcgatgacgccctgaggagcaatgaggacctcaaggagcagctggccatcgtggagcgcaggaatggcctcctgctggaggagctggaggaaatgaaggtggccctggaacagacggagcggacccgcaggctgtcagagcaggagctgctggacgccagcgaccgcgtgcagctcctgcactcccagaacacaagcctgataaataccaagaaaaaactggaggctgacatagctcagtgccaggcagaggtggagaactcgatccaggagtccaggaacgcagaggagaaggccaagaaggccatcacggatgctgccatgatggctgaggagctaaagaaggaacaggacaccagcgcccacctggagcggatgaagaagaacctggagcagacggtgaaggacctgcagcaccgtctagatgaggctgaacaactggcgctgaagggcgggaagaagcagatccagaaactggagaaccgggtgcgggagctggaaaatgagcttgatgtggaacagaagaggggagctgaagccctgaagggagcccacaagtacgaacgcaaagtcaaggagatgacttaccaggctgaggaggaccacaagaatatccttaggctccaggacctggtggacaagctgcaggccaaagtgaagtcttacaagaggcaggctgaggaggcggaggagcaggccaacacgcagctgtccagatgccggagagtccagcatgagctagaggaggccgcggagagggcggacatcgctgagtcccaggtcaacaagctgagggccaagagccgagacgtgggcagccagaagatggaagaatgaggctcacctgatgctcgttgccatgggacacctccgagagagtggagggaaaatgtgtgagaaataaattctcctaaatactcgg

SEQ ID NO: 140903 - DNA, 2221 bp, Artificial Sequence
  derived and/or modified sequence
acttatttgggcaaatgctgtctcatatgctatacaaaaaagagaatgccattgacatcctgggcttcagctcagaggagaaagtcgggatctacaaactgacgggagccgtgatgcattatgggaacatgaagttcaagcagaagcagcgtgaggagcaggcggagccagacggcaccgaagtggctgacaaagccggatacctgatgggactgaattctgcagaaatgctgaagggcctgtgctgtccaagggtgaaggttggcaatgaatatgtcactaaagggcaaaatgtccagcaggtgaccaattcggtgggtgctctggccaaagccgtctacgagaagatgttcctgtggatggtcacccgcatcaaccagcagctggacaccaagcagcccaggcagtacttcatcggggtcttggacattgctggctttgagatctttgatttcaacagcctggagcagctgtgcatcaacttcaccaatgagaaactgcaacagtttttcaaccaccacatgttcgtgctggagcaggaagagtacaagaaggaaggcatcgagtgggagttcattgacttcggaatggacctggctgcctgcatcgagctcatcgagaagcctatgggcatcttctccatcctggaagaggagtgcatgttccccaaggcaacagacacctccttcaagaacaagctgtatgaccagcatcttggaaaatccaacaacttccagaagcccaagcctgccaaaggcaaggctgaggctcacttctcgctggtgcactatgccggcaccgtggactacaacatcgccggctggctggacaaaaacaaggaccccctgaacgagactgtggtggggctgtaccagaagtcttcgctgaagcttctctccttccttttttccaactatgctggtgcagagacaggcgactccggaggaagcaagaagggcgggaagaagaagggctcctctttccagaccgtgtcggccgtgttcagggaaaatttaaacaaattgatgactaacttaaggagcacccaccctcactttgtacgatgtctgattcccaatgagaccaagactcctggtgtgatggaccactacttggtcatgcaccagctgcgctgtaacggggtcctcgagggcatccggatttgcaggaagggattccccagccggatcctctatgctgacttcaagcagcggtaccggatcctcaatgccagtgctatccctgaagggcagttcattgacagcaaaaatgcctcagagaagctcctcaactccatcgatgtggaccgggagcagttcaggttcggcaacaccaaggtgtttttcaaagctgggctcctgggacttttggaggagatgagagatgagaagctggtgacgctgatgacaagcacgcaggcggtgtgcagggggtacctgatgcgggtggagttcaagaagatgatggagaggagggactccatcttctgcatccagtacaacatccgctcttttatgaacgtcaagcactggccctggatgaacctgttcttcaaaatcaagcccctgctgaagagtgcagaggccgagaaggagatggccaccatgaaggaagactttgagaggaccaaggaagaactggcccgatctgaggctcgccggaaggagctgacggagagattggaagaggaagaggagatgaattctgaattggttgccaagaagaggaatctggaagataaatgctcctctctcaagagagacattgatgacctggagctgaccttgacgaaagttgaaaaggagaagcatgccacagagaacaaggtaaagaatctttccgaagaaatgacagcacttgaagaaaacatttccaaattgaccaaagaaaagaaatctctacaggaggcccatcagcaaacactggatgatcttcaggtggaagaagataaagtcaatggtctaatcaaaataaatgccaagcttgaacagcaaacagatgatgaaggagtttgaactcagtcagttacaagccaaaatagatgacgaacaagtccacagtttgcagtttcaaaagaagattaaagaactgcaagtaaaagcatcaaaaccttcccaatcatgacaatccctttgcaagagcgcccctcctcactccttcccccttgtttctttagctgcttctttccttcctcctgctaaagctagagaagatgtcctgt

SEQ ID NO: 140904 - DNA, 5817 bp, Artificial Sequence
  derived and/or modified sequence
atgagcagcgacgccgagatggccatcttcggcgaggccgccccctatcttagaaaacctgaaaaggagcgaattgaggcacaaaaccggcccttcgatagcaagaaggcctgcttcgtcgccgacaacaaggaaatgtatgttaaaggcatgattcagacccgggaaaacgacaaggtgatagttaaaacactggatgaccggatgctcactttgaataatgatcaagtttttcctatgaaccctccgaagtttgacaagattgaggatatggccatgatgacgcatctgcacgagcctgcagttctctataacttgaaagagcggtacgcagcctggatgatctacacatactctggcctattctgtgttactgtaaacccatataaatggctgccggtctacaagccagaagtggtagcggcctacagagggaagaaaagacaggaggcgcccccccatatctttagcattagcgacaatgcatatcagtttatgctgaccgaccgcgacaatcaatcaatactcatcacaggcgagtccggagcaggcaagactgtgaacacaaagcgtgttatccaatactttgccaccatcgccgtgaccggggacaaaaaaaaagagacacaacctgggaaaatgcagggcacactggaagaccagataattcaggcaaaccccctactggaggcgtttggtaatgcgaaaacagtgagaaatgacaattcgtcgcgatttgggaagtttattagaatccacttcggggcgacagggaagcttgcctccgctgatattgaaacgtaccttctggagaaaagcagggttactttccaacttagctctgagcggtcatatcacatcttctaccaaatcatgagcaacaagaagccagagttgatcgatttgctgctgatttctaccaatccctttgatttccccttcgtctctcaaggcgaggttacagttgcatccatcgacgattcagaagaactgctggcgacggataacgctatagacatcttaggattctcttctgaggagaaagtaggtatttataaattaacaggagctgtcatgcactacggtaacatgaaattcaagcagaaacaaagagaggagcaagcagaacccgacggaaccgaggtagcggacaaggccggctatctgatgggactgaactctgccgagatgctgaaggggctgtgctgtccgagggtgaaagtgggtaatgaatacgtgacgaagggacaaaatgtccagcaggtcacaaatagcgtcggcgcgcttgcgaaagctgtgtacgagaagatgtttctgtggatggtcaccaggatcaatcagcaactggacactaaacagcctaggcagtacttcattggtgtcttggacatagctggatttgagatttttgactttaattcgctagagcagctatgcatcaacttcaccaacgagaagcttcagcagttttttaaccaccacatgtttgtgcttgaacaagaggaatacaaaaaagaaggcattgaatgggaattcatcgattttggcatggacctcgcagcctgcatagagctgattgaaaagccaatggggattttttcaattttggaagaggagtgcatgttccccaaagctacggatacctcttttaaaaataagttatatgatcagcatctgggcaaatcaaataatttccagaaaccaaagcctgcaaaaggcaaggcggaagcacacttctctttagtccactacgctggcaccgtggactacaacatcgcgggatggttggacaagaacaaggaccccttgaatgaaactgtggtgggcctgtatcaaaaaagtagcctcaagctgctgagctttctttttagcaattatgccggggctgagacgggcgatagtggtggttccaagaagggtggcaaaaaaaaaggtagtagcttccaaaccgtatctgcggtcttccgcgaaaacctaaacaagttaatgacgaaccttagatccacccaccctcattttgtgagatgtcttattcctaacgaaacaaaaacacccggagtgatggaccattatctggtgatgcatcagttgcgttgcaacggagtgctcgagggcatccgcatttgtagaaaggggttcccctctcgtatactgtacgcggacttcaaacagagatatcggattttaaatgcgtcagccattcccgaaggccagttcattgatagcaaaaatgctagcgagaagctgctgaactctatcgacgtagatcgcgagcagttccgctttgggaatactaaagttttcttcaaagccggcctactggggctgctcgaggagatgagagacgaaaagttagtaaccctcatgacttctacccaggcagtttgtagggggtatctgatgagggtggagtttaagaagatgatggagcgtcgggacagtattttctgtattcagtataacatccgctcattcatgaatgtgaagcactggccttggatgaatctttttttcaagatcaaacccttgctaaagagtgccgaagcagagaaagagatggccaccatgaaagaggacttcgagcggactaaggaagaactcgctcgaagcgaagcacggcggaaagagttggaggagaaaatggtgagcctcttgcaggagaagaacgacctccagcttcaggtgcagagcgaaacggaaaaccttatggatgccgaggaacggtgcgagggcctgatcaagtctaaaattctgcttgaggcgaaagtcaaggagctgaccgaacgtctggaagaagaagaggagatgaatagcgaactcgtggctaagaagcgcaacctggaggacaaatgctcctccctcaaaagagatatagacgatcttgaactcaccctgaccaaggtcgagaaggagaaacacgctaccgaaaacaaagtgaagaatctttctgaagagatgacagctctcgaggagaatatctctaagctcacaaaagagaagaagtccctccaggaagcacatcagcagacactggatgacctgcaggtcgaagaagataaagtgaacggtctgattaagattaatgctaagttagaacagcagaccgatgatctggaagggtctctcgagcaagagaagaagctgcgggcagacctggaacgagccaagagaaagcttgagggcgacctgaaaatgtcacaggaaagcatcatggatctggagaatgacaaacagcaaattgaagagaaactgaagaaaaaggagtttgagttaagtcagttacaagcaaaaatagacgacgagcaggtgcacagcctgcagttccaaaagaagataaaggaattacaagctcgaattgaggagctcgaggaagagattgaagctgaacacacactccgtgccaaaattgaaaagcagcggtcggatttggcccgagagttggaggaaatcagcgagaggctggaggaagcgtcgggagccacgagtgcgcagattgagatgaacaaaaagcgggaggccgaatttcagaagatgcgacgcgatttggaggaggctacactgcagcacgaggccacggctgccactctgaggaagaagcaagccgattccgtggccgagttgggagaacagatcgataacctgcagagggtgaagcaaaagctggagaaggagaagagtgagttgaagatggagatcgacgacatggcctccaatatcgaggctctgtccaaatccaaatccaatatcgagcgcacttgcaggaccgtggaagaccagttttccgagatcaaagccaaagacgagcagcaaacgcagctcatccacgatttgaacatgcaaaaagcccgactgcagactcaaaatggggagctgagtcatcgcgtcgaagaaaaagaatccctgatatctcaactgacgaaaagtaagcaagccttgacccaacagttggaggaactcaagcgccagatggaagaggaaacaaaagcaaaaaatgccatggctcatgccctgcaatctagtagacacgattgtgaccttctgagagagcaatatgaggaggaacaggaagcaaaagcagaactccagcgcgcgctttccaaagcgaacagcgaagttgcgcagtggaggacaaagtatgagaccgatgcgatccagagaactgaggagctggaggaggctaaaaaaaagctggctcagcggctccaggaagctgaggagaacactgagacagctaacagtaaatgtgcaagtctggagaaaaccaagcagagacttcagggggaagttgaggatttaatgcgcgacttagagcgaagccacaccgcatgtgccacgcttgacaagaagcagcgcaatttcgataaggtgctggccgaatggaaacagaagctggacgagtcacaagcagagctggaagccgctcagaaggagtcaaggtccctcagcaccgaactgtttaagatgcgtaatgcctatgaagaagtggtggaccaactcgaaacccttaggagggagaacaagaatctccaggaggagattagcgacctgacagagcagatcgccgagaccggtaagaatttacaagaggctgagaaaacgaaaaagttggttgaacaggagaaaagcgatctccaggtggctcttgaagaggtggagggaagcctagaacacgaggaatccaaaattcttcgcgtgcaactggagttatctcaggtgaagagcgaactggacaggaaggtgattgagaaggacgaggagattgaacagttgaagagaaactcacagcgagctgctgaggcactccagtcagtcctggacgccgagattaggagtcggaacgacgcgctcaggctcaagaaaaagatggagggggacctgaatgaaatggagatccagctggggcactccaatagacagatggcagagacacaaaagcacttgagaacggttcagggacagctcaaagactcccagctacacctagacgacgcactgagatccaacgaagatcttaaggagcagctggctatagtagaacgccgtaacgggctgttgcttgaggaactggaggagatgaaggtggccttagagcagaccgaacgcacacgtcgactatctgagcaggaactcctggacgcatccgacagagttcaactgctccattctcagaacacaagcctgataaacacgaagaagaagttggaggcagatatcgcccagtgccaggcagaggtggaaaactctatccaagaatcacgcaacgcggaggagaaggcgaagaaggccattacagacgcggccatgatggctgaagaactgaaaaaggaacaagacacatccgctcacctagagcgtatgaagaaaaatctcgaacaaaccgtgaaagacttgcagcataggctggacgaagctgagcaacttgcattaaagggcggcaaaaagcagattcagaagttggagaaccgcgttagggaactggaaaatgaactggacgttgagcagaagcgaggcgcagaagccctgaaaggggctcacaagtacgaaagaaaggtgaaagagatgacatatcaagccgaggaagaccataagaacatcctaaggcttcaagatctcgtggataagctgcaggctaaagtgaagagttataaacggcaggccgaagaggccgaggagcaggctaatactcaactcagcaggtgcaggagagtacaacacgagctagaagaggctgctgaacgggccgacatcgctgagagtcaggtaaataaactgcgtgccaagtcgcgtgacgtggggtctcaaaagatggaagagtag

SEQ ID NO: 140905 - DNA, 5817 bp, Artificial Sequence
  derived and/or modified sequence
atgagcagcgacgccgagatggccatcttcggcgaggccgccccctacctgcggaagcctgagaaagaaagaattgaggctcaaaatcgcccattcgactcaaagaaagcttgctttgtagctgacaacaaggagatgtacgtgaagggaatgattcaaacacgagagaatgacaaagtgatcgtgaaaacccttgatgataggatgctgacgcttaacaatgatcaggtctttccgatgaaccctcctaaattcgataaaatagaggatatggccatgatgacgcatctgcatgagccagccgtactctacaatcttaaggaacgttatgcagcctggatgatctatacatacagtggactgttctgcgttaccgtaaatccttacaagtggctccctgtttacaaaccagaggtcgtggccgcctataggggaaaaaagcgccaggaagcacctccacatatcttttctatctcagacaatgcatatcaattcatgctcaccgaccgggacaaccaatcaatcctaataaccggcgaaagcggcgctggcaagactgtcaacacaaagcgggtgatacaatacttcgccactattgctgtcaccggagacaaaaagaaggagacacagccggggaagatgcagggaacactggaagatcagatcattcaggcaaaccccttactggaagctttcggtaacgccaagacagtgagaaacgataacagcagccgcttcggcaagtttattcgtattcacttcggagctacaggcaaattggcctcggccgatatagaaacttacctgctcgaaaagtctcgcgtgacctttcagctttctagcgagagatcttatcatatcttttaccagattatgagtaataaaaaaccggagctgatagatctcttgttgatcagtaccaacccttttgatttcccatttgtcagccagggcgaagtcacagtagctagcattgatgactctgaggagttgctggccacagacaatgccatagatattttaggattttctagcgaggagaaagtgggtatatacaagctcactggcgctgtgatgcattatggaaatatgaaattcaaacagaagcagagggaggaacaggctgaacctgacggtaccgaggtggccgacaaagccgggtatctaatgggacttaatagtgccgagatgctgaaggggctgtgttgcccacgggtcaaagtgggcaatgagtacgtgaccaaggggcagaacgtgcagcaagttactaatagcgtgggtgcactcgccaaggccgtatacgagaaaatgttcttgtggatggtgacacgaatcaaccaacagttggataccaaacaaccaagacaatacttcattggagtactcgatatcgccggtttcgagatcttcgacttcaactccctcgaacagttatgtatcaactttacgaatgagaaattgcagcagttctttaaccatcacatgtttgtactggagcaagaggagtataagaaggaaggaattgagtgggagttcatcgacttcgggatggatctggcagcatgcatcgagctgattgaaaagcccatggggattttcagtatactagaggaggagtgtatgtttccaaaggctaccgacacttccttcaagaacaaactgtacgaccaacacctcggcaagtccaataatttccagaaaccaaagccggccaagggtaaagcggaagcccattttagcctcgttcactatgcaggaacagtggattacaacattgccggctggctggacaagaacaaagacccactcaacgagacagtagtgggcctctaccagaaaagctcgctgaaattattgagtttcttattttccaactatgcgggggccgagactggtgactctgggggaagcaaaaagggtggcaagaaaaagggcagcagcttccagaccgtcagcgccgtttttagagagaatctgaataagctcatgaccaacctgagatccactcacccccatttcgtgagatgcctgatccctaacgagacgaagactcctggtgtaatggatcactacctggtgatgcatcagttgcgttgcaatggggtgctcgaagggatccggatttgcagaaaaggattcccttcccgcatcctgtacgcagattttaaacaacgctatcgtatccttaacgcctcagctatccccgagggccagttcattgactctaaaaacgccagtgaaaagcttcttaactcgattgacgttgatagagagcagttcagatttgggaacacaaaggtgttcttcaaggcagggcttctgggcttgctggaggagatgagggatgagaaattagtcactctgatgacatcgacgcaggccgtgtgccggggttacctcatgagggtggaattcaagaaaatgatggagcgtcgtgattctattttttgtatccagtacaatataagatctttcatgaacgttaaacattggccctggatgaacttgttctttaaaataaagccacttttgaaatctgccgaggccgaaaaggaaatggctacaatgaaagaggactttgagcggacaaaggaagagctcgctaggtcagaagcacgccgtaaagagctggaggagaagatggtgtccctgttgcaggagaagaacgatctccagctacaggtgcagagtgagactgagaatctcatggacgcggaggaacgttgcgaagggctcatcaaaagtaagattttgctggaagctaaagtgaaggaactgaccgaacggctcgaggaagaggaagagatgaacagcgagctggtagctaaaaagcgcaacctggaggacaaatgtagtagtctgaagcgagacatagatgacttggagttaacactgacgaaagtggagaaggagaagcacgctaccgagaacaaggtgaaaaatctgagcgaagaaatgaccgcactggaagagaatatatcaaagctgaccaaagaaaaaaaaagcctgcaggaggcccaccagcagaccctggatgatctgcaggtcgaagaagataaggtgaacgggctgatcaaaataaatgcaaagctggaacagcaaactgatgacttagaggggagcctggagcaagaaaaaaagctgagagctgacttagaaagagcaaaaagaaagctggagggggacctgaaaatgtcacaggagtccatcatggatctggaaaatgataagcagcaaatagaggaaaagctcaagaaaaaggaattcgagctgtcccaactccaggcgaagattgacgatgagcaggtccactccctgcaattccaaaaaaagattaaggagctgcaggcacggatcgaagagctcgaggaagagatcgaggccgaacacacgctgcgggccaagattgaaaaacaaagaagtgacctggctagggaacttgaggagatcagtgagcgcttagaggaagctagcggcgcaacatcggctcaaatagaaatgaataaaaagagagaggccgaattccagaagatgaggagagacctagaagaagctaccctgcagcacgaggcgacagcggccaccctgcgcaaaaagcaagcagattctgtggcagaacttggcgagcagatagataatcttcaacgcgtgaaacagaagctggagaaagaaaagagcgaactgaaaatggagatcgacgacatggcaagcaatatcgaggcccttagtaagagtaagtccaatatagagagaacatgcagaaccgtggaagaccagttctctgaaatcaaagccaaagacgagcagcagacccaactgatacacgatttgaatatgcagaaggcgcgtctccagacccagaacggagaactatcacatagggtcgaagagaaagaatccctgatcagtcagctcactaaatcaaaacaagctctgactcagcaattagaagaactgaaacgccagatggaggaagagacaaaggcaaagaacgcaatggctcacgctctgcagtccagccggcatgattgtgacctgctgagggagcagtatgaagaagaacaggaggctaaagcagagctgcagagagccttgtccaaagctaactcagaagtcgcccagtggaggacgaagtatgaaacggatgcaattcagaggaccgaggagctggaggaggcaaagaagaagctggcacaacgtctgcaggaagccgaggagaacaccgaaaccgctaacagtaagtgcgcatcccttgagaagacgaagcagcgccttcagggggaagtggaggacctgatgagagacttggagaggtcacatacagcctgtgcaaccctggacaagaaacagcggaactttgacaaggtgcttgcagaatggaagcagaagcttgatgaatcgcaggccgagctggaggccgcccaaaaagagagtagaagtctctccactgagcttttcaaaatgaggaatgcatatgaggaggtcgttgatcagctggagacgttgcggagagaaaataagaatttacaggaagaaatttctgatctcactgagcagattgccgagaccggaaagaacttgcaggaggcggaaaaaacaaagaaactggtggagcaggagaaatccgatttgcaggttgcgctggaagaggtggaaggttctctcgagcacgaagaatcgaagattctccgggtgcaactggaattaagtcaggtgaagtcagaattagatcggaaggtcattgagaaggatgaagagatcgagcagttaaagcggaattctcaaagggcagctgaggccctgcaaagtgtcttggatgccgaaattagaagccggaacgacgctctcagattaaagaaaaagatggagggtgaccttaatgaaatggaaatacaactggggcacagcaatcggcaaatggcggagacacagaaacaccttcgtaccgtccaaggacagctgaaggacagccagctgcacctcgatgatgctctgcggtctaatgaagatctaaaagagcagcttgccatcgtggagaggcgtaacggattgctgctcgaggagctggaagaaatgaaggttgccctcgagcagaccgaacgcactcgcaggctgtctgaacaggagctgctagacgccagtgatagggtccagctcctccatagccagaatacttcacttattaataccaagaaaaagctggaagctgatattgctcagtgtcaggctgaggttgagaacagtattcaagagtcacgaaatgccgaggagaaagccaagaaagcaatcacagacgcagccatgatggcagaggagctcaagaaagaacaagatacaagcgcccatctcgagcggatgaagaagaatcttgagcagactgtgaaggacctccagcaccggttggatgaggccgagcagctagcgctcaaaggggggaaaaaacagatacagaagctagagaatcgcgtgagagagctcgagaacgagcttgatgtggagcagaaacgtggcgctgaggccctgaagggcgctcacaaatacgagcgtaaggttaaggagatgacataccaagcagaggaggatcacaagaacatactcagacttcaggacctagtggataagctacaggccaaggtaaagagctacaagaggcaggctgaagaagccgaggagcaagctaacacacaactctcccgctgtaggcgggttcagcatgagctggaagaggccgctgagcgggccgacatcgccgagagccaggtgaataagctacgtgccaaatccagggatgtgggaagtcagaaaatggaggagtag

SEQ ID NO: 140906 - DNA, 2001 bp, Artificial Sequence
  derived and/or modified sequence
atgctgagccacatgctgtacaagaaggagaacgccatcgacatcttaggatttagtagcgaagagaaagtcggcatttacaaactgacgggcgctgtcatgcattacgggaacatgaaatttaagcagaaacagcgggaagaacaagcagagccagacggcaccgaggtggccgataaagccggatatcttatggggttaaacagcgcagaaatgctcaaaggactatgctgcccgagggtcaaggtggggaacgagtacgtaaccaaaggtcagaacgtgcagcaggtcactaacagtgttggcgctctggctaaggcagtctatgaaaagatgttcctatggatggtgacacgtattaatcagcagctggacacaaagcagcctcggcaatacttcatcggcgtgctggacatcgcaggcttcgaaatttttgactttaactcgctggaacagttgtgtatcaattttaccaacgagaagctacagcagttttttaatcatcacatgtttgtcttggagcaggaagagtacaagaaagaaggtatcgaatgggaatttatcgacttcggaatggatctggcagcctgcattgaactgattgagaaacccatgggtattttcagcattctcgaagaggagtgcatgtttcccaaggctaccgacactagtttcaagaataagctgtatgatcagcacctaggtaaatccaataacttccaaaagcccaaaccggccaagggcaaagcagaagcccacttctcacttgtgcattatgcgggcacagttgattataacatcgcaggatggctcgacaagaacaaagatcccctgaacgagaccgtagtggggctctaccaaaaatccagcttgaaactgctttcctttctattcagcaactacgccggcgcagaaactggcgactcgggggggtctaaaaagggcggaaaaaagaaaggcagcagttttcaaacagtaagcgctgtcttcagagagaacttgaataaactcatgaccaatctccgaagcacacacccacactttgtgcggtgtctaattcccaatgaaaccaaaacaccgggcgttatggatcattatcttgtgatgcatcaactgagatgcaatggagtgttggaaggcatccggatttgcaggaagggcttcccatcacgcatattatacgctgacttcaagcagcgataccggatactaaacgccagcgctattccggaaggacagttcattgattcaaagaatgcatccgaaaagttgctgaacagcatcgatgtggacagggaacagttccggttcggaaacaccaaggtgttctttaaagcggggttgctagggctcttggaggaaatgcgcgacgagaagctggttacactgatgactagcacacaggccgtgtgtaggggatacctgatgagggtggaattcaaaaagatgatggagagacgggattctatcttttgcatccaatacaatatcagatctttcatgaatgttaagcactggccgtggatgaatctgtttttcaaaatcaaacccctattaaaatccgcagaggcagaaaaggagatggcaacgatgaaagaggacttcgaacgtacgaaagaagagttagccaggtcggaagccagacgtaaggagcttaccgaaagactcgaagaggaagaagaaatgaactctgaactggtggccaagaaacgaaatctcgaggacaagtgttcaagtctcaagcgcgatatcgatgatcttgagctcactctgaccaaggtggaaaaagagaagcacgccaccgagaataaagtgaaaaacttgagtgaagagatgacagccctggaggaaaatatttcgaaattaactaaggagaaaaagagtcttcaggaagcacatcagcagactctcgatgacctgcaggtagaggaggataaagtgaacgggctgataaaaattaacgctaaactggagcaacagacggacgacgagggcgtttag

SEQ ID NO: 140907 - DNA, 5816 bp, Artificial Sequence
  derived and/or modified sequence
atgtccagtgacgcagaaatggcaatatttggggaagccgctccgtatctgagaaaaccagagaaggaaagaatcgaagcccagaatcgccctttcgacagcaagaaagcgtgcttcgtggccgataacaaggaaatgtatgtgaagggtatgattcagactcgcgaaaatgacaaggtgatcgttaaaaccctggacgatcgcatgttgacccttaataatgatcaagttttcccaatgaacccccctaagttcgacaaaatcgaagatatggccatgatgacacacctccacgagccagctgtactgtataatctcaaagaaaggtatgctgcctggatgatctatacctacagcggcctcttttgcgtgacagttaatccatacaagtggctccctgtgtataagcccgaggtcgtggctgcttacagggggaagaaaagacaagaggctccccctcacatcttctccatctctgataatgcataccagttcatgttgacagacagggataaccagagtattctcattacaggtgagtctggcgctgggaagactgtcaacaccaaacgagtgatccagtactttgccaccattgctgtgaccggcgacaagaaaaaagaaacccagcccggaaagatgcaaggcaccctcgaagaccagattatacaggcaaatccccttctagaggccttcgggaacgccaaaacggttagaaatgataatagttcacgattcggtaagttcattcgcatccacttcggggctaccgggaaactcgcctcggccgacattgaaacatatctgcttgaaaagtcacgcgttacctttcagctttcatctgagcgcagttaccacattttctaccagatcatgtccaataagaagcctgagctcatcgatttgttgctcatctcgaccaacccatttgattttccgtttgtctcgcagggggaggtgactgtggctagtatcgatgactcagaggaattactggccactgacaatgccattgatatcctgggttttagtagtgaggagaaagtgggcatttacaagctcactggggctgtgatgcactacggcaatatgaagtttaagcagaagcagagagaagagcaggcagaacccgacggaactgaggttgccgacaaagcaggatacttgatggggctcaactcagcagaaatgctgaagggattgtgctgcccacgagtgaaggtaggcaatgaatatgttacaaaaggccagaatgtgcagcaagtgactaactccgtaggagccctggcgaaagctgtgtatgagaaaatgtttttatggatggtcactcgcatcaaccagcagttggataccaagcagccacggcagtatttcattggagttctggatatcgcgggattcgagatctttgacttcaattcccttgaacaactttgcatcaatttcaccaacgaaaaattgcagcagttttttaaccaccacatgttcgtattggagcaagaggagtataagaaggagggcatcgagtgggagttcattgatttcggcatggacctggcggcttgtattgagcttatcgaaaagccgatgggaatcttctccattctggaggaggagtgcatgtttccgaaagcaactgacacctcttttaagaacaaactgtatgaccagcacctgggcaagagcaataacttccagaagccaaagccagcaaaaggcaaagctgaagcccattttagtctggtccattacgctggtactgtcgactataacattgccggatggctggataagaataaagatcccctgaatgaaactgtcgttggtctctatcaaaaatccagcctcaagctgcttagctttcttttctcaaactacgcaggcgcagagactggagactcaggaggtagcaagaagggtggtaaaaaaaaaggatctagcttccagaccgtgagtgccgtctttcgggagaatttaaataaacttatgacaaatctgaggagcacgcatccccacttcgtccgatgtcttattccaaacgaaaccaaaacacccggagtgatggatcattatctggtcatgcatcagctacgatgcaatggagtactcgaggggattcgaatctgtcggaagggctttccctcgcgaatcctgtacgccgattttaagcagaggtatagaatcctaaatgcgtctgcaatccctgaaggtcagttcattgatagcaagaatgccagcgaaaagttattgaactccatcgacgtagaccgcgaacagttccggttcggaaacacaaaggttttttttaaggcagggctgctgggattattggaggaaatgagagatgaaaagctggtcacactgatgacctcaacccaggcagtatgtcgcggttatctgatgcgggtcgagtttaagaagatgatggaaaggcgggatagcattttttgcatccaatataacattcgctctttcatgaatgtgaagcactggccatggatgaacctatttttcaagatcaagcctctactgaaatccgccgaagcggagaaggagatggccaccatgaaggaagacttcgagaggaccaaagaggaactcgccaggagcgaagctagacgcaaagaactggaagagaagatggtatctttactgcaagagaaaaatgatctccagctacaggtgcaatccgagaccgagaacctgatggacgctgaagagcggtgtgaaggactgataaaatctaaaattcttttagaagcaaaggttaaagagctgactgagagattagaagaagaggaggaaatgaactctgaactcgttgccaaaaagcgcaacttagaagataagtgcagtagccttaagagagatatcgatgacctggaattgacacttactaaggtggaaaaagaaaaacacgctactgaaaataaggtgaagaaccttagcgaagaaatgacagcattagaggagaacatctcaaaactgacgaaggaaaaaaagtcgcttcaggaggctcatcagcaaaccctggacgatcttcaggtggaagaagataaagtgaatgggcttattaagatcaatgccaaattggagcaacaaacagacgatctggaagggtccctggagcaggaaaagaagctcagagctgacctggaacgagccaaacgcaagctggaaggagaccttaagatgagccaagagtctatcatggaccttgagaacgataagcagcagatagaggagaaacttaaaaaaaaggagtttgaactgtctcagcttcaggctaaaattgacgacgagcaggtccattccctgcagttccagaagaaaataaaggagctgcaggcccgaatcgaggagctggaagaggaaattgaggccgagcacacactacgagccaaaattgagaaacagcggagcgatctggccagggaactggaggaaatttcggagaggttagaagaagcttcgggagccacttcggcccaaatcgagatgaacaagaagagggaagccgaattccagaagatgaggcgggatctcgaggaggctaccctgcagcacgaggccactgctgccacattacgaaagaagcaggccgactcagtggccgaactgggagaacagatcgataatctgcagcgagtgaagcagaagttggagaaggaaaagtctgagcttaaaatggagatcgatgacatggccagtaacattgaggctttgtctaagtccaaaagtaatatcgaacgaacttgtcggacagttgaagaccagttcagcgaaatcaaggccaaagacgagcagcaaacgcagctgatccacgatctgaatatgcagaaggcccgtttacagacccagaatggtgagctatcgcaccgtgtcgaagagaaggagtccctgatctctcaactgacaaagtccaagcaggcccttacacagcagctggaagaactaaagcggcagatggaagaggagaccaaagcgaaaaacgccatggcgcacgcgctgcagagcagccggcatgactgcgatctcctgcgcgagcagtacgaagaggaacaagaagccaaagcagaactgcagcgagctctgtccaaggctaattctgaggtggctcagtggcgaactaaatacgaaaccgatgccattcaacgaacagaggaacttgaggaggcaaagaaaaagttagcccagcgactgcaagaagcagaagaaaataccgaaaccgctaactcgaagtgcgcctctttggaaaaaactaaacagaggttgcaaggtgaggttgaagatctgatgagagacctcgagaggagtcacactgcgtgtgccaccctcgataagaagcagagaaacttcgacaaggttttggcggagtggaagcagaagctcgatgagtcacaggctgagcttgaagcagctcagaaagagtcccggtccctgtccaccgaattattcaaaatgcggaacgcttacgaagaggtagttgaccagctggaaaccttaagacgcgaaaacaagaatcttcaggaggaaattagcgatctgactgaacagattgcagaaaccggcaagaacctgcaggaagcagagaaaacaaaaaaactggtggagcaggagaagtccgatctgcaggtcgccttggaggaagtggaagggtctttagaacacgaggaaagtaagatactgagagtgcagctggaactaagccaagtgaagtccgaacttgatcggaaagtgatcgagaaagatgaagagattgaacagctgaagcggaactcccaacgtgcagcggaagcactgcagagtgtgctcgatgctgagatcagatcaagaaacgacgccctgagactgaaaaaaaagatggaaggcgatctcaatgaaatggaaattcagctgggacatagcaatagacagatggcagaaacacagaagcaccttaggactgtgcagggacagctaaaggatagtcagctgcatctggatgatgccttacggagtaatgaggacctcaaggagcagctggccatcgtggagaggaggaacgggctgctgctcgaagaactggaagagatgaaggtggccctggaacaaactgaacgaaccaggagattgtccgagcaggagctgttagatgcatctgatagagttcagcttcttcacagccaaaatacttctctgattaatacaaaaaaaaaactggaggccgacatcgctcagtgccaagctgaggtcgagaattcaatccaggagtctaggaatgccgaagagaaggcgaaaaaagccattacagatgcagccatgatggcggaagagctcaaaaaggagcaggacaccagcgctcacctggagagaatgaagaaaaacctggagcagacagtaaaggacctgcaacatagactagacgaggccgaacagctggcccttaaaggaggcaaaaaacagatccagaaactggagaatcgggtccgtgaactggagaatgagctggatgtggagcaaaagagaggcgctgaagccttgaaaggcgctcacaagtatgaacggaaggttaaggaaatgacgtatcaggctgaggaagatcacaagaatatcctgcgcctgcaggacttggtggataagctgcaagctaaggttaaaagttacaaaagacaagcggaggaagctgaagagcaggctaatactcagctgtccagatgccggagagtgcagcacgaactggaagaagctgcagagagagccgacatcgcagagagtcaagtgaataagttacgggcaaagagcagagatgtgggctctcagaaaatggaggagta

SEQ ID NO: 140908 - DNA, 5817 bp, Artificial Sequence
  derived and/or modified sequence
atgtcttccgacgcagagatggcaatcttcggtgaggctgccccttaccttcggaagccggaaaaggagcgcatcgaagcacagaaccgtccgttcgactcgaagaaagcttgttttgtcgcagataacaaagaaatgtacgtcaaaggcatgatccagacacgtgaaaatgataaggttatcgtcaagacactcgacgataggatgctgaccctgaataatgatcaagttttccccatgaaccctccaaaatttgacaagatcgaagatatggccatgatgacacatcttcatgagcccgctgtgttgtacaacttgaaagagaggtatgccgcatggatgatatacacttacagcggcctgttctgcgtaacggtgaatccgtataaatggctgcctgtctacaagccggaggtcgtcgccgcatatcgaggaaagaagagacaggaagcccctccccacatctttagtatttccgacaacgcgtaccagttcatgctcaccgaccgtgacaaccagagcatactaattacaggtgagtctggggcaggtaaaacagtcaacaccaaacgagtgattcagtactttgctacaattgccgttactggggataagaagaaagaaactcaaccgggaaagatgcagggcactctagaggatcagattatacaagcaaatccgctgcttgaggcctttgggaacgcaaagacggtaagaaatgacaattcttccagatttggaaaatttatcaggatacatttcggcgctaccgggaagctagctagtgctgacattgagacctatctgctggagaaaagtcgtgtgacctttcagctctctagcgagcgctcttatcatatcttctatcaaatcatgtccaacaaaaagcccgagcttatagacctcctgctgatatctaccaaccctttcgatttcccatttgtttcccagggggaggtgaccgtggcttcgatcgacgacagcgaagaactcctggcaaccgataacgcaatcgatatcctgggcttctcttctgaggaaaaggtcggaatttataaactgacgggtgccgtcatgcattacgggaacatgaagttcaagcagaagcagcgcgaggaacaggcagagccagatgggacagaagttgctgacaaggccggatacttgatgggcttaaattcagctgaaatgttaaaggggctgtgttgtcctagagttaaggttggcaacgagtatgtgacaaagggccaaaacgtgcagcaagtcacaaattctgtaggagctctcgcgaaggcagtgtatgaaaaaatgtttctgtggatggtaactcggattaatcagcagttggatactaaacaacctagacagtacttcatcggagtgctagacattgccggtttcgaaatatttgacttcaattctctggaacagttgtgtatcaatttcaccaacgagaagctccaacagttcttcaatcatcacatgtttgttctggagcaagaggaatacaaaaaggagggcattgaatgggagttcattgatttcggaatggatctggccgcttgcatcgaactcatcgagaaacctatggggatcttctccatcttggaggaggaatgtatgttcccaaaggccaccgatacgtcctttaaaaataaactctatgatcaacatctcggtaagagtaataatttccaaaagcccaagccagccaaagggaaggccgaggcacatttttctctggttcactacgctgggactgtggactataacatcgccggatggctcgataaaaataaggatccattaaatgaaactgtggttggcctttaccaaaagtcgtccctcaagttactctcgttcctcttctctaattacgctggtgccgagacaggggatagcggtgggtccaaaaaagggggaaaaaagaagggatcgtcattccagacagtctccgccgtgtttcgggaaaacctaaacaaattgatgaccaatttgcggtcgacacacccccactttgtgcggtgtctcattcctaacgagacaaagactcctggggtaatggaccactacctcgttatgcaccagcttcggtgcaatggggtgctggaaggtattaggatctgccggaaggggtttcctagtcgaatactctacgcggatttcaaacagaggtacaggatccttaatgcctccgcaatacctgaggggcagttcatcgattccaaaaacgcatcggagaagcttctgaacagcatagacgtcgaccgagaacagttcagattcggtaacaccaaagtgttcttcaaggcaggactcctgggcctgctggaggaaatgcgagacgagaagctggtgactcttatgacctccactcaagcagtgtgccggggatacctcatgagagtagaattcaagaagatgatggaacgaagggatagcatattctgtatacagtacaatatccggtccttcatgaacgtgaagcattggccctggatgaatctctttttcaagattaagcccttattgaaaagtgccgaggctgaaaaagagatggcgaccatgaaggaggatttcgagaggaccaaagaggagctcgctcggtcagaggcccgtcgtaaggagctggaagaaaaaatggtctccctgcttcaggaaaaaaatgacctgcagctgcaagtgcaatccgagacggagaacttaatggacgcagaggaacggtgtgaagggctaattaagagcaagattctgctggaggctaaggtgaaagagttgacagagaggctagaggaggaggaagagatgaactctgagctagtggccaagaagcggaacctggaggacaaatgtagttctctcaagagagatatagatgacctggagctaacgctcaccaaggtcgagaaggagaagcacgcaactgagaacaaagtgaagaacttatccgaggagatgacagcacttgaggaaaacattagtaaactgacaaaggagaaaaaatcactccaggaggcacatcaacagacgcttgatgacttgcaagttgaggaggacaaagtcaatgggttaatcaaaatcaacgcaaaactggaacagcagaccgacgatctcgaaggtagcctggagcaggaaaaaaaattacgtgcagacctcgaacgcgctaagaggaagctggagggagacctgaagatgtctcaggagtccattatggatctggagaacgataagcagcaaatcgaggagaagctcaaaaagaaagagttcgaactgtcgcaactgcaagccaaaatcgacgatgaacaagttcacagcttgcaatttcagaagaagatcaaggagctgcaggctcgcattgaggaattagaagaagagatagaagcagagcataccctgcgcgctaaaattgagaaacagagaagcgacttggctagggaactggaagagatatctgaaagactcgaagaggcttccggagcaacctcagctcagattgaaatgaataagaaaagggaggctgaattccaaaaaatgagacgggatctggaggaggctacattgcagcatgaagccactgctgcaacactaagaaagaagcaggcggactcggtcgccgagctgggcgagcagatcgacaacctccagcgggttaagcagaagctggagaaggagaaatcggaattgaagatggaaatagacgacatggctagtaatattgaggccctgtctaagtcgaaaagtaatatcgagcgaacctgcagaactgtcgaagaccaatttagtgagatcaaggcaaaggacgaacagcagacgcagcttattcatgacctaaatatgcagaaggccagactccagacgcagaatggcgaactgagtcatagagtagaggagaaggagtctcttatatcgcagttaacgaagtccaaacaagcacttacccagcagctcgaggaattaaagcgccaaatggaggaagaaaccaaggcaaaaaacgccatggctcacgcattacagagctccagacacgattgtgacctgctcagagagcaatatgaggaggagcaggaggcgaaagcagaactgcaacgggctctttcaaaggccaactccgaagtggcccagtggagaactaaatacgagacagacgccatccagagaacagaggaactcgaggaggctaagaagaagctcgctcaaagattgcaggaggccgaagaaaacaccgaaacagctaattctaagtgtgcttccctggagaagaccaagcagcggctccagggagaggtcgaggatctcatgcgagatctcgagcgctcccacacggcttgtgccacactcgacaagaagcaaagaaatttcgacaaggtcctcgcggaatggaagcaaaagctagatgagtcccaggctgagctggaggccgctcagaaggaaagcagaagtttgtccacagagcttttcaaaatgcggaatgcctatgaagaggtagttgatcaactggaaaccctcagacgggagaataaaaaccttcaagaagagatctcggaccttacagagcagatcgccgagacaggcaaaaaccttcaagaagccgaaaagacaaaaaaattggtggagcaagaaaagtccgatctgcaggtggcactcgaggaggttgaaggatcactggagcacgaggagagcaagattctgcgtgtgcaattggagctgagccaagtcaagagtgaacttgacaggaaggttattgagaaggatgaggaaattgagcagctcaaacgcaattcccagagagccgctgaagcattacagtctgtgctggacgcagaaataaggagtaggaatgacgctctgcggttgaaaaagaagatggaaggcgatctgaatgaaatggagattcaactcggccattccaaccgccagatggctgagacgcagaagcacttacgtacagttcagggacagcttaaggacagccagctgcatctggatgacgcacttcggtccaacgaggatctgaaggaacagctcgcgatagtggagcgacgaaatggcctgctgctagaggaattggaggagatgaaagtcgccttggaacaaactgaacggactcgtaggttaagtgaacaagaactattggacgccagtgaccgggtgcagcttctccactctcagaacacttctctgattaacactaagaaaaagcttgaagccgacatcgctcagtgccaggcggaagtggagaactcgatccaggaatcaaggaatgctgaggaaaaggccaaaaaagctatcactgacgccgctatgatggcagaagagttaaaaaaggagcaagatactagcgcacacctagaacgcatgaaaaaaaacctggaacagaccgtgaaggacctgcaacatcgactcgatgaggcggaacagctcgcgctcaaaggcggaaaaaaacagattcagaaactcgaaaatagggtcagagaactggagaatgaactggacgttgagcagaagcggggtgcagaagcactaaagggcgctcacaagtatgagagaaaggtcaaggagatgacgtatcaggccgaggaggatcataagaatattctgagattacaggacttggtggacaagctccaggctaaagtaaagtcttataaaagacaggcagaagaagctgaggaacaggctaatacccaactttcgcgatgcagacgagtacaacacgagcttgaagaagcagctgagcgggctgacatcgctgagtcccaagtcaataagttaagagccaagtctagagacgtcggtagtcagaagatggaggagtat

SEQ ID NO: 140909 - DNA, 2001 bp, Artificial Sequence
  derived and/or modified sequence
atgctttcccatatgctgtataagaaagagaacgccattgacatcctggggtttagctctgaagaaaaggttggtatttataagctcacaggagctgtgatgcactacgggaatatgaaatttaaacagaagcagcgcgaagaacaggctgaaccagacggtactgaagtagcggacaaagctggttacctcatgggactgaatagcgcggaaatgttgaaaggtctgtgttgccccagagtcaaagtcggaaatgagtatgtcacgaaaggccagaatgttcagcaggttacaaattcagttggcgcactggcgaaagctgtatacgaaaaaatgttcttgtggatggtgactagaattaatcagcagctggataccaagcagcctcgccagtatttcatcggggtgctggatatcgccggattcgaaatcttcgattttaactctctcgagcaactgtgtattaatttcacgaatgagaagctgcaacaattttttaatcaccatatgtttgtcctggaacaagaggagtataagaaggagggaattgagtgggaatttatcgattttgggatggacctcgctgcctgtatcgaactcattgaaaaacccatgggcatcttttcaattctggaggaggaatgcatgttcccgaaagcaacagatacatcatttaaaaacaagctatacgatcagcacctcgggaagtccaacaacttccagaagccgaagcccgctaaaggaaaagcggaggcccacttttcactggtgcattatgcaggaactgttgattacaacattgccggttggttggacaagaataaagatcccctgaacgagactgtggtcggactttaccagaaaagtagcctcaagctgctcagcttcctgttctccaactacgcgggtgccgagaccggagactcaggtggtagcaagaaggggggtaagaagaaggggagctcattccaaaccgtcagtgccgtgtttcgagaaaacctgaacaaactgatgaccaacctgcggtcaacgcacccacacttcgtgcgctgccttatacctaatgagacgaagactcctggcgtaatggatcattatctcgtaatgcaccagctccgctgtaatggagtgttggaggggatcagaatttgccgcaaaggttttccatcgagaatcctctatgccgattttaagcagagatacagaatcctcaacgcgtctgccatacccgagggccagttcattgactctaagaacgcctccgagaaactcctcaacagtatcgacgtcgatcgggagcagttccggttcggcaacactaaggtgttctttaaagccggactactgggcttattagaggaaatgagggacgaaaagctggtcactttgatgacgtctacccaggcggtgtgtagaggctatctgatgcgggtcgagttcaagaagatgatggaacgaagggactctatcttctgcattcaatataacatcaggagcttcatgaacgttaaacattggccatggatgaacttattttttaagataaagcctttgctgaagagcgctgaggcagagaaagaaatggcgacaatgaaggaagatttcgagcggacaaaagaggaactggcacgtagcgaggcaaggaggaaagagctgaccgagaggctggaggaagaagaggagatgaatagtgaactcgtagctaagaagcggaaccttgaggataaatgctccagtcttaaaagggacattgacgaccttgagctgacgctgacaaaggttgaaaaggagaaacacgccaccgagaacaaggtgaagaacctcagtgaagagatgactgcgctcgaggagaacataagtaagcttaccaaggaaaagaaatccctgcaagaagcacatcagcagactttggacgacctccaggtggaggaagataaagtcaacggccttatcaagatcaacgcgaagctcgaacagcaaaccgacgacgaaggggtttag

SEQ ID NO: 140910 - DNA, 5817 bp, Artificial Sequence
  derived and/or modified sequence
atgagcagcgacgccgagatggccatcttcggcgaggccgccccctacctgagaaagcccgagaaggagagaatcgaggcccagaacagacccttcgacagcaagaaggcctgcttcgtggccgacaacaaggagatgtacgtgaagggcatgatccagaccagagagaacgacaaggtgatcgtgaagaccctggacgacagaatgctgaccctgaacaacgaccaggtgttccccatgaacccccccaagttcgacaagatcgaggacatggccatgatgacccacctgcacgagcccgccgtgctgtacaacctgaaggagagatacgccgcctggatgatctacacctacagcggcctgttctgcgtgaccgtgaacccctacaagtggctgcccgtgtacaagcccgaggtggtggccgcctacagaggcaagaagagacaggaggcccccccccacatcttcagcatcagcgacaacgcctaccagttcatgctgaccgacagagacaaccagagcatcctgatcaccggcgagagcggcgccggcaagaccgtgaacaccaagagagtgatccagtacttcgccaccatcgccgtgaccggcgacaagaagaaggagacccagcccggcaagatgcagggcaccctggaggaccagatcatccaggccaaccccctgctggaggccttcggcaacgccaagaccgtgagaaacgacaacagcagcagattcggcaagttcatcagaatccacttcggcgccaccggcaagctggccagcgccgacatcgagacctacctgctggagaagagcagagtgaccttccagctgagcagcgagagaagctaccacatcttctaccagatcatgagcaacaagaagcccgagctgatcgacctgctgctgatcagcaccaaccccttcgacttccccttcgtgagccagggcgaggtgaccgtggccagcatcgacgacagcgaggagctgctggccaccgacaacgccatcgacatcctgggcttcagcagcgaggagaaggtgggcatctacaagctgaccggcgccgtgatgcactacggcaacatgaagttcaagcagaagcagagagaggagcaggccgagcccgacggcaccgaggtggccgacaaggccggctacctgatgggcctgaacagcgccgagatgctgaagggcctgtgctgccccagagtgaaggtgggcaacgagtacgtgaccaagggccagaacgtgcagcaggtgaccaacagcgtgggcgccctggccaaggccgtgtacgagaagatgttcctgtggatggtgaccagaatcaaccagcagctggacaccaagcagcccagacagtacttcatcggcgtgctggacatcgccggcttcgagatcttcgacttcaacagcctggagcagctgtgcatcaacttcaccaacgagaagctgcagcagttcttcaaccaccacatgttcgtgctggagcaggaggagtacaagaaggagggcatcgagtgggagttcatcgacttcggcatggacctggccgcctgcatcgagctgatcgagaagcccatgggcatcttcagcatcctggaggaggagtgcatgttccccaaggccaccgacaccagcttcaagaacaagctgtacgaccagcacctgggcaagagcaacaacttccagaagcccaagcccgccaagggcaaggccgaggcccacttcagcctggtgcactacgccggcaccgtggactacaacatcgccggctggctggacaagaacaaggaccccctgaacgagaccgtggtgggcctgtaccagaagagcagcctgaagctgctgagcttcctgttcagcaactacgccggcgccgagaccggcgacagcggcggcagcaagaagggcggcaagaagaagggcagcagcttccagaccgtgagcgccgtgttcagagagaacctgaacaagctgatgaccaacctgagaagcacccacccccacttcgtgagatgcctgatccccaacgagaccaagacccccggcgtgatggaccactacctggtgatgcaccagctgagatgcaacggcgtgctggagggcatcagaatctgcagaaagggcttccccagcagaatcctgtacgccgacttcaagcagagatacagaatcctgaacgccagcgccatccccgagggccagttcatcgacagcaagaacgccagcgagaagctgctgaacagcatcgacgtggacagagagcagttcagattcggcaacaccaaggtgttcttcaaggccggcctgctgggcctgctggaggagatgagagacgagaagctggtgaccctgatgaccagcacccaggccgtgtgcagaggctacctgatgagagtggagttcaagaagatgatggagagaagagacagcatcttctgcatccagtacaacatcagaagcttcatgaacgtgaagcactggccctggatgaacctgttcttcaagatcaagcccctgctgaagagcgccgaggccgagaaggagatggccaccatgaaggaggacttcgagagaaccaaggaggagctggccagaagcgaggccagaagaaaggagctggaggagaagatggtgagcctgctgcaggagaagaacgacctgcagctgcaggtgcagagcgagaccgagaacctgatggacgccgaggagagatgcgagggcctgatcaagagcaagatcctgctggaggccaaggtgaaggagctgaccgagagactggaggaggaggaggagatgaacagcgagctggtggccaagaagagaaacctggaggacaagtgcagcagcctgaagagagacatcgacgacctggagctgaccctgaccaaggtggagaaggagaagcacgccaccgagaacaaggtgaagaacctgagcgaggagatgaccgccctggaggagaacatcagcaagctgaccaaggagaagaagagcctgcaggaggcccaccagcagaccctggacgacctgcaggtggaggaggacaaggtgaacggcctgatcaagatcaacgccaagctggagcagcagaccgacgacctggagggcagcctggagcaggagaagaagctgagagccgacctggagagagccaagagaaagctggagggcgacctgaagatgagccaggagagcatcatggacctggagaacgacaagcagcagatcgaggagaagctgaagaagaaggagttcgagctgagccagctgcaggccaagatcgacgacgagcaggtgcacagcctgcagttccagaagaagatcaaggagctgcaggccagaatcgaggagctggaggaggagatcgaggccgagcacaccctgagagccaagatcgagaagcagagaagcgacctggccagagagctggaggagatcagcgagagactggaggaggccagcggcgccaccagcgcccagatcgagatgaacaagaagagagaggccgagttccagaagatgagaagagacctggaggaggccaccctgcagcacgaggccaccgccgccaccctgagaaagaagcaggccgacagcgtggccgagctgggcgagcagatcgacaacctgcagagagtgaagcagaagctggagaaggagaagagcgagctgaagatggagatcgacgacatggccagcaacatcgaggccctgagcaagagcaagagcaacatcgagagaacctgcagaaccgtggaggaccagttcagcgagatcaaggccaaggacgagcagcagacccagctgatccacgacctgaacatgcagaaggccagactgcagacccagaacggcgagctgagccacagagtggaggagaaggagagcctgatcagccagctgaccaagagcaagcaggccctgacccagcagctggaggagctgaagagacagatggaggaggagaccaaggccaagaacgccatggcccacgccctgcagagcagcagacacgactgcgacctgctgagagagcagtacgaggaggagcaggaggccaaggccgagctgcagagagccctgagcaaggccaacagcgaggtggcccagtggagaaccaagtacgagaccgacgccatccagagaaccgaggagctggaggaggccaagaagaagctggcccagagactgcaggaggccgaggagaacaccgagaccgccaacagcaagtgcgccagcctggagaagaccaagcagagactgcagggcgaggtggaggacctgatgagagacctggagagaagccacaccgcctgcgccaccctggacaagaagcagagaaacttcgacaaggtgctggccgagtggaagcagaagctggacgagagccaggccgagctggaggccgcccagaaggagagcagaagcctgagcaccgagctgttcaagatgagaaacgcctacgaggaggtggtggaccagctggagaccctgagaagagagaacaagaacctgcaggaggagatcagcgacctgaccgagcagatcgccgagaccggcaagaacctgcaggaggccgagaagaccaagaagctggtggagcaggagaagagcgacctgcaggtggccctggaggaggtggagggcagcctggagcacgaggagagcaagatcctgagagtgcagctggagctgagccaggtgaagagcgagctggacagaaaggtgatcgagaaggacgaggagatcgagcagctgaagagaaacagccagagagccgccgaggccctgcagagcgtgctggacgccgagatcagaagcagaaacgacgccctgagactgaagaagaagatggagggcgacctgaacgagatggagatccagctgggccacagcaacagacagatggccgagacccagaagcacctgagaaccgtgcagggccagctgaaggacagccagctgcacctggacgacgccctgagaagcaacgaggacctgaaggagcagctggccatcgtggagagaagaaacggcctgctgctggaggagctggaggagatgaaggtggccctggagcagaccgagagaaccagaagactgagcgagcaggagctgctggacgccagcgacagagtgcagctgctgcacagccagaacaccagcctgatcaacaccaagaagaagctggaggccgacatcgcccagtgccaggccgaggtggagaacagcatccaggagagcagaaacgccgaggagaaggccaagaaggccatcaccgacgccgccatgatggccgaggagctgaagaaggagcaggacaccagcgcccacctggagagaatgaagaagaacctggagcagaccgtgaaggacctgcagcacagactggacgaggccgagcagctggccctgaagggcggcaagaagcagatccagaagctggagaacagagtgagagagctggagaacgagctggacgtggagcagaagagaggcgccgaggccctgaagggcgcccacaagtacgagagaaaggtgaaggagatgacctaccaggccgaggaggaccacaagaacatcctgagactgcaggacctggtggacaagctgcaggccaaggtgaagagctacaagagacaggccgaggaggccgaggagcaggccaacacccagctgagcagatgcagaagagtgcagcacgagctggaggaggccgccgagagagccgacatcgccgagagccaggtgaacaagctgagagccaagagcagagacgtgggcagccagaagatggaggagtag

SEQ ID NO: 140911 - DNA, 2001 bp, Artificial Sequence
  derived and/or modified sequence
atgctgagccacatgctgtacaagaaggagaacgccatcgacatcctgggcttcagcagcgaggagaaggtgggcatctacaagctgaccggcgccgtgatgcactacggcaacatgaagttcaagcagaagcagagagaggagcaggccgagcccgacggcaccgaggtggccgacaaggccggctacctgatgggcctgaacagcgccgagatgctgaagggcctgtgctgccccagagtgaaggtgggcaacgagtacgtgaccaagggccagaacgtgcagcaggtgaccaacagcgtgggcgccctggccaaggccgtgtacgagaagatgttcctgtggatggtgaccagaatcaaccagcagctggacaccaagcagcccagacagtacttcatcggcgtgctggacatcgccggcttcgagatcttcgacttcaacagcctggagcagctgtgcatcaacttcaccaacgagaagctgcagcagttcttcaaccaccacatgttcgtgctggagcaggaggagtacaagaaggagggcatcgagtgggagttcatcgacttcggcatggacctggccgcctgcatcgagctgatcgagaagcccatgggcatcttcagcatcctggaggaggagtgcatgttccccaaggccaccgacaccagcttcaagaacaagctgtacgaccagcacctgggcaagagcaacaacttccagaagcccaagcccgccaagggcaaggccgaggcccacttcagcctggtgcactacgccggcaccgtggactacaacatcgccggctggctggacaagaacaaggaccccctgaacgagaccgtggtgggcctgtaccagaagagcagcctgaagctgctgagcttcctgttcagcaactacgccggcgccgagaccggcgacagcggcggcagcaagaagggcggcaagaagaagggcagcagcttccagaccgtgagcgccgtgttcagagagaacctgaacaagctgatgaccaacctgagaagcacccacccccacttcgtgagatgcctgatccccaacgagaccaagacccccggcgtgatggaccactacctggtgatgcaccagctgagatgcaacggcgtgctggagggcatcagaatctgcagaaagggcttccccagcagaatcctgtacgccgacttcaagcagagatacagaatcctgaacgccagcgccatccccgagggccagttcatcgacagcaagaacgccagcgagaagctgctgaacagcatcgacgtggacagagagcagttcagattcggcaacaccaaggtgttcttcaaggccggcctgctgggcctgctggaggagatgagagacgagaagctggtgaccctgatgaccagcacccaggccgtgtgcagaggctacctgatgagagtggagttcaagaagatgatggagagaagagacagcatcttctgcatccagtacaacatcagaagcttcatgaacgtgaagcactggccctggatgaacctgttcttcaagatcaagcccctgctgaagagcgccgaggccgagaaggagatggccaccatgaaggaggacttcgagagaaccaaggaggagctggccagaagcgaggccagaagaaaggagctgaccgagagactggaggaggaggaggagatgaacagcgagctggtggccaagaagagaaacctggaggacaagtgcagcagcctgaagagagacatcgacgacctggagctgaccctgaccaaggtggagaaggagaagcacgccaccgagaacaaggtgaagaacctgagcgaggagatgaccgccctggaggagaacatcagcaagctgaccaaggagaagaagagcctgcaggaggcccaccagcagaccctggacgacctgcaggtggaggaggacaaggtgaacggcctgatcaagatcaacgccaagctggagcagcagaccgacgacgagggcgtgtag

SEQ ID NO: 140912 - protein, 1685 aa, Artificial Sequence
  derived and/or modified sequence
MSLPFYQRCHQHYDLSYRNKDVRSTVSHYQREKKRSAVYTQGSTAYSSRSSAAHRRESEAFRRASASSSQQQASQHALSSEVSRKAASAYDYGSSHGLTDSSLLLDDYSSKLSPKPKRAKHSLLSGEEKENLPSDYMVPIFSGRQKHVSGITDTEEERIKEAAAYIAQRNLLASEEGITTSKQSTASKQTTASKQSTASKQSTASKQSTASRQSTASRQSVVSKQATSALQQEETSEKKSRKVVIREKAERLSLRKTLEETETYHAKLNEDHLLHAPEFIIKPRSHTVWEKENVKLHCSIAGWPEPRVTWYKNQVPINVHANPGKYIIESRYGMHTLEINGCDFEDTAQYRASAMNVKGELSAYASVVVKRYKGEFDETRFHAGASTMPLSFGVTPYGYASRFEIHFDDKFDVSFGREGETMSLGCRVVITPEIKHFQPEIQWYRNGVPLSPSKWVQTLWSGERATLTFSHLNKEDEGLYTIRVRMGEYYEQYSAYVFVRDADAEIEGAPAAPLDVKCLEANKDYIIISWKQPAVDGGSPILGYFIDKCEVGTDSWSQCNDTPVKFARFPVTGLIEGRSYIFRVRAVNKMGIGFPSRVSEPVAALDPAEKARLKSRPSAPWTGQIIVTEEEPSEGIVPGPPTDLSVTEATRSYVVLSWKPPGQRGHEGIMYFVEKCEAGTENWQRVNTELPVKSPRFALFDLAEGKSYCFRVRCSNSAGVGEPSEATEVTVVGDKLDIPKAPGKIIPSRNTDTSVVVSWEESKDAKELVGYYIEASVAGSGKWEPCNNNPVKGSRFTCHGLVTGQSYIFRVRAVNAAGLSEYSQDSEAIEVKAAIGGGVSPDVCPALSDEPGGLTASRGRVHEASPPTFQKDALLGSKPNKPSLPSSSQNLGQTEVSKVSETVQEELTPPPQKAAPQGKSKSDPLKKKTDRAPPSPPCDITCLESFRDSMVLGWKQPDKIGGAEITGYYVNYREVIDGVPGKWREANVKAVSEEAYKISNLKENMVYQFQVAAMNMAGLGAPSAVSECFKCEEWTIAVPGPPHSLKCSEVRKDSLVLQWKPPVHSGRTPVTGYFVDLKEAKAKEDQWRGLNEAAIKNVYLKVRGLKEGVSYVFRVRAINQAGVGKPSDLAGPVVAETRPGTKEVVVNVDDDGVISLNFECDKMTPKSEFSWSKDYVSTEDSPRLEVESKGNKTKMTFKDLGMDDLGIYSCDVTDTDGIASSYLIDEEELKRLLALSHEHKFPTVPVKSELAVEILEKGQVRFWMQAEKLSGNAKVNYIFNEKEIFEGPKYKMHIDRNTGIIEMFMEKLQDEDEGTYTFQLQDGKATNHSTVVLVGDVFKKLQKEAEFQRQEWIRKQGPHFVEYLSWEVTGECNVLLKCKVANIKKETHIVWYKDEREISVDEKHDFKDGICTLLITEFSKKDAGIYEVILKDDRGKDKSRLKLVDEAFKELMMEVCKKIALSATDLKIQSTAEGIQLYSFVTYYVEDLKVNWSHNGSAIRYSDRVKTGVTGEQIWLQINEPTPNDKGKYVMELFDGKTGHQKTVDLSGQAYDEAYAEFQRLKQAAIAEKNRARVLGGLPDVVTIQEGKALNLTCNVWGDPPPEVSWLKNEKALASDDHCNLKFEAGRTAYFTINGVSTADSGKYGLVVKNKYGSETSDFTVSVFIPEEEARMAALESLKGGKKAK

SEQ ID NO: 140913 - protein, 1685 aa, Artificial Sequence
  derived and/or modified sequence
MSLPFYQRCHQHYDLSYRNKDVRSTVSHYQREKKRSAVYTQGSTAYSSRSSAAHRRESEAFRRASASSSQQQASQHALSSEVSRKAASAYDYGSSHGLTDSSLLLDDYSSKLSPKPKRAKHSLLSGEEKENLPSDYMVPIFSGRQKHVSGITDTEEERIKEAAAYIAQRNLLASEEGITTSKQSTASKQTTASKQSTASKQSTASKQSTASRQSTASRQSVVSKQATSALQQEETSEKKSRKVVIREKAERLSLRKTLEETETYHAKLNEDHLLHAPEFIIKPRSHTVWEKENVKLHCSIAGWPEPRVTWYKNQVPINVHANPGKYIIESRYGMHTLEINGCDFEDTAQYRASAMNVKGELSAYASVVVKRYKGEFDETRFHAGASTMPLSFGVTPYGYASRFEIHFDDKFDVSFGREGETMSLGCRVVITPEIKHFQPEIQWYRNGVPLSPSKWVQTLWSGERATLTFSHLNKEDEGLYTIRVRMGEYYEQYSAYVFVRDADAEIEGAPAAPLDVKCLEANKDYIIISWKQPAVDGGSPILGYFIDKCEVGTDSWSQCNDTPVKFARFPVTGLIEGRSYIFRVRAVNKMGIGFPSRVSEPVAALDPAEKARLKSRPSAPWTGQIIVTEEEPSEGIVPGPPTDLSVTEATRSYVVLSWKPPGQRGHEGIMYFVEKCEAGTENWQRVNTELPVKSPRFALFDLAEGKSYCFRVRCSNSAGVGEPSEATEVTVVGDKLDIPKAPGKIIPSRNTDTSVVVSWEESKDAKELVGYYIEASVAGSGKWEPCNNNPVKGSRFTCHGLVTGQSYIFRVRAVNAAGLSEYSQDSEAIEVKAAIGGGVSPDVCPALSDEPGGLTASRGRVHEASPPTFQKDALLGSKPNKPSLPSSSQNLGQTEVSKVSETVQEELTPPPQKAAPQGKSKSDPLKKKTDRAPPSPPCDITCLESFRDSMVLGWKQPDKIGGAEITGYYVNYREVIDGVPGKWREANVKAVSEEAYKISNLKENMVYQFQVAAMNMAGLGAPSAVSECFKCEEWTIAVPGPPHSLKCSEVRKDSLVLQWKPPVHSGRTPVTGYFVDLKEAKAKEDQWRGLNEAAIKNVYLKVRGLKEGVSYVFRVRAINQAGVGKPSDLAGPVVAETRPGTKEVVVNVDDDGVISLNFECDKMTPKSEFSWSKDYVSTEDSPRLEVESKGNKTKMTFKDLGMDDLGIYSCDVTDTDGIASSYLIDEEELKRLLALSHEHKFPTVPVKSELAVEILEKGQVRFWMQAEKLSGNAKVNYIFNEKEIFEGPKYKMHIDRNTGIIEMFMEKLQDEDEGTYTFQLQDGKATNHSTVVLVGDVFKKLQKEAEFQRQEWIRKQGPHFVEYLSWEVTGECNVLLKCKVANIKKETHIVWYKDEREISVDEKHDFKDGICTLLITEFSKKDAGIYEVILKDDRGKDKSRLKLVDEAFKELMMEVCKKIALSATDLKIQSTAEGIQLYSFVTYYVEDLKVNWSHNGSAIRYSDRVKTGVTGEQIWLQINEPTPNDKGKYVMELFDGKTGHQKTVDLSGQAYDEAYAEFQRLKKSLLFQKDRARVLGGLPDVVTIQEGKALNLTCNVWGDPPPEVSWLKNEKALASDDHCNLKFEAGRTAYFTINGVSTADSGKYGLVVKNKYGSETSDFTVSVFIPEEEARMAALESLKGGKKAK

SEQ ID NO: 140914 - DNA, 5058 bp, Artificial Sequence
  derived and/or modified sequence
atgagcctgcccttctaccagagatgccaccagcactacgacctgagctacagaaacaaggacgtgagaagcaccgtgagccactaccagagagagaagaagagaagcgccgtgtacacccagggcagcaccgcctacagcagcagaagcagcgccgcccacagaagagagagcgaggccttcagaagagccagcgccagcagcagccagcagcaggccagccagcacgccctgagcagcgaggtgagcagaaaggccgccagcgcctacgactacggcagcagccacggcctgaccgacagcagcctgctgctggacgactacagcagcaagctgagccccaagcccaagagagccaagcacagcctgctgagcggcgaggagaaggagaacctgcccagcgactacatggtgcccatcttcagcggcagacagaagcacgtgagcggcatcaccgacaccgaggaggagagaatcaaggaggccgccgcctacatcgcccagagaaacctgctggccagcgaggagggcatcaccaccagcaagcagagcaccgccagcaagcagaccaccgccagcaagcagagcaccgccagcaagcagagcaccgccagcaagcagagcaccgccagcagacagagcaccgccagcagacagagcgtggtgagcaagcaggccaccagcgccctgcagcaggaggagaccagcgagaagaagagcagaaaggtggtgatcagagagaaggccgagagactgagcctgagaaagaccctggaggagaccgagacctaccacgccaagctgaacgaggaccacctgctgcacgcccccgagttcatcatcaagcccagaagccacaccgtgtgggagaaggagaacgtgaagctgcactgcagcatcgccggctggcccgagcccagagtgacctggtacaagaaccaggtgcccatcaacgtgcacgccaaccccggcaagtacatcatcgagagcagatacggcatgcacaccctggagatcaacggctgcgacttcgaggacaccgcccagtacagagccagcgccatgaacgtgaagggcgagctgagcgcctacgccagcgtggtggtgaagagatacaagggcgagttcgacgagaccagattccacgccggcgccagcaccatgcccctgagcttcggcgtgaccccctacggctacgccagcagattcgagatccacttcgacgacaagttcgacgtgagcttcggcagagagggcgagaccatgagcctgggctgcagagtggtgatcacccccgagatcaagcacttccagcccgagatccagtggtacagaaacggcgtgcccctgagccccagcaagtgggtgcagaccctgtggagcggcgagagagccaccctgaccttcagccacctgaacaaggaggacgagggcctgtacaccatcagagtgagaatgggcgagtactacgagcagtacagcgcctacgtgttcgtgagagacgccgacgccgagatcgagggcgcccccgccgcccccctggacgtgaagtgcctggaggccaacaaggactacatcatcatcagctggaagcagcccgccgtggacggcggcagccccatcctgggctacttcatcgacaagtgcgaggtgggcaccgacagctggagccagtgcaacgacacccccgtgaagttcgccagattccccgtgaccggcctgatcgagggcagaagctacatcttcagagtgagagccgtgaacaagatgggcatcggcttccccagcagagtgagcgagcccgtggccgccctggaccccgccgagaaggccagactgaagagcagacccagcgccccctggaccggccagatcatcgtgaccgaggaggagcccagcgagggcatcgtgcccggcccccccaccgacctgagcgtgaccgaggccaccagaagctacgtggtgctgagctggaagccccccggccagagaggccacgagggcatcatgtacttcgtggagaagtgcgaggccggcaccgagaactggcagagagtgaacaccgagctgcccgtgaagagccccagattcgccctgttcgacctggccgagggcaagagctactgcttcagagtgagatgcagcaacagcgccggcgtgggcgagcccagcgaggccaccgaggtgaccgtggtgggcgacaagctggacatccccaaggcccccggcaagatcatccccagcagaaacaccgacaccagcgtggtggtgagctgggaggagagcaaggacgccaaggagctggtgggctactacatcgaggccagcgtggccggcagcggcaagtgggagccctgcaacaacaaccccgtgaagggcagcagattcacctgccacggcctggtgaccggccagagctacatcttcagagtgagagccgtgaacgccgccggcctgagcgagtacagccaggacagcgaggccatcgaggtgaaggccgccatcggcggcggcgtgagccccgacgtgtgccccgccctgagcgacgagcccggcggcctgaccgccagcagaggcagagtgcacgaggccagcccccccaccttccagaaggacgccctgctgggcagcaagcccaacaagcccagcctgcccagcagcagccagaacctgggccagaccgaggtgagcaaggtgagcgagaccgtgcaggaggagctgaccccccccccccagaaggccgccccccagggcaagagcaagagcgaccccctgaagaagaagaccgacagagccccccccagccccccctgcgacatcacctgcctggagagcttcagagacagcatggtgctgggctggaagcagcccgacaagatcggcggcgccgagatcaccggctactacgtgaactacagagaggtgatcgacggcgtgcccggcaagtggagagaggccaacgtgaaggccgtgagcgaggaggcctacaagatcagcaacctgaaggagaacatggtgtaccagttccaggtggccgccatgaacatggccggcctgggcgcccccagcgccgtgagcgagtgcttcaagtgcgaggagtggaccatcgccgtgcccggccccccccacagcctgaagtgcagcgaggtgagaaaggacagcctggtgctgcagtggaagccccccgtgcacagcggcagaacccccgtgaccggctacttcgtggacctgaaggaggccaaggccaaggaggaccagtggagaggcctgaacgaggccgccatcaagaacgtgtacctgaaggtgagaggcctgaaggagggcgtgagctacgtgttcagagtgagagccatcaaccaggccggcgtgggcaagcccagcgacctggccggccccgtggtggccgagaccagacccggcaccaaggaggtggtggtgaacgtggacgacgacggcgtgatcagcctgaacttcgagtgcgacaagatgacccccaagagcgagttcagctggagcaaggactacgtgagcaccgaggacagccccagactggaggtggagagcaagggcaacaagaccaagatgaccttcaaggacctgggcatggacgacctgggcatctacagctgcgacgtgaccgacaccgacggcatcgccagcagctacctgatcgacgaggaggagctgaagagactgctggccctgagccacgagcacaagttccccaccgtgcccgtgaagagcgagctggccgtggagatcctggagaagggccaggtgagattctggatgcaggccgagaagctgagcggcaacgccaaggtgaactacatcttcaacgagaaggagatcttcgagggccccaagtacaagatgcacatcgacagaaacaccggcatcatcgagatgttcatggagaagctgcaggacgaggacgagggcacctacaccttccagctgcaggacggcaaggccaccaaccacagcaccgtggtgctggtgggcgacgtgttcaagaagctgcagaaggaggccgagttccagagacaggagtggatcagaaagcagggcccccacttcgtggagtacctgagctgggaggtgaccggcgagtgcaacgtgctgctgaagtgcaaggtggccaacatcaagaaggagacccacatcgtgtggtacaaggacgagagagagatcagcgtggacgagaagcacgacttcaaggacggcatctgcaccctgctgatcaccgagttcagcaagaaggacgccggcatctacgaggtgatcctgaaggacgacagaggcaaggacaagagcagactgaagctggtggacgaggccttcaaggagctgatgatggaggtgtgcaagaagatcgccctgagcgccaccgacctgaagatccagagcaccgccgagggcatccagctgtacagcttcgtgacctactacgtggaggacctgaaggtgaactggagccacaacggcagcgccatcagatacagcgacagagtgaagaccggcgtgaccggcgagcagatctggctgcagatcaacgagcccacccccaacgacaagggcaagtacgtgatggagctgttcgacggcaagaccggccaccagaagaccgtggacctgagcggccaggcctacgacgaggcctacgccgagttccagagactgaagcaggccgccatcgccgagaagaacagagccagagtgctgggcggcctgcccgacgtggtgaccatccaggagggcaaggccctgaacctgacctgcaacgtgtggggcgaccccccccccgaggtgagctggctgaagaacgagaaggccctggccagcgacgaccactgcaacctgaagttcgaggccggcagaaccgcctacttcaccatcaacggcgtgagcaccgccgacagcggcaagtacggcctggtggtgaagaacaagtacggcagcgagaccagcgacttcaccgtgagcgtgttcatccccgaggaggaggccagaatggccgccctggagagcctgaagggcggcaagaaggccaagtag

SEQ ID NO: 140915 - DNA, 5058 bp, Artificial Sequence
  derived and/or modified sequence
atgagcctgcccttctaccagagatgccaccagcactacgacctgagctacagaaacaaggacgtgagaagcaccgtgagccactaccagagagagaagaagagaagcgccgtgtacacccagggcagcaccgcctacagcagcagaagcagcgccgcccacagaagagagagcgaggccttcagaagagccagcgccagcagcagccagcagcaggccagccagcacgccctgagcagcgaggtgagcagaaaggccgccagcgcctacgactacggcagcagccacggcctgaccgacagcagcctgctgctggacgactacagcagcaagctgagccccaagcccaagagagccaagcacagcctgctgagcggcgaggagaaggagaacctgcccagcgactacatggtgcccatcttcagcggcagacagaagcacgtgagcggcatcaccgacaccgaggaggagagaatcaaggaggccgccgcctacatcgcccagagaaacctgctggccagcgaggagggcatcaccaccagcaagcagagcaccgccagcaagcagaccaccgccagcaagcagagcaccgccagcaagcagagcaccgccagcaagcagagcaccgccagcagacagagcaccgccagcagacagagcgtggtgagcaagcaggccaccagcgccctgcagcaggaggagaccagcgagaagaagagcagaaaggtggtgatcagagagaaggccgagagactgagcctgagaaagaccctggaggagaccgagacctaccacgccaagctgaacgaggaccacctgctgcacgcccccgagttcatcatcaagcccagaagccacaccgtgtgggagaaggagaacgtgaagctgcactgcagcatcgccggctggcccgagcccagagtgacctggtacaagaaccaggtgcccatcaacgtgcacgccaaccccggcaagtacatcatcgagagcagatacggcatgcacaccctggagatcaacggctgcgacttcgaggacaccgcccagtacagagccagcgccatgaacgtgaagggcgagctgagcgcctacgccagcgtggtggtgaagagatacaagggcgagttcgacgagaccagattccacgccggcgccagcaccatgcccctgagcttcggcgtgaccccctacggctacgccagcagattcgagatccacttcgacgacaagttcgacgtgagcttcggcagagagggcgagaccatgagcctgggctgcagagtggtgatcacccccgagatcaagcacttccagcccgagatccagtggtacagaaacggcgtgcccctgagccccagcaagtgggtgcagaccctgtggagcggcgagagagccaccctgaccttcagccacctgaacaaggaggacgagggcctgtacaccatcagagtgagaatgggcgagtactacgagcagtacagcgcctacgtgttcgtgagagacgccgacgccgagatcgagggcgcccccgccgcccccctggacgtgaagtgcctggaggccaacaaggactacatcatcatcagctggaagcagcccgccgtggacggcggcagccccatcctgggctacttcatcgacaagtgcgaggtgggcaccgacagctggagccagtgcaacgacacccccgtgaagttcgccagattccccgtgaccggcctgatcgagggcagaagctacatcttcagagtgagagccgtgaacaagatgggcatcggcttccccagcagagtgagcgagcccgtggccgccctggaccccgccgagaaggccagactgaagagcagacccagcgccccctggaccggccagatcatcgtgaccgaggaggagcccagcgagggcatcgtgcccggcccccccaccgacctgagcgtgaccgaggccaccagaagctacgtggtgctgagctggaagccccccggccagagaggccacgagggcatcatgtacttcgtggagaagtgcgaggccggcaccgagaactggcagagagtgaacaccgagctgcccgtgaagagccccagattcgccctgttcgacctggccgagggcaagagctactgcttcagagtgagatgcagcaacagcgccggcgtgggcgagcccagcgaggccaccgaggtgaccgtggtgggcgacaagctggacatccccaaggcccccggcaagatcatccccagcagaaacaccgacaccagcgtggtggtgagctgggaggagagcaaggacgccaaggagctggtgggctactacatcgaggccagcgtggccggcagcggcaagtgggagccctgcaacaacaaccccgtgaagggcagcagattcacctgccacggcctggtgaccggccagagctacatcttcagagtgagagccgtgaacgccgccggcctgagcgagtacagccaggacagcgaggccatcgaggtgaaggccgccatcggcggcggcgtgagccccgacgtgtgccccgccctgagcgacgagcccggcggcctgaccgccagcagaggcagagtgcacgaggccagcccccccaccttccagaaggacgccctgctgggcagcaagcccaacaagcccagcctgcccagcagcagccagaacctgggccagaccgaggtgagcaaggtgagcgagaccgtgcaggaggagctgaccccccccccccagaaggccgccccccagggcaagagcaagagcgaccccctgaagaagaagaccgacagagccccccccagccccccctgcgacatcacctgcctggagagcttcagagacagcatggtgctgggctggaagcagcccgacaagatcggcggcgccgagatcaccggctactacgtgaactacagagaggtgatcgacggcgtgcccggcaagtggagagaggccaacgtgaaggccgtgagcgaggaggcctacaagatcagcaacctgaaggagaacatggtgtaccagttccaggtggccgccatgaacatggccggcctgggcgcccccagcgccgtgagcgagtgcttcaagtgcgaggagtggaccatcgccgtgcccggccccccccacagcctgaagtgcagcgaggtgagaaaggacagcctggtgctgcagtggaagccccccgtgcacagcggcagaacccccgtgaccggctacttcgtggacctgaaggaggccaaggccaaggaggaccagtggagaggcctgaacgaggccgccatcaagaacgtgtacctgaaggtgagaggcctgaaggagggcgtgagctacgtgttcagagtgagagccatcaaccaggccggcgtgggcaagcccagcgacctggccggccccgtggtggccgagaccagacccggcaccaaggaggtggtggtgaacgtggacgacgacggcgtgatcagcctgaacttcgagtgcgacaagatgacccccaagagcgagttcagctggagcaaggactacgtgagcaccgaggacagccccagactggaggtggagagcaagggcaacaagaccaagatgaccttcaaggacctgggcatggacgacctgggcatctacagctgcgacgtgaccgacaccgacggcatcgccagcagctacctgatcgacgaggaggagctgaagagactgctggccctgagccacgagcacaagttccccaccgtgcccgtgaagagcgagctggccgtggagatcctggagaagggccaggtgagattctggatgcaggccgagaagctgagcggcaacgccaaggtgaactacatcttcaacgagaaggagatcttcgagggccccaagtacaagatgcacatcgacagaaacaccggcatcatcgagatgttcatggagaagctgcaggacgaggacgagggcacctacaccttccagctgcaggacggcaaggccaccaaccacagcaccgtggtgctggtgggcgacgtgttcaagaagctgcagaaggaggccgagttccagagacaggagtggatcagaaagcagggcccccacttcgtggagtacctgagctgggaggtgaccggcgagtgcaacgtgctgctgaagtgcaaggtggccaacatcaagaaggagacccacatcgtgtggtacaaggacgagagagagatcagcgtggacgagaagcacgacttcaaggacggcatctgcaccctgctgatcaccgagttcagcaagaaggacgccggcatctacgaggtgatcctgaaggacgacagaggcaaggacaagagcagactgaagctggtggacgaggccttcaaggagctgatgatggaggtgtgcaagaagatcgccctgagcgccaccgacctgaagatccagagcaccgccgagggcatccagctgtacagcttcgtgacctactacgtggaggacctgaaggtgaactggagccacaacggcagcgccatcagatacagcgacagagtgaagaccggcgtgaccggcgagcagatctggctgcagatcaacgagcccacccccaacgacaagggcaagtacgtgatggagctgttcgacggcaagaccggccaccagaagaccgtggacctgagcggccaggcctacgacgaggcctacgccgagttccagagactgaagaagagcctgctgttccagaaggacagagccagagtgctgggcggcctgcccgacgtggtgaccatccaggagggcaaggccctgaacctgacctgcaacgtgtggggcgaccccccccccgaggtgagctggctgaagaacgagaaggccctggccagcgacgaccactgcaacctgaagttcgaggccggcagaaccgcctacttcaccatcaacggcgtgagcaccgccgacagcggcaagtacggcctggtggtgaagaacaagtacggcagcgagaccagcgacttcaccgtgagcgtgttcatccccgaggaggaggccagaatggccgccctggagagcctgaagggcggcaagaaggccaagtag

SEQ ID NO: 140916 - DNA, 5847 bp, Artificial Sequence
  derived and/or modified sequence
ggcattatgcaattatattactaaggctgctacctgcccatgcccctctcctcctcctggtttggaactaccctccccatctgctgctatatttatctgccttcttggccataaaaggctggttgtgtggcctgacattcgactgcctgaccacatgcattatttttgaactggcccccagggtcctgtctttagccctgcctcttaacattgtcttggattcaacctaggtggagtcttcattctctcatccagctcctcggcctcatcggaacatttccaccaccattactcctttggaaactggtggcccggttccttcaaggggcacaggatgtctttgcctttttatcagaggtgccaccagcactatgatctcagctaccgcaacaaggacgtgcgcagcaccgtgagtcactaccagcgggagaagaaacgctccgccgtctacacccagggctccacggcctacagcagccgctcctccgccgcgcaccgccgggagtccgaggccttccgtcgggcgtccgcctcctcctcccagcagcaggcctcgcagcacgccctgagctctgaagtcagtcggaaggcagcctcagcctacgattatggctcctcccatggacttacagattccagtctgctgttagatgattattcatccaagttgagccccaaaccaaagagagccaagcacagcctactgtctggagaagagaaagaaaatttgcccagtgactacatggtacccattttctcaggacgtcaaaagcatgtcagtggaattactgatacggaagaagaaagaattaaagaagctgctgcttatatagcccagaggaatcttcttgctagtgaggaaggaatcacaacatctaaacagtccacggcatccaagcagaccacggcatctaagcagtccacggcatccaagcagtccacagcatccaagcagtccacggcatccaggcagtccacggcatccaggcagtctgtggtttccaaacaggccacatccgctcttcaacaggaagaaacttctgaaaagaagtcaaggaaagttgtgattcgagaaaaggcagaacgcctgtccctgaggaaaacattagaagaaaccgagacatatcatgccaagctgaatgaagaccatcttctccatgctcctgagtttatcattaaacctcgctcccacacggtttgggagaaggagaatgtaaaattgcattgctccatagcaggctggccagaacctcgtgtcacgtggtataaaaaccaggtgccaataaatgtccatgcaaaccctggaaagtatattattgagagtcgatatgggatgcacactctggagattaatggatgtgattttgaagatacagctcagtaccgggcctcggcgatgaatgttaaaggagagctttcggcatatgcttcagttgtggtaaaaaggtataagggagagtttgatgagactcgcttccacgctggggcttccaccatgcccctcagctttggtgtgaccccatatggttatgcatcccggtttgagatccactttgatgacaaatttgatgtgtcttttgggagagagggagagacaatgagtctaggctgtcgtgttgtcatcactcctgaaattaaacatttccagccagagatccagtggtacagaaacggagtacctctttctccatcaaaatgggtgcaaacactttggagtggagagcgggcaacgctgacattttcccatctcaacaaagaagatgaaggcctctatacaatccgtgtacggatgggagaatattatgaacaatatagtgcttatgtctttgttcgagatgctgatgcagagattgaaggagccccagctgctcccttggatgtgaagtgcttggaggccaacaaagattatatcatcatctcctggaaacagccagctgtcgatggagggagtcctattctcggatattttattgataagtgtgaggtgggcacagatagctggtcgcagtgcaatgacacacctgtgaagtttgctcgttttcctgtcactggattgatcgaaggtcgttcctatatcttccgagttcgagctgtgaataaaatgggaataggtttcccatctcgagtttccgagcccgtggctgctctggatccggctgagaaagctagacttaaaagtcgcccctcagcaccctggactggacagatcattgttactgaagaggaaccttcagagggtattgtgcctggccccccgacagacctctctgtcactgaggccacccggagctatgtggtgctcagctggaagccccctggccagcgtggtcatgagggcattatgtactttgtggaaaagtgtgaggcaggaacagaaaactggcagcgagtgaacacggagctccctgtgaagtctccccgctttgctctgtttgacttggccgaggggaaatcctactgtttccgtgtccgctgttctaattctgcaggagttggtgagccctcagaggcaacggaggtgactgtggtaggggacaaacttgatatccccaaggctcctggcaaaatcatcccaagcagaaacacagacacctcagtggtagtttcgtgggaggagtccaaagatgccaaagagctggtcgggtactacatagaggcgagcgttgctggctctggcaagtgggagccctgtaacaacaaccccgtgaagggctcacgattcacttgtcatggattagtgactggtcagagttatattttccgggtcagagcagtcaatgcagctggacttagtgaatattcccaggattcagaagctattgaagtcaaagctgctattgggggaggagtgtctccagatgtgtgtcccgcactgagcgatgagcctggtggactaaccgcctccagggggcgcgtgcatgaagcctccccgccaaccttccagaaagatgctttgcttggcagcaaacctaacaaaccttcactacccagtagctctcaaaacctgggccaaacagaagtgagtaaagtaagtgaaacagttcaggaagagcttaccccgccaccacagaaagcggctcctcaggggaaaagtaagtctgaccccctgaaaaagaagacagacagagcaccaccatctccaccctgtgatatcacctgtcttgaaagttttcgtgactcaatggttcttggatggaagcaaccagataagattggaggggcagaaattactggctattatgtgaactatcgcgaggtcattgatggggtaccaggaaaatggagagaagccaatgtcaaggctgtcagtgaggaggcatacaagattagcaacttgaaggaaaacatggtgtatcagttccaagtggcagccatgaacatggctgggctgggcgcgccctccgcagtaagcgaatgcttcaaatgtgaagagtggaccatcgccgtcccaggaccaccgcacagtctcaagtgtagtgaagtcaggaaagactcactggttctccagtggaagccgccagtccactccgggcggactccggtcactggttacttcgtggacttgaaggaggccaaggccaaagaagaccagtggcgagggctcaatgaggcggctattaaaaacgtatacctgaaggttcgaggcctcaaggagggcgtcagctacgtgttccgtgttcgagccataaaccaggcgggagttgggaagccatctgaccttgctggccctgttgtggcagagacccgtccaggaaccaaagaggttgttgtaaatgtggatgatgatggagtcatttcattgaacttcgagtgtgataagatgactccaaagtccgagttctcctggtccaaagattatgtatccactgaggactctccacgattggaagtcgaaagcaagggcaacaagacgaaaatgaccttcaaagaccttgggatggatgacttgggtatttactcttgcgatgtaacagacactgatggaatagcatcaagctacttaatagatgaggaagaattgaaacgtttacttgctctcagccatgaacacaagttcccaactgtcccagttaaatcagagttggcagttgaaattttggagaaaggccaggtccggttttggatgcaggctgagaaactgtctggcaatgccaaagtcaactacatatttaacgagaaggaaatttttgaaggcccgaaatataaaatgcatattgaccgaaacactggcatcatcgaaatgttcatggaaaagctacaggatgaggatgagggaacgtacactttccagcttcaagatggaaaagcaactaaccattctactgttgttctcgttggagatgttttcaaaaagctccagaaagaagctgaattccagcggcaagaatggatcaggaaacaaggtcctcactttgttgagtatttgagctgggaagtgactggtgaatgtaatgtactattgaaatgcaaggtggcaaatattaagaaggagactcatattgtgtggtacaaagatgagagggagatatcagtggatgaaaagcatgactttaaggatggtatatgtaccctgcttataacagagttttccaagaaagatgctgggatttatgaagttatcctgaaagatgaccgaggaaaagataagagcagactgaagcttgtggatgaagcctttaaggaactgatgatggaagtatgcaaaaaaatagctttgtctgctacagacctgaaaatccagagcacagccgagggcatccaactgtactcttttgtaacttactatgtggaggatttgaaagttaactggtcccacaatgggtccgccattaggtactcagacagagttaagaccggggtcactggagagcagatctggctacaaatcaacgagcccaccccgaatgacaaagggaagtatgtcatggagctctttgatggcaaaactggacatcagaagacagtggatctctctggacaagcatacgatgaggcctatgctgaattccagaggttgaaacaagctgccattgccgagaaaaatcgtgcccgggtgttgggaggtctcccagacgtggtcaccatccaggaggggaaggcccttaatctcacttgcaacgtgtggggagacccgcctccggaggtgtcgtggttgaagaacgagaaggccctggcctcagacgaccactgcaacctcaagttcgaggctgggaggaccgcgtacttcaccatcaacggcgtgagcaccgctgactcgggcaaatacgggctggttgtgaagaacaagtatggctcggagaccagcgacttcaccgtcagcgtgttcatcccagaggaggaggcgaggatggccgccttggagtccctgaaaggtggcaagaaggccaagtgaccggaggtgcgaggagagccagccggcctgtgtgacttgggtgtgaatggtttgggttaaggatgagacgtcttcatgctttctcctccctattattttctggcttgaggggaaaataatgtcaggtctttcactcatataaaaaagcaccaactaatgacactttaattgtttttctttatctacaaaattatgtgttaagaaaataccattcatagcatgaagattaggaaacagttttaaggagaagacttgaatgaagttggagggacattgaatgatggtcagagggcagacgaatgtgtcgtggggcgaattgggatttgctgcagctgtgaagccatggccgtgtctcgtgtgttgttacagaggtgatgtgcttttcgacgggcgcctcgtggcttggaacctcctctgtatgaataaacagttttcacgtctgtcctcttccccga

SEQ ID NO: 140917 - DNA, 5058 bp, Artificial Sequence
  derived and/or modified sequence
atgtccttgccattttaccaacgttgtcaccagcactatgatctgagttatagaaacaaggatgtcagatcaacagtttcacactaccagcgtgaaaagaaaaggtcagctgtctatacccagggatccacagcctattcgtcacgttctagcgcagctcaccggagggagagcgaggcgtttagacgtgctagcgccagttccagccagcagcaggcgtctcagcatgcactgtcctccgaggttagccgaaaagctgcaagcgcatatgattacggtagtagccacggactgacagatagctctttgctgctcgacgattattcctccaaactctcacccaaacccaagagagccaagcatagcctgttgtccggcgaggagaaagagaatctcccttcagattatatggtgcccatcttctcaggccgacagaagcatgtaagtggcattaccgatactgaggaggaaaggatcaaagaagcagcagcttatattgcccagagaaacctcttagcttccgaagagggaataactaccagcaagcagtccaccgcctccaagcagaccacagcctctaagcagtcaaccgcctccaaacagtctacagccagcaaacaatctactgcctcaaggcagtctacggctagcaggcaaagtgttgtaagcaagcaagcgacctcagccctgcagcaggaggagacgagtgagaagaagtcaaggaaggtcgtcataagagaaaaggccgaaaggctgagcctccgcaaaacgttggaagagacggaaacatatcatgccaagctgaatgaggaccatcttttgcacgctccagagtttatcatcaagccgcgctcacacactgtctgggaaaaggaaaacgtcaaactccactgtagtatcgccggctggcctgaaccgagggtgacctggtacaaaaatcaggtacctatcaacgttcacgccaaccctggcaaatacattatcgaatctcgatacgggatgcataccctcgagattaacggatgcgacttcgaggatactgctcaatatagggcctctgccatgaatgtgaagggagaactgtccgcatacgctagcgtggtggtgaaaagatataaaggtgagttcgacgagactcggtttcacgcaggtgcatcaaccatgcctctgtcttttggtgtaacgccttacggctatgcctcccggttcgagattcacttcgacgacaagtttgatgtttccttcgggagggaaggggagactatgtctctcgggtgtcgagtcgtgataaccccagaaattaagcacttccagcccgagatccagtggtaccgaaacggcgtacctctgtcgccttccaaatgggtgcagacgttgtggagtggggagcgcgctaccctcactttctcccacctgaacaaagaggatgaagggctctacacaatcagagttcggatgggggaatactatgagcaatattcagcttacgtctttgtacgtgatgcagatgccgaaatcgaaggggccccagcagcacctctggatgttaaatgcttggaagctaataaggactacatcattatatcgtggaagcagcctgcagtcgacggcggctctccaattcttgggtatttcatcgacaagtgcgaagtaggcacagattcatggtcacagtgcaacgatactcctgtgaagtttgcacggttcccagtgaccgggctgatcgagggccgtagctatatattccgagtacgtgccgttaacaagatgggtatcgggttcccttcccgagtttctgaaccggtggccgccttggatccagctgagaaagcccgcctcaagtctagacccagtgcgccttggactggacagattattgtaactgaagaagaacccagtgaaggcattgtgcccggacctccaactgacttgtccgtgactgaggccacgaggtcctacgtggttctatcatggaagccccccggacagaggggccatgagggcatcatgtattttgtcgaaaaatgtgaagcggggaccgagaactggcagcgcgtgaacacagagctgccagtgaaaagccctaggtttgcgttattcgatttagccgaaggaaagagttattgcttccgggtgagatgttctaattccgccggcgtgggagaaccaagcgaggctaccgaggtgacggtcgttggagacaagcttgatattccaaaggccccgggtaaaattattccttccaggaacactgacaccagcgtagtcgttagctgggaggagtctaaagacgccaaggaactagtgggctattatatcgaagcctcagttgcaggatctggcaagtgggagccgtgcaataataacccagtcaaaggcagtcgatttacttgccatggacttgtcaccggacagagttatattttccgggttcgggccgtgaacgccgccggccttagcgagtacagccaggactccgaagccatagaagtgaaagccgcgatcggcggcggcgtgagtccagatgtgtgtcctgcccttagtgatgagcctggcgggttaacggccagtaggggtcgagttcatgaggccagcccacccacattccagaaggacgcactgctcggctccaagccgaacaagccctcactaccaagctcatcgcaaaacttgggacagaccgaggtgtccaaggtttctgaaactgtgcaggaagagctgaccccacccccgcagaaagctgcaccccaaggtaagtctaaatcagaccccctgaagaagaaaactgatcgggcccctccttctcctccatgtgacatcacatgtttggaatcgtttcgcgatagcatggttctaggttggaagcagcctgacaagatcggtggcgccgaaattacaggctactatgttaactacagggaagtaatcgatggcgttcctgggaagtggagagaagctaatgtgaaggcagtctccgaggaggcctataagattagcaatctgaaggagaatatggtgtaccagttccaggtggcagctatgaatatggcgggtttaggggcaccgagtgccgtctctgagtgctttaagtgtgaggagtggactatcgcggtcccaggacctcctcactcccttaagtgctccgaggttcgcaaagattcgctcgtactccagtggaagccccccgttcacagcggtcgtacccctgtgacggggtacttcgtcgaccttaaagaagccaaagccaaagaggatcagtggcgcggcctcaatgaggctgccattaagaacgtttatttgaaggttcgtggccttaaagagggcgtgtcctacgtgtttcgcgtcagggccatcaaccaggctggcgtaggcaagccatctgatttggcgggtccggtagtagccgaaacaaggcctggcactaaagaagtggtcgtgaacgtggacgatgacggtgtgatctccctgaactttgagtgtgataagatgacacctaagtccgagttctcatggtcaaaagattacgtttcaacagaagatagccccaggcttgaggtggaatccaaagggaacaagacgaaaatgacctttaaggacctgggaatggatgaccttggcatttattcgtgcgatgtgacagataccgacggcatcgcaagctcatatctaattgatgaagaggagttaaagcgcttacttgcgctttcccacgaacataaattcccaacggtccccgtcaaatctgagctagccgtcgaaattttggaaaagggacaggtgcggttttggatgcaggccgagaaactgagtggaaatgccaaggtgaactatattttcaacgagaaagagatatttgaaggccctaagtataaaatgcacatcgataggaacacagggataatcgagatgtttatggagaaactccaggatgaggacgaggggacttatacctttcagcttcaggacggaaaggctacaaatcattccacagttgtactggtcggcgatgtcttcaaaaaactgcagaaagaggcggagtttcagaggcaagaatggatccggaagcagggcccccatttcgtagaatacctctcgtgggaagttacaggtgagtgcaatgtactcctgaaatgtaaggtcgctaacattaagaaggagactcacatagtctggtataaagatgagagagaaatttcagtggacgagaaacatgactttaaagatggaatctgtactctgctgatcacggagttcagtaaaaaggacgctggaatttacgaagtgatactgaaagacgatcgaggaaaagacaagagtcgccttaagctggtagatgaagcattcaaagagctgatgatggaagtgtgcaaaaagattgctctgtcagctacagacctgaaaatccagtctactgccgaggggatacagctctattctttcgttacttattatgtagaggacctgaaggtgaattggagtcacaatggaagtgctatccgctacagtgatcgggtgaagacaggcgtaacgggggagcagatttggctacagattaatgagcccacacctaacgacaagggtaaatacgtgatggaactcttcgatgggaaaaccgggcaccagaagactgtcgacctatccggccaggcgtatgacgaagcctatgccgagttccagagactgaaacaggccgccatcgccgaaaaaaaccgtgccagggtgttgggcggtttacccgacgtagtgaccatacaggaggggaaagctctcaatctgacatgtaatgtgtggggtgatccaccccctgaagtctcttggctgaagaatgagaaagcactggccagcgacgatcactgcaacttgaaattcgaggcaggacggactgcatatttcactatcaacggggtgagtactgctgactctggtaaatatgggctggtggtgaaaaacaagtatggctctgaaaccagcgatttcaccgtttcagtctttatccccgaagaggaagcacggatggccgccttagagtctttgaagggcggaaagaaagcaaagtag

SEQ ID NO: 140918 - DNA, 5058 bp, Artificial Sequence
  derived and/or modified sequence
atgtccctgcctttctaccagcgctgccaccaacactatgacctctcttacagaaataaagatgtgaggtctactgtgtctcattatcagcgggagaagaaacgttctgccgtgtacacacaagggtcaacagcttacagctcacggtccagtgcagcccatcggagggaatcagaggcgttccggagagcctccgccagctcttcacagcagcaggcctcccagcatgcgctgagcagcgaggtttcccggaaagcggcatccgcctatgattatggcagctcacacggcttaactgactcctccctcttattagacgattattcctccaaactcagccccaagcccaaaagggctaaacactccctgttaagcggcgaagaaaaggaaaacttgcctagcgactacatggttcctatatttagcggtcgccagaagcatgtcagcggcatcacagataccgaggaggagcggatcaaagaggctgctgcctatattgcgcagcggaaccttctggccagcgaagaaggcatcaccaccagcaagcagtccaccgcgtccaagcaaacgaccgcatctaagcagtccactgcttctaaacagtctactgcaagcaagcagagcactgcaagccgccagtccaccgctagtaggcaatctgtagtgagcaagcaggctacttcagctctgcaacaagaagagacttctgaaaaaaagtcgaggaaggtagtcattagggagaaagcagagagactgagcttgcgaaagaccctcgaggagaccgagacctatcatgccaaactgaatgaggatcacctactccatgccccggagtttattattaagcctcgctctcacaccgtgtgggaaaaggagaacgtcaagttacactgttctatcgcaggttggccggaaccccgcgtgacatggtataagaaccaggtccccatcaatgtgcatgctaatcccggaaaatacatcatcgagtcacgctatggcatgcataccctggagataaacggctgcgacttcgaagatacagcccaatatagagcctcggccatgaacgtgaagggggagttgtctgcttatgcaagcgtggtcgtaaagaggtataagggtgagtttgatgagacccgattccacgcaggcgcttccactatgcccctatcttttggagtcactccctatggctacgcttcgcgctttgagatccacttcgatgacaagttcgatgtgtcattcgggcgggagggagagaccatgtccctcgggtgtagggtggtgatcactccagagatcaagcactttcagccagaaattcagtggtacagaaacggcgtgcctctatcaccttctaagtgggtgcagactctgtggtccggggaaagagccaccctgaccttctcacacttaaacaaagaggacgaggggttgtacaccatcagggtaagaatgggtgaatactatgagcagtatagcgcctacgtattcgtgcgagacgccgacgcagaaattgaaggcgctcccgcagctcctctggatgtgaagtgtctggaggccaacaaggattatattattatttcctggaagcagcctgccgttgatggaggtagccccattctgggatacttcatagacaagtgcgaggttggcaccgactcatggagccaatgcaacgacactcccgtgaaatttgccagatttcccgtcaccgggctcatcgaagggcggagctatatatttcgggtgcgagcagtcaacaaaatgggtattgggtttcccagtagggtgtccgaaccagtcgctgccctggatccagcagagaaggctcggctgaagagccgacccagcgccccctggacagggcagattatcgtaaccgaagaagaaccttcagagggcatcgtgcccggtccacctaccgatctgtcagtcaccgaggcaacacgatcctatgtcgtactctcttggaagccccctgggcagcgtggacacgagggaatcatgtacttcgttgagaaatgcgaggctggtacagagaactggcagagggtcaacaccgagctccccgtgaagagtccacgattcgccctctttgacctcgccgaaggaaaatcttactgttttcgcgtccggtgcagcaacagtgccggcgtgggagagccttctgaggctaccgaggtgactgtggtgggcgataaactggacattccaaaagcgccgggaaagattattccttcacggaatacagatactagtgtggtggtaagttgggaggagtcaaaggacgctaaggagctggtgggctattacattgaagcttctgtagcagggtcaggcaagtgggagccttgcaataacaatcccgtgaaaggatcacgcttcacttgccacgggctggtgaccgggcagtcttacatcttccgtgtgcgtgctgtcaacgctgctggcttgtctgaatactcccaggattcagaggccattgaggttaaagctgccattggcggaggtgtgagccctgatgtgtgccctgcactgtctgatgagcctgggggcctcacggcctctcgcggccgcgtgcatgaagcgtcccctcccaccttccagaaagacgcactgttgggaagcaagcctaacaaaccgtcactcccttcgagcagccagaacctgggccagacagaagtgagtaaggtgtccgagactgtgcaggaagaattgacacctcctccacagaaggctgctccccagggtaaatctaaaagtgacccactcaaaaaaaaaaccgatcgagctccaccttctcccccctgtgatatcacgtgtctagagagtttcagagacagcatggtgctgggatggaaacagcctgacaagatcggaggcgccgagattacgggttactatgtcaattaccgagaagttattgacggtgtgcctgggaaatggcgggaggccaacgtgaaagctgtctccgaggaggcatataagatctctaatttgaaagaaaatatggtctaccagttccaggtggccgctatgaacatggctgggctcggagcaccctccgccgtcagcgagtgtttcaagtgtgaggaatggaccatcgccgtgccagggccccctcactccttgaagtgctccgaggtacggaaagatagtcttgtactccagtggaagcctcccgtgcatagtggcaggacccccgtgactggctacttcgtggatttgaaggaagctaaagccaaagaagatcagtggcggggactgaacgaggctgccataaaaaatgtgtacctgaaagtcagaggtctcaaagagggagtcagttacgtcttccgggtgcgcgccataaatcaggccggcgtggggaaaccgtccgacctggctggacctgtagtggcggagaccaggccaggcactaaagaggttgttgtgaacgtggacgacgacggggtgatcagcctaaactttgagtgcgacaaaatgaccccaaagtccgagttttcctggtccaaggactacgtaagcaccgaggattctccccgtctggaagtcgagagtaaaggaaacaaaacaaaaatgacttttaaggatttagggatggacgacctagggatctacagttgtgacgtgacagacactgatgggattgcctcgtcttaccttattgacgaggaggaattgaaacgcctccttgcactctctcacgaacataagttccccacggtgccagtcaaatctgagcttgctgtagagatcttagagaaaggtcaggtgagattttggatgcaggcagaaaaattgagcgggaatgcaaaagtgaactatatcttcaatgagaaagaaatctttgaaggccctaagtataagatgcatatcgataggaacaccggtatcattgagatgtttatggaaaaactgcaggatgaggatgaagggacttacaccttccagctccaagacgggaaggctactaaccactctaccgttgtcctagtgggcgacgtgtttaaaaagcttcagaaggaagcggagttccaacggcaagagtggattaggaaacaaggacctcacttcgttgagtatctcagttgggaggtgaccggagaatgtaatgtgctacttaaatgtaaagtggcaaatataaagaaagaaacccacatagtgtggtacaaggatgagcgagagattagcgtcgacgagaaacacgacttcaaggatggtatatgtactttgcttattacagagttctctaagaaggacgccggaatctatgaggtgattctgaaggacgaccgtggcaaggacaagagcaggctgaagcttgtggacgaggcatttaaggaactcatgatggaggtgtgcaaaaagattgctctctccgctacagacttaaaaatccagtctaccgccgagggcatccaactatactcatttgtgacttactacgtggaggacctcaaagttaattggagccataacggctcggccataagatactctgatagagttaagaccggcgttacaggggagcagatatggttgcagattaacgaacccacgcccaacgacaagggaaaatacgtcatggagctgtttgacgggaagaccggtcatcagaagacagtcgatttgtcaggacaggcctatgacgaggcctacgccgaattccaacggttgaagaagagcctgctgttccaaaaggatagagcccgcgttctgggcggcctccccgacgtcgtcaccatccaggaaggaaaagccctgaatctgacatgtaatgtgtggggggacccaccgccagaggtgagctggcttaaaaacgagaaagctctggcaagcgatgaccactgcaaccttaagtttgaagcaggacggacggcatacttcacaatcaatggtgtgtcaaccgcagacagtggaaagtatggactcgtggtaaagaacaagtacgggagcgagacgtctgatttcactgtatcagtcttcatcccggaagaagaagccaggatggctgccctcgaaagcctgaaaggcgggaagaaggccaagtag

SEQ ID NO: 140919 - DNA, 5058 bp, Artificial Sequence
  derived and/or modified sequence
atgagcctgcccttctaccagcgctgccaccagcactatgacctgagctacagaaacaaggatgtgcgcagcacagtgagccactaccagcgggagaagaagaggtctgctgtgtacacccagggcagcacagcctacagcagccgcagcagcgctgcccacagaagagagagcgaggccttccggcgggccagcgccagcagcagccagcagcaggccagccagcacgccctgagcagcgaggtgtccaggaaggccgccagcgcctatgactatggcagcagccacggcctgacagacagcagcctgctgctggatgactacagcagcaagctgagccccaagcccaagagggccaagcacagcctgctgtctggagaggagaaggagaacctgcccagcgactacatggtgcccatcttcagcggccggcagaagcacgtgtctggcatcacagacacagaggaggagcgcatcaaggaggccgccgcctacatcgcccagaggaacctgctggccagcgaggagggcatcaccaccagcaagcagagcacagccagcaagcagaccacagccagcaagcagagcacagccagcaagcagagcacagccagcaagcagagcacagccagccggcagagcacagccagccggcagagcgtggtgtccaagcaggccaccagcgccctgcagcaggaggagaccagcgagaagaagagcaggaaggtggtgatccgggagaaggccgagcggctgagcctgaggaagaccctggaggagacagagacctaccacgccaagctgaatgaagaccacctgctgcacgcccctgagttcatcatcaagcccaggagccacacagtgtgggagaaggaaaatgtgaagctgcactgcagcattgctggctggccagagccccgggtgacctggtacaagaaccaggtgcccatcaacgtgcacgccaaccctgggaagtacatcatcgagagccgctatggcatgcacaccctggagatcaatggctgtgactttgaggacacagcccagtaccgggccagcgccatgaatgtgaagggggagctgagcgcctatgcctctgtggtggtgaagcgctacaagggggagtttgatgagacccgcttccacgccggggccagcaccatgcccctgagctttggagtgaccccctacggctacgccagcagatttgagatccactttgatgacaagtttgatgtgtcctttggccgggagggggagaccatgagcctgggctgccgggtggtgatcaccccagagatcaagcacttccagcctgagatccagtggtacagaaatggagtgcccctgagccccagcaagtgggtgcagaccctgtggagcggggagcgggccaccctgaccttcagccacctgaacaaggaggatgagggcctgtacaccatccgggtgaggatgggagagtactatgagcagtacagcgcctacgtgtttgtgagagatgctgatgctgagattgagggcgccccagctgcccccctggatgtgaagtgcctggaggccaacaaggactacatcatcatctcctggaagcagcctgctgtggatggcggcagccccatcctgggctacttcatcgacaagtgtgaggtgggcacagacagctggagccagtgcaatgacacccctgtgaagtttgcccgcttccctgtgacaggcctgattgagggccgcagctacatcttccgggtgcgggctgtgaacaagatgggcatcggcttccccagccgggtgtctgagcctgtggccgccctggaccctgctgagaaggcccggctgaagagccggcccagcgccccctggacaggccagatcatcgtgacagaggaggagcccagcgagggcatcgtgcccggccccccaacagacctgtctgtgacagaggccaccaggagctatgtggtgctgtcctggaagcccccaggccagaggggccacgagggcatcatgtactttgtggagaagtgtgaggccggcacagagaactggcagagggtgaacacagagctgcctgtgaagagccccaggtttgccctgtttgacctggccgagggcaagagctactgcttccgggtgcgctgcagcaacagcgctggggtgggggagcccagcgaggccacagaggtgacagtggtgggggacaagctggacatccccaaggcccctgggaagatcatccccagcaggaacacagacacctctgtggtggtgtcctgggaggagagcaaggatgccaaggagctggtgggctactacatcgaggcctctgtggccggcagcggcaagtgggagccctgcaacaacaaccctgtgaagggcagccgcttcacctgccacggcctggtgacaggccagagctacatcttccgggtgcgggctgtgaatgctgctggcctgtctgagtacagccaggacagcgaggccatcgaggtgaaggccgccatcggcggcggcgtgtccccagatgtgtgcccagccctgagtgatgagcccggcggcctgacagccagccggggccgggtgcatgaggccagcccccccaccttccagaaggatgccctgctgggcagcaagcccaacaagcccagcctgcccagcagcagccagaacctgggccagacagaggtgtccaaggtgtctgagaccgtgcaggaggagctgaccccaccaccccagaaggccgccccccagggcaagagcaagagtgaccccctgaagaagaagacagaccgggccccacccagccccccctgtgacatcacctgcctggagagcttccgggacagcatggtgctgggctggaagcagcctgacaagattggaggagctgagatcaccggctactacgtgaactaccgggaggtgattgatggagtgcctgggaagtggagggaggccaacgtgaaggctgtgtctgaggaggcctacaagatcagcaacctgaaggagaacatggtgtaccagttccaggtggccgccatgaacatggccggcctgggcgcccccagcgctgtgtctgagtgcttcaagtgtgaggagtggaccatcgctgtgcccggccccccccacagcctgaagtgcagcgaggtgaggaaggacagcctggtgctgcagtggaagccccctgtgcacagcggccgcacccctgtgacaggctactttgtggacctgaaggaggccaaggccaaggaggaccagtggaggggcctgaatgaagctgccatcaagaatgtgtacctgaaggtgcggggcctgaaggagggcgtgtcctatgtgttccgggtgcgggccatcaaccaggccggcgtgggcaagcccagcgacctggccggccctgtggtggccgagaccaggcctggcaccaaggaggtggtggtgaatgtggatgatgatggagtcatcagcctgaactttgaatgtgacaagatgacccccaagtctgagttctcctggagcaaggactatgtgtccacagaggacagcccccggctggaggtggagagcaaaggaaacaagaccaagatgaccttcaaggacctgggcatggatgacctgggcatctacagctgtgatgtgacagacacagatggcatcgccagcagctacctgattgatgaggaggagctgaagaggctgctggccctgagccatgagcacaagttccccaccgtgcctgtgaagtctgagctggccgtggagatcctggagaagggccaggtgcgcttctggatgcaggccgagaagctgtctggaaatgccaaggtgaactacatcttcaatgagaaggagatctttgagggccccaagtacaagatgcacatcgacaggaacacaggcatcatcgagatgttcatggagaagctgcaggatgaagatgagggcacctacaccttccagctgcaggacggcaaggccaccaaccacagcacagtggtgctggtgggagatgtgttcaagaagctgcagaaggaggccgagttccagaggcaggagtggatcaggaagcagggcccccactttgtggagtacctgtcctgggaggtgactggagaatgtaatgtgctgctgaagtgcaaggtggccaacatcaagaaggagacccacatcgtgtggtacaaggatgagcgggagatctctgtggatgagaagcatgacttcaaggatggcatctgcaccctgctgatcacagagttcagcaagaaggatgctggcatctatgaggtgatcctgaaggatgaccggggcaaggacaagagccggctgaagctggtggatgaggccttcaaggagctgatgatggaggtgtgcaagaagatcgccctgagcgccacagacctgaagatccagagcacagctgagggcatccagctgtacagctttgtgacctactacgtggaggacctgaaggtgaactggagccacaatggaagtgccatccgctacagcgacagagtgaagacaggagtgactggagagcagatctggctgcagatcaatgagcccaccccaaatgacaagggcaagtatgtgatggagctgtttgatggcaagacaggccaccagaagacagtggacctgagcggccaggcctatgatgaggcctatgcagagttccagaggctgaagcaggccgccatcgccgagaagaacagagcccgggtgctgggcggcctgcctgatgtggtgaccatccaggagggcaaggccctgaacctgacctgcaatgtgtggggagaccccccacctgaggtgtcctggctgaagaatgagaaggccctggccagtgatgaccactgcaacctgaagtttgaagctggccgcacagcctacttcaccatcaacggggtgtccacagctgacagcggcaagtatggcctggtggtgaagaacaagtatggcagcgagaccagtgacttcaccgtgtctgtgttcatccctgaggaggaggccaggatggccgccctggagagcctgaagggcggcaagaaggccaagtag

SEQ ID NO: 140920 - DNA, 5058 bp, Artificial Sequence
  derived and/or modified sequence
atgagcctgcccttctaccagcgctgccaccagcactatgacctgagctacagaaacaaggatgtgcgcagcacagtgagccactaccagcgggagaagaagaggtctgctgtgtacacccagggcagcacagcctacagcagccgcagcagcgctgcccacagaagagagagcgaggccttccggcgggccagcgccagcagcagccagcagcaggccagccagcacgccctgagcagcgaggtgtccaggaaggccgccagcgcctatgactatggcagcagccacggcctgacagacagcagcctgctgctggatgactacagcagcaagctgagccccaagcccaagagggccaagcacagcctgctgtctggagaggagaaggagaacctgcccagcgactacatggtgcccatcttcagcggccggcagaagcacgtgtctggcatcacagacacagaggaggagcgcatcaaggaggccgccgcctacatcgcccagaggaacctgctggccagcgaggagggcatcaccaccagcaagcagagcacagccagcaagcagaccacagccagcaagcagagcacagccagcaagcagagcacagccagcaagcagagcacagccagccggcagagcacagccagccggcagagcgtggtgtccaagcaggccaccagcgccctgcagcaggaggagaccagcgagaagaagagcaggaaggtggtgatccgggagaaggccgagcggctgagcctgaggaagaccctggaggagacagagacctaccacgccaagctgaatgaagaccacctgctgcacgcccctgagttcatcatcaagcccaggagccacacagtgtgggagaaggaaaatgtgaagctgcactgcagcattgctggctggccagagccccgggtgacctggtacaagaaccaggtgcccatcaacgtgcacgccaaccctgggaagtacatcatcgagagccgctatggcatgcacaccctggagatcaatggctgtgactttgaggacacagcccagtaccgggccagcgccatgaatgtgaagggggagctgagcgcctatgcctctgtggtggtgaagcgctacaagggggagtttgatgagacccgcttccacgccggggccagcaccatgcccctgagctttggagtgaccccctacggctacgccagcagatttgagatccactttgatgacaagtttgatgtgtcctttggccgggagggggagaccatgagcctgggctgccgggtggtgatcaccccagagatcaagcacttccagcctgagatccagtggtacagaaatggagtgcccctgagccccagcaagtgggtgcagaccctgtggagcggggagcgggccaccctgaccttcagccacctgaacaaggaggatgagggcctgtacaccatccgggtgaggatgggagagtactatgagcagtacagcgcctacgtgtttgtgagagatgctgatgctgagattgagggcgccccagctgcccccctggatgtgaagtgcctggaggccaacaaggactacatcatcatctcctggaagcagcctgctgtggatggcggcagccccatcctgggctacttcatcgacaagtgtgaggtgggcacagacagctggagccagtgcaatgacacccctgtgaagtttgcccgcttccctgtgacaggcctgattgagggccgcagctacatcttccgggtgcgggctgtgaacaagatgggcatcggcttccccagccgggtgtctgagcctgtggccgccctggaccctgctgagaaggcccggctgaagagccggcccagcgccccctggacaggccagatcatcgtgacagaggaggagcccagcgagggcatcgtgcccggccccccaacagacctgtctgtgacagaggccaccaggagctatgtggtgctgtcctggaagcccccaggccagaggggccacgagggcatcatgtactttgtggagaagtgtgaggccggcacagagaactggcagagggtgaacacagagctgcctgtgaagagccccaggtttgccctgtttgacctggccgagggcaagagctactgcttccgggtgcgctgcagcaacagcgctggggtgggggagcccagcgaggccacagaggtgacagtggtgggggacaagctggacatccccaaggcccctgggaagatcatccccagcaggaacacagacacctctgtggtggtgtcctgggaggagagcaaggatgccaaggagctggtgggctactacatcgaggcctctgtggccggcagcggcaagtgggagccctgcaacaacaaccctgtgaagggcagccgcttcacctgccacggcctggtgacaggccagagctacatcttccgggtgcgggctgtgaatgctgctggcctgtctgagtacagccaggacagcgaggccatcgaggtgaaggccgccatcggcggcggcgtgtccccagatgtgtgcccagccctgagtgatgagcccggcggcctgacagccagccggggccgggtgcatgaggccagcccccccaccttccagaaggatgccctgctgggcagcaagcccaacaagcccagcctgcccagcagcagccagaacctgggccagacagaggtgtccaaggtgtctgagaccgtgcaggaggagctgaccccaccaccccagaaggccgccccccagggcaagagcaagagtgaccccctgaagaagaagacagaccgggccccacccagccccccctgtgacatcacctgcctggagagcttccgggacagcatggtgctgggctggaagcagcctgacaagattggaggagctgagatcaccggctactacgtgaactaccgggaggtgattgatggagtgcctgggaagtggagggaggccaacgtgaaggctgtgtctgaggaggcctacaagatcagcaacctgaaggagaacatggtgtaccagttccaggtggccgccatgaacatggccggcctgggcgcccccagcgctgtgtctgagtgcttcaagtgtgaggagtggaccatcgctgtgcccggccccccccacagcctgaagtgcagcgaggtgaggaaggacagcctggtgctgcagtggaagccccctgtgcacagcggccgcacccctgtgacaggctactttgtggacctgaaggaggccaaggccaaggaggaccagtggaggggcctgaatgaagctgccatcaagaatgtgtacctgaaggtgcggggcctgaaggagggcgtgtcctatgtgttccgggtgcgggccatcaaccaggccggcgtgggcaagcccagcgacctggccggccctgtggtggccgagaccaggcctggcaccaaggaggtggtggtgaatgtggatgatgatggagtcatcagcctgaactttgaatgtgacaagatgacccccaagtctgagttctcctggagcaaggactatgtgtccacagaggacagcccccggctggaggtggagagcaaaggaaacaagaccaagatgaccttcaaggacctgggcatggatgacctgggcatctacagctgtgatgtgacagacacagatggcatcgccagcagctacctgattgatgaggaggagctgaagaggctgctggccctgagccatgagcacaagttccccaccgtgcctgtgaagtctgagctggccgtggagatcctggagaagggccaggtgcgcttctggatgcaggccgagaagctgtctggaaatgccaaggtgaactacatcttcaatgagaaggagatctttgagggccccaagtacaagatgcacatcgacaggaacacaggcatcatcgagatgttcatggagaagctgcaggatgaagatgagggcacctacaccttccagctgcaggacggcaaggccaccaaccacagcacagtggtgctggtgggagatgtgttcaagaagctgcagaaggaggccgagttccagaggcaggagtggatcaggaagcagggcccccactttgtggagtacctgtcctgggaggtgactggagaatgtaatgtgctgctgaagtgcaaggtggccaacatcaagaaggagacccacatcgtgtggtacaaggatgagcgggagatctctgtggatgagaagcatgacttcaaggatggcatctgcaccctgctgatcacagagttcagcaagaaggatgctggcatctatgaggtgatcctgaaggatgaccggggcaaggacaagagccggctgaagctggtggatgaggccttcaaggagctgatgatggaggtgtgcaagaagatcgccctgagcgccacagacctgaagatccagagcacagctgagggcatccagctgtacagctttgtgacctactacgtggaggacctgaaggtgaactggagccacaatggaagtgccatccgctacagcgacagagtgaagacaggagtgactggagagcagatctggctgcagatcaatgagcccaccccaaatgacaagggcaagtatgtgatggagctgtttgatggcaagacaggccaccagaagacagtggacctgagcggccaggcctatgatgaggcctatgcagagttccagaggctgaagaagagcctgctcttccagaaggaccgggcccgggtgctgggcggcctgcctgatgtggtgaccatccaggagggcaaggccctgaacctgacctgcaatgtgtggggagaccccccacctgaggtgtcctggctgaagaatgagaaggccctggccagtgatgaccactgcaacctgaagtttgaagctggccgcacagcctacttcaccatcaacggggtgtccacagctgacagcggcaagtatggcctggtggtgaagaacaagtatggcagcgagaccagtgacttcaccgtgtctgtgttcatccctgaggaggaggccaggatggccgccctggagagcctgaagggcggcaagaaggccaagtag

SEQ ID NO: 140921 - DNA, 5058 bp, Artificial Sequence
  derived and/or modified sequence
atgagcctgcccttctaccagcggtgccaccagcactacgacctgtcctaccggaataaggatgtgcgctccaccgtgagtcactatcagcgagaaaaaaaacgatctgccgtctacactcagggaagcactgcttactcgtcacgctcttcagctgctcataggcgagagtctgaggcctttcggcgcgccagtgcgtcaagtagccagcagcaggcttctcagcacgctctgtcgtcagaggtgtcaaggaaggccgcctcagcttatgactacggttccagccacggactgactgacagctcactcttactcgatgactacagcagtaagctctccccgaaacccaagcgcgcaaagcacagcctcttgtccggcgaagaaaaggagaacctaccctctgactatatggtgcctattttctcgggacggcagaagcacgtcagtgggatcaccgacacagaagaagagcgcatcaaagaagctgcggcctatatcgctcagcggaatctcctggccagcgaggaggggattaccacctctaagcagtcaacagcttcaaagcagactacggcttcaaaacagtcgactgctagtaaacagtctaccgccagcaaacagagcaccgccagtcggcagtcaactgcttcccgacagtccgtcgtttcaaaacaagctactagcgccctccaacaggaagagacttctgagaagaagagcaggaaagtagttatcagagaaaaagcagagcggctctcccttagaaagactttggaggaaacagaaacgtatcatgccaagctcaatgaagatcacctcttacacgcaccggagtttattatcaaacctagaagtcacaccgtgtgggagaaagagaatgtgaagttgcactgttcaattgctggatggcctgaaccgcgcgtcacttggtataaaaaccaggtgccaattaatgtacatgccaaccccgggaagtatataattgagtctagatacgggatgcacactctcgaaatcaatggctgtgacttcgaagacaccgcacagtaccgagcctcagctatgaacgtcaagggagaactctctgcctatgccagcgtggtggtaaaaagatataaaggtgaatttgacgagacccgcttccatgccggggcgtctaccatgccactgtcattcggagtgactccttacggctacgcaagtaggtttgagatacacttcgacgataaatttgacgtgtcttttggcagggagggtgaaacaatgagtctggggtgtagggttgtcattacgcccgagatcaaacatttccagcctgaaatccagtggtacagaaatggagtaccgctcagccctagtaaatgggttcagacactgtggtctggtgagcgagctaccctgaccttctcccatctaaataaagaagacgaggggctgtacaccatccgtgtacgcatgggtgagtattatgaacagtattcggcatacgtttttgtgcgggacgctgacgccgaaatcgagggcgctcctgccgcacctcttgatgtgaagtgcttagaagctaataaagattacataatcatatcttggaaacagcctgccgttgatggggggagccccatacttgggtacttcattgacaagtgcgaagttgggaccgacagttggagtcagtgcaacgatacaccagtaaaatttgcacggtttcctgtgactggccttatcgaaggacggtcctacatcttccgagtccgggcagtgaacaaaatggggatcggttttccatctcgtgtgagtgagccagtggctgccttggaccctgccgagaaagcccgcttgaaatccagaccgtccgccccatggactgggcagattatagtcactgaggaagaacccagcgagggaatagtcccaggacctccgaccgatctgtctgtcacagaggccacacgatcttacgtcgtactaagctggaagcctccaggacagcggggccacgaggggataatgtattttgtagaaaagtgtgaagccgggaccgagaactggcaacgggtgaatacagaattgccggtgaaaagtccccgattcgccctttttgatcttgctgagggtaaatcctattgctttagggttaggtgctccaatagcgcgggagtcggtgaaccaagcgaagcgaccgaggtaacggtggtcggggataaactggacattcccaaggctccgggaaaaatcatcccttctagaaataccgacacgtcagtggtcgtgtcctgggaagagtccaaggacgccaaggagctcgtcgggtattacattgaagccagtgtggctggttcaggtaaatgggagccctgcaataacaatcctgtgaaaggctcccgcttcacctgccacgggcttgtgacggggcagtcatacatattccgcgtccgcgccgtgaatgcagccggtctgagcgagtactcgcaagactctgaggccatcgaggtcaaggccgctatagggggcggagtctcacctgatgtgtgcccagctctgagcgatgagccaggaggcctcaccgcatcccgcgggcgagtacacgaagcatcacctccaacttttcagaaggatgccctgctgggatccaagcctaataagccctccctgcctagttcatcccagaatcttggccagacggaagtgagcaaggtctcagaaactgtgcaggaagagctcacccctcccccccaaaaagctgccccgcaaggaaagtccaaaagtgatccacttaagaagaaaaccgaccgggcccctccctcccccccttgcgatattacatgccttgagtccttcagagactctatggtgcttggatggaaacagccggataaaattggaggcgctgaaatcactggttactatgtgaattaccgggaggtgatcgatggagttcctggtaaatggagggaggccaacgttaaggccgtgagcgaggaggcctataagatctcgaatctgaaagagaatatggtgtatcagttccaggttgccgctatgaatatggctggcctgggagcccccagcgcggtcagcgagtgctttaagtgcgaggagtggaccattgccgttccaggtccaccgcatagtttaaaatgttctgaggtgcgcaaagattcactagtcttacagtggaagcctccagtgcatagcggtagaacgccggtcaccggctattttgtggacctaaaggaggccaaagcgaaggaggaccaatggagggggctgaatgaggctgccatcaagaatgtatacctcaaggtaagagggttaaaggagggcgtgtcctatgttttccgggtacgggcaatcaaccaagctggcgtgggcaagccctctgacctggccggtcctgtggtggctgagaccaggccaggaacgaaagaggtggtggtgaatgttgacgacgacggcgtgatctctcttaattttgaatgtgacaaaatgacccctaagtcagaattcagctggtccaaggattatgtctctaccgaagatagcccgaggctggaggtggagagcaaagggaacaagacaaaaatgacgttcaaggacctggggatggacgacctcggcatctactcctgtgacgtgacagataccgacggaatcgcatccagttaccttattgacgaagaagagttgaaaagactcctggccctgtcccatgagcacaagtttcctacagtacctgtcaagagcgaactggctgttgaaatactcgagaaagggcaggtgcggttctggatgcaggcagaaaaactgagcgggaatgccaaagttaactatatttttaatgagaaggagatatttgaaggacctaaatacaagatgcacattgaccggaataccggcataattgaaatgtttatggaaaagcttcaggatgaagacgaagggacttacacctttcagctccaggatggcaaggctacaaaccattcgaccgtagtacttgtgggggacgtgtttaaaaagttacagaaagaggccgagttccagagacaggagtggatccgaaaacaggggcctcactttgtggagtatctgagttgggaggtcaccggagagtgcaacgtcctgttaaaatgcaaggttgccaatattaaaaaggaaactcacatcgtatggtataaggacgagcgcgaaatcagcgtggatgagaagcacgactttaaagacggaatctgtacgctcctcatcaccgagttctctaagaaggatgcgggcatttacgaggtgatactcaaggatgatcggggaaaggataaatctcggcttaaactggtggacgaagcattcaaggaacttatgatggaagtctgtaagaagattgccctgagcgctactgatctcaagattcaatcaaccgccgagggcattcagctctactcatttgtgacctattatgttgaagacttgaaggtgaactggagtcataatggctctgccatacggtactccgaccgcgtcaagaccggggtgacaggagagcagatatggctccagattaacgagcccacccctaacgataagggcaaatacgtcatggagctgtttgacggcaaaactggccaccaaaaaaccgttgatctgtcaggacaggcctatgatgaggcgtacgccgagttccagagactgaagcaagctgctatcgcagaaaaaaatcgggcccgggtcctgggtgggctccctgacgtggtcaccattcaggaagggaaggctttaaacttgacatgtaatgtctggggcgaccccccccccgaagtgagctggctgaaaaacgagaaagctttggcttcagacgaccactgtaatctgaaattcgaagccggcaggacagcatactttaccattaacggtgtgtcaactgcagattccgggaaatatggtctggtcgtgaaaaataaatatggtagcgagaccagcgatttcaccgtgtctgtctttatcccagaagaagaggccagaatggccgcactggagagtcttaagggggggaaaaaggccaagtag

SEQ ID NO: 140922 - DNA, 5058 bp, Artificial Sequence
  derived and/or modified sequence
atgagcctgcccttctaccagcggtgccaccagcactacgacctgagttaccgcaataaagacgtgcgatccaccgtatcacattaccagcgcgagaagaagagaagtgccgtgtatacacaggggagcacagcctactcatcccggtcgtcagcagcacatcgcagagagtctgaggcgttcagaagagcctctgcatcctcatcccaacaacaagcctctcagcacgccctgtccagcgaggtgtcgcgtaaggccgcctctgcctacgactatggcagctcccacggcctcactgacagtagtctgcttctggacgactattcttccaagctctcacccaagcccaaaagggcgaagcatagcctgctctccggtgaagagaaagagaacctcccgtcagactatatggtacccattttctctgggcgacagaaacatgtgtctggcatcacagatacggaggaagaaagaatcaaggaggctgctgcctacattgcccagagaaatctgctcgctagtgaggagggaatcaccacatccaagcagagtaccgccagcaagcagaccacggctagtaaacagtctacagcctctaagcagtccactgcctccaaacagagcactgcttcaaggcagagcaccgcctcccggcagagtgtagtgtccaaacaagcaaccagtgcgctgcaacaggaggaaacatccgagaagaaatcccgaaaggttgtgatccgagaaaaggccgagcgcctctcacttagaaaaaccctggaagagacagaaacgtaccatgccaaactcaatgaagaccacttgctgcacgccccagaatttatcatcaaaccaagatctcatacagtgtgggaaaaggaaaacgtgaaactacactgttcaatcgctggatggcctgagcccagggtgacatggtacaagaaccaggtgcccattaatgttcacgccaacccaggtaaatacatcattgagtccaggtacgggatgcacactctcgagataaatggctgcgatttcgaagacaccgcacaatacagagccagcgctatgaacgtaaaaggtgaattgagcgcgtatgcgtcagtggtggttaagcgctacaagggggagttcgacgaaacaaggtttcacgctggagcgtcaacaatgccactttcctttggggtgaccccctacgggtatgcaagccggttcgagattcacttcgatgacaaatttgacgtctcatttggccgggagggcgagacaatgtccctgggatgtcgggtggtaattactcccgagataaagcattttcagccagagatccagtggtatcggaatggggtccctttgagcccctctaagtgggtgcaaacgctctggagcggagaaagagctacattgacttttagccatctgaataaggaagatgaaggcctgtatacaattagagtgcgtatgggtgaatactatgagcaatatagcgcatatgtctttgtcagagatgccgacgccgagatcgaaggcgctcctgccgcccccctggacgtgaaatgcctggaagcgaacaaagattacatcataatcagttggaagcagcccgccgtcgatggagggtccccgattctgggatactttattgacaagtgtgaggttggtacagactcatggtcacagtgtaacgacactcctgtgaagttcgcccgattccctgtaactggtttaatcgagggtcggagctatatttttagggtgcgcgccgtgaataagatggggatcggctttccatcccgcgtctctgagcccgtcgccgccctggatccagccgagaaggcacggcttaagtcccgcccgagcgcgccgtggacgggccagattattgtaacggaagaagagccatcagaggggattgtgccaggccctcctaccgacctgagtgtaaccgaggccaccagaagttatgtggtactctcttggaagccgccgggccagcgggggcatgaaggcatcatgtatttcgtggaaaaatgcgaggctggcacggagaattggcaacgggtaaataccgagctccccgttaaaagccctcgcttcgctttgttcgatctggcagaaggaaagagctactgctttcgggtgcgttgcagcaattcggcaggggtgggagagccaagcgaggctaccgaagtcactgtagtcggcgacaagcttgatatccctaaggcccccgggaaaatcattccatcaaggaatactgacacctctgttgtggtgtcatgggaggagtcaaaggacgccaaggagttggttggctactacattgaggcttctgtcgcaggctcaggaaaatgggaaccctgcaacaataatcccgtgaagggaagccgtttcacatgtcacggcctcgtcacaggtcaatcctatatttttcgggtgagagctgttaacgcagccggtcttagtgaatacagtcaggacagtgaagctatcgaagtgaaggctgctatcggtggcggagtctctcctgacgtttgccccgctttatctgacgagccaggcggtctgaccgccagtcgaggccgggtccacgaagccagcccccccacctttcaaaaggacgcgctcctgggatccaagcctaacaagcctagtcttccatcctccagccagaacctgggccaaaccgaggtttcgaaagtttccgaaaccgtgcaggaagagctgaccccacccccccaaaaagctgctccacagggcaaatctaaaagcgacccgctcaagaagaaaactgatcgagctcctccctctcctccatgtgatattacctgtctagaatcttttcgtgacagtatggtgttgggatggaaacagccagacaaaattggaggcgctgagataacaggctattacgtgaattaccgggaggtcattgatggcgtacccggaaaatggagggaagcaaatgttaaggctgtgtccgaagaggcttacaagatctcaaacctgaaagaaaatatggtgtatcagttccaggttgctgccatgaacatggcaggcttaggcgcgccatctgccgtttccgagtgctttaagtgtgaggaatggaccatcgcagtccctgggcccccacacagtcttaagtgctccgaggtgagaaaagattcccttgtgctccaatggaagcctcctgtccacagtggcaggacccccgtcactggatacttcgtggaccttaaagaagccaaggctaaagaggatcagtggcggggcttgaacgaggccgcgattaagaacgtgtatctgaaggtacgcgggcttaaggaaggggtttcttacgtgttccgtgtgcgtgcaattaatcaagcaggcgtcggcaaaccttccgacctggccggccccgtcgtagccgaaacccgacccggtaccaaagaagtggtcgtgaacgtcgatgatgacggagtgatttcactcaacttcgagtgtgataagatgactcctaagtccgagttcagttggagcaaagactacgtgtctactgaggactcccctcgcctggaggttgagtcaaaaggcaataagaccaagatgacgtttaaggatctggggatggatgatttgggcatttattcctgcgacgtcactgataccgatggcatagcatcctcctacctgatcgatgaggaggagttgaagcggcttctcgccctttcacacgaacataagttccctacagtgccagttaaaagtgagcttgctgtggaaatcctcgagaaagggcaggtgagattctggatgcaagccgagaaactcagtggtaacgctaaggtcaactacatatttaatgagaaagagatctttgaagggcccaagtacaagatgcacatcgacagaaacacaggcatcatcgaaatgttcatggaaaagctccaggacgaagacgaggggacatatacatttcagctccaggatggtaaggccactaatcacagcaccgtagtgctagttggcgatgtgttcaagaagctccaaaaggaagccgaattccagaggcaggagtggattcgcaaacagggaccccactttgttgagtatctcagttgggaagtgacgggagaatgcaacgtgctcctcaagtgtaaagtcgctaatataaaaaaggagactcatatcgtgtggtataaagacgaaagagaaattagtgtcgacgaaaagcacgacttcaaagacggcatttgcacactgcttataaccgaatttagcaaaaaggacgccggtatttatgaggtgatcttgaaagacgaccgcggcaaggacaagtctcgcttgaaactggtggatgaggcgttcaaagaactcatgatggaagtgtgtaaaaagatcgcgctgtccgctaccgaccttaaaatccaatctacggcagaagggatccaactgtactctttcgtcacatattacgttgaagatttgaaggtgaactggagccacaacgggtctgcgatacgctattctgatagggtcaagacgggggtcaccggagagcaaatttggttacagataaatgagcctacaccaaatgataagggcaagtacgtgatggaattgtttgatggtaaaactgggcaccagaagacggtggacctatcaggccaagcctatgatgaagcctacgccgagtttcagcggttaaagaagtccctgctattccaaaaagacagggcaagagttctgggcggtctgccagatgtcgtgaccatccaggaagggaaagccctcaacctcacatgcaatgtgtggggcgaccctccgcctgaggtgtcttggttgaaaaacgagaaggcccttgcaagtgacgatcactgcaaccttaaattcgaggcgggacgcacagcctacttcacaataaatggcgtgtcgactgccgatagcgggaaatatggtctggtagtgaagaataaatatggtagcgagacctccgattttaccgtaagcgtatttatccctgaggaggaggcaagaatggcagctctggaaagccttaaggggggaaagaaagcaaagtag

SEQ ID NO: 140923 - DNA, 5847 bp, Artificial Sequence
  derived and/or modified sequence
ggcattatgcaattatattactaaggctgctacctgcccatgcccctctcctcctcctggtttggaactaccctccccatctgctgctatatttatctgccttcttggccataaaaggctggttgtgtggcctgacattcgactgcctgaccacatgcattatttttgaactggcccccagggtcctgtctttagccctgcctcttaacattgtcttggattcaacctaggtggagtcttcattctctcatccagctcctcggcctcatcggaacatttccaccaccattactcctttggaaactggtggcccggttccttcaaggggcacaggatgtctttgcctttttatcagaggtgccaccagcactatgatctcagctaccgcaacaaggacgtgcgcagcaccgtgagtcactaccagcgggagaagaaacgctccgccgtctacacccagggctccacggcctacagcagccgctcctccgccgcgcaccgccgggagtccgaggccttccgtcgggcgtccgcctcctcctcccagcagcaggcctcgcagcacgccctgagctctgaagtcagtcggaaggcagcctcagcctacgattatggctcctcccatggacttacagattccagtctgctgttagatgattattcatccaagttgagccccaaaccaaagagagccaagcacagcctactgtctggagaagagaaagaaaatttgcccagtgactacatggtacccattttctcaggacgtcaaaagcatgtcagtggaattactgatacggaagaagaaagaattaaagaagctgctgcttatatagcccagaggaatcttcttgctagtgaggaaggaatcacaacatctaaacagtccacggcatccaagcagaccacggcatctaagcagtccacggcatccaagcagtccacagcatccaagcagtccacggcatccaggcagtccacggcatccaggcagtctgtggtttccaaacaggccacatccgctcttcaacaggaagaaacttctgaaaagaagtcaaggaaagttgtgattcgagaaaaggcagaacgcctgtccctgaggaaaacattagaagaaaccgagacatatcatgccaagctgaatgaagaccatcttctccatgctcctgagtttatcattaaacctcgctcccacacggtttgggagaaggagaatgtaaaattgcattgctccatagcaggctggccagaacctcgtgtcacgtggtataaaaaccaggtgccaataaatgtccatgcaaaccctggaaagtatattattgagagtcgatatgggatgcacactctggagattaatggatgtgattttgaagatacagctcagtaccgggcctcggcgatgaatgttaaaggagagctttcggcatatgcttcagttgtggtaaaaaggtataagggagagtttgatgagactcgcttccacgctggggcttccaccatgcccctcagctttggtgtgaccccatatggttatgcatcccggtttgagatccactttgatgacaaatttgatgtgtcttttgggagagagggagagacaatgagtctaggctgtcgtgttgtcatcactcctgaaattaaacatttccagccagagatccagtggtacagaaacggagtacctctttctccatcaaaatgggtgcaaacactttggagtggagagcgggcaacgctgacattttcccatctcaacaaagaagatgaaggcctctatacaatccgtgtacggatgggagaatattatgaacaatatagtgcttatgtctttgttcgagatgctgatgcagagattgaaggagccccagctgctcccttggatgtgaagtgcttggaggccaacaaagattatatcatcatctcctggaaacagccagctgtcgatggagggagtcctattctcggatattttattgataagtgtgaggtgggcacagatagctggtcgcagtgcaatgacacacctgtgaagtttgctcgttttcctgtcactggattgatcgaaggtcgttcctatatcttccgagttcgagctgtgaataaaatgggaataggtttcccatctcgagtttccgagcccgtggctgctctggatccggctgagaaagctagacttaaaagtcgcccctcagcaccctggactggacagatcattgttactgaagaggaaccttcagagggtattgtgcctggccccccgacagacctctctgtcactgaggccacccggagctatgtggtgctcagctggaagccccctggccagcgtggtcatgagggcattatgtactttgtggaaaagtgtgaggcaggaacagaaaactggcagcgagtgaacacggagctccctgtgaagtctccccgctttgctctgtttgacttggccgaggggaaatcctactgtttccgtgtccgctgttctaattctgcaggagttggtgagccctcagaggcaacggaggtgactgtggtaggggacaaacttgatatccccaaggctcctggcaaaatcatcccaagcagaaacacagacacctcagtggtagtttcgtgggaggagtccaaagatgccaaagagctggtcgggtactacatagaggcgagcgttgctggctctggcaagtgggagccctgtaacaacaaccccgtgaagggctcacgattcacttgtcatggattagtgactggtcagagttatattttccgggtcagagcagtcaatgcagctggacttagtgaatattcccaggattcagaagctattgaagtcaaagctgctattgggggaggagtgtctccagatgtgtgtcccgcactgagcgatgagcctggtggactaaccgcctccagggggcgcgtgcatgaagcctccccgccaaccttccagaaagatgctttgcttggcagcaaacctaacaaaccttcactacccagtagctctcaaaacctgggccaaacagaagtgagtaaagtaagtgaaacagttcaggaagagcttaccccgccaccacagaaagcggctcctcaggggaaaagtaagtctgaccccctgaaaaagaagacagacagagcaccaccatctccaccctgtgatatcacctgtcttgaaagttttcgtgactcaatggttcttggatggaagcaaccagataagattggaggggcagaaattactggctattatgtgaactatcgcgaggtcattgatggggtaccaggaaaatggagagaagccaatgtcaaggctgtcagtgaggaggcatacaagattagcaacttgaaggaaaacatggtgtatcagttccaagtggcagccatgaacatggctgggctgggcgcgccctccgcagtaagcgaatgcttcaaatgtgaagagtggaccatcgccgtcccaggaccaccgcacagtctcaagtgtagtgaagtcaggaaagactcactggttctccagtggaagccgccagtccactccgggcggactccggtcactggttacttcgtggacttgaaggaggccaaggccaaagaagaccagtggcgagggctcaatgaggcggctattaaaaacgtatacctgaaggttcgaggcctcaaggagggcgtcagctacgtgttccgtgttcgagccataaaccaggcgggagttgggaagccatctgaccttgctggccctgttgtggcagagacccgtccaggaaccaaagaggttgttgtaaatgtggatgatgatggagtcatttcattgaacttcgagtgtgataagatgactccaaagtccgagttctcctggtccaaagattatgtatccactgaggactctccacgattggaagtcgaaagcaagggcaacaagacgaaaatgaccttcaaagaccttgggatggatgacttgggtatttactcttgcgatgtaacagacactgatggaatagcatcaagctacttaatagatgaggaagaattgaaacgtttacttgctctcagccatgaacacaagttcccaactgtcccagttaaatcagagttggcagttgaaattttggagaaaggccaggtccggttttggatgcaggctgagaaactgtctggcaatgccaaagtcaactacatatttaacgagaaggaaatttttgaaggcccgaaatataaaatgcatattgaccgaaacactggcatcatcgaaatgttcatggaaaagctacaggatgaggatgagggaacgtacactttccagcttcaagatggaaaagcaactaaccattctactgttgttctcgttggagatgttttcaaaaagctccagaaagaagctgaattccagcggcaagaatggatcaggaaacaaggtcctcactttgttgagtatttgagctgggaagtgactggtgaatgtaatgtactattgaaatgcaaggtggcaaatattaagaaggagactcatattgtgtggtacaaagatgagagggagatatcagtggatgaaaagcatgactttaaggatggtatatgtaccctgcttataacagagttttccaagaaagatgctgggatttatgaagttatcctgaaagatgaccgaggaaaagataagagcagactgaagcttgtggatgaagcctttaaggaactgatgatggaagtatgcaaaaaaatagctttgtctgctacagacctgaaaatccagagcacagccgagggcatccaactgtactcttttgtaacttactatgtggaggatttgaaagttaactggtcccacaatgggtccgccattaggtactcagacagagttaagaccggggtcactggagagcagatctggctacaaatcaacgagcccaccccgaatgacaaagggaagtatgtcatggagctctttgatggcaaaactggacatcagaagacagtggatctctctggacaagcatacgatgaggcctatgctgaattccagaggttgaaaaagagccttttatttcagaaagatcgtgcccgggtgttgggaggtctcccagacgtggtcaccatccaggaggggaaggcccttaatctcacttgcaacgtgtggggagacccgcctccggaggtgtcgtggttgaagaacgagaaggccctggcctcagacgaccactgcaacctcaagttcgaggctgggaggaccgcgtacttcaccatcaacggcgtgagcaccgctgactcgggcaaatacgggctggttgtgaagaacaagtatggctcggagaccagcgacttcaccgtcagcgtgttcatcccagaggaggaggcgaggatggccgccttggagtccctgaaaggtggcaagaaggccaagtgaccggaggtgcgaggagagccagccggcctgtgtgacttgggtgtgaatggtttgggttaaggatgagacgtcttcatgctttctcctccctattattttctggcttgaggggaaaataatgtcaggtctttcactcatataaaaaagcaccaactaatgacactttaattgtttttctttatctacaaaattatgtgttaagaaaataccattcatagcatgaagattaggaaacagttttaaggagaagacttgaatgaagttggagggacattgaatgatggtcagagggcagacgaatgtgtcgtggggcgaattgggatttgctgcagctgtgaagccatggccgtgtctcgtgtgttgttacagaggtgatgtgcttttcgacgggcgcctcgtggcttggaacctcctctgtatgaataaacagttttcacgtctgtcctcttccccga

SEQ ID NO: 140924 - DNA, 5057 bp, Artificial Sequence
  derived and/or modified sequence
atgtcattacccttttaccagagatgccatcagcattacgacttatcttacagaaacaaggatgtacgatcgaccgtctctcactatcagcgtgagaaaaagcgctccgctgtgtatacacagggcagcacggcttactcctcacgcagctccgcagctcaccgtcgggagtccgaagccttcagaagggcatccgccagttcaagtcaacagcaagcgtcccagcatgccctgagtagtgaggtgtcccgcaaggcggcatccgcttacgattatggttccagccatgggttgactgattccagcctcctgctggacgactattcatccaagctgtcaccaaaaccaaagagggccaagcactcgcttctcagtggcgaggaaaaggaaaacctgccatctgattacatggtaccaatcttcagcgggagacaaaagcatgtgagcggcatcaccgatactgaagaagagcgaattaaagaagctgccgcatacattgcccaaaggaatctgctagccagtgaggaaggaatcacaacgagtaaacaatccacagcgagtaagcagaccacagcttcaaagcagtccaccgcatccaagcagagtactgcctccaaacagtccactgcgtcacggcagtcaactgcgagtcggcagtccgtggtatctaagcaggcaacctcagcacttcagcaggaagaaacctcagaaaagaaatctagaaaggtggtgatccgagaaaaggctgaaaggctttctctccgcaagacactggaagagactgagacctatcatgccaaactgaacgaggaccatctcttgcatgcccctgaatttataataaagccacgaagccacaccgtttgggaaaaagaaaacgtaaagctccactgctcaatcgctggatggccagaaccacgagtcacatggtacaaaaaccaagtgcccatcaatgttcacgccaatccgggtaagtacatcattgaaagcagatatgggatgcacaccttggaaatcaacggatgcgatttcgaagacactgcgcagtatcgcgcttctgcgatgaatgtgaagggagagttaagtgcatacgcatcagttgtggtaaagagatataaaggagaatttgacgaaacacgatttcacgcaggggcttcaactatgcctttatcatttggggtaaccccttacggctacgctagcagatttgagatccatttcgacgataaattcgacgtgtcttttgggcgtgaaggtgagacgatgtcactgggctgtcgggtggtgatcacaccagagataaagcactttcagcccgaaatacagtggtataggaacggagtgccactgagccctagcaaatgggtccagactttgtggagtggagagcgcgcaactctgacgtttagccaccttaacaaggaggatgagggtctatacacaatacgggtccgcatgggggaatattatgagcagtattccgcatatgtgttcgttcgcgatgcggacgcagaaattgagggggctccagccgctcctctcgacgtcaagtgccttgaagctaacaaggattatattatcatttcatggaagcagccagcggtcgatggaggctctccaatcttaggttattttattgacaagtgcgaggtcggaaccgacagttggagccagtgtaacgacactccagttaaatttgctcgcttcccagtaaccggcctcattgaggggcgatcatacattttccgcgtgagggccgttaacaaaatggggattgggttcccgtctcgggtttctgagccagtcgccgctctggatccggctgaaaaggccagacttaagtctaggccgagcgcaccgtggactggacagattatagttacagaggaagagcctagcgagggcattgttcctggccctccaaccgacctgtctgtgaccgaagctactcgctcctacgtagtgttgagctggaagccaccaggccagaggggtcacgagggcatcatgtacttcgtggagaaatgcgaggctggtaccgagaactggcaaagggtgaacaccgaactccctgtgaagagcccacgatttgcactcttcgaccttgccgaggggaaaagttattgcttccgggtccgatgtagcaattccgccggtgtgggggagcctagcgaggcgacagaagtgaccgtcgtgggagacaaactggacattccaaaagcccctgggaaaatcattccttccagaaacacggatacgtccgtagtggtgagttgggaggagtccaaagatgccaaggaactcgtggggtactacattgaggcatcagtcgcagggagcggtaaatgggagccctgtaataacaaccccgtaaaggggtctcgatttacatgtcacgggctcgttactggtcagtcctacatattccgcgtgagagccgtcaacgcggcagggctgtcagaatacagtcaggatagcgaggctatcgaggtgaaagccgctatcggtggtggggtgtctcccgacgtctgccctgcgctctccgacgaacctggcggtctcaccgcttccagaggccgagtgcacgaagctagtcccccaactttccaaaaagatgcactacttggatcaaagccgaacaagccttcattgcctagcagttcccagaacctgggacagacagaggtgtccaaggttagcgaaacggtccaggaagagctgacccctccacctcagaaagccgcaccccagggcaagtcaaaatctgaccctctgaagaaaaaaacggatagagcccctccaagtcccccatgcgatatcacatgtcttgaatcttttcgcgacagtatggtgctgggctggaaacagcccgacaaaataggcggagccgaaattacaggttattacgtaaactacagggaggttatagatggagtacccggaaaatggcgggaggccaacgtgaaagctgtctctgaggaagcctacaagatctcaaatctcaaagaaaatatggtgtaccagttccaggtggcagccatgaacatggcaggtctgggggctccatctgctgtgtccgaatgctttaagtgtgaggagtggactattgccgtgcccggtccaccacactccctgaagtgcagcgaggtgagaaaggattcgctcgttctgcagtggaaaccccctgtccacagcgggaggacccctgtcacaggttacttcgtcgatctgaaagaggcaaaggccaaagaggatcagtggcgcggactgaatgaagccgctatcaagaatgtatatcttaaggtgagggggcttaaagaaggcgtgtcttatgtcttccgagtgcgtgccatcaatcaggccggagtgggcaaaccttcggacctggccggacctgtggtcgccgaaactaggcccggtaccaaggaggtagtggtgaacgtggacgatgacggggtaatcagcctcaattttgaatgtgataagatgacaccaaaaagcgaattttcctggtccaaggattatgtcagtactgaggactccccaagacttgaggtagaatccaaagggaataagactaagatgaccttcaaagatctgggcatggatgacctgggaatttatagttgtgatgtcaccgacaccgatggtatcgcaagctcttacctcatagacgaggaggaattaaaacgattgctcgcactcagtcacgaacacaaattccccacagttccagtgaagtccgaacttgcagtagaaattttggaaaaaggtcaagtgcgattctggatgcaagccgaaaagctctccggaaatgcaaaggtgaattacatattcaatgaaaaggagattttcgaagggcctaagtataagatgcacatcgacagaaacactggcatcatagagatgtttatggaaaaactacaggatgaggacgagggaacctatacattccagttgcaggacggtaaggctaccaaccacagtactgtcgtgctggtgggagatgtcttcaagaaactgcaaaaggaagccgaattccaacggcaggagtggattaggaagcaggggccacacttcgtggagtatctatcctgggaagtaaccggcgagtgtaatgtgttgctgaagtgcaaggtcgccaacattaagaaagagacgcatatagtgtggtacaaagatgagagagaaatttcggtcgacgagaagcacgacttcaaagatggcatatgtacactgctcatcaccgagttttctaaaaaggatgcaggcatttacgaggtaatccttaaggatgacagggggaaggacaagtccagacttaagctcgtggatgaggcattcaaggaattgatgatggaagtgtgcaagaagatcgccctcagcgccaccgatctgaaaatccagagcactgctgaggggatacagctttactcttttgtgacttattacgtggaagacttgaaagtgaactggtctcataacggctccgcgatccgctattctgatcgtgtcaaaacaggcgttaccggtgaacagatatggctgcaaatcaatgagccaacacctaatgacaaggggaagtacgtgatggagctgtttgacgggaagacagggcatcagaaaactgtggatctgagcgggcaggcttacgatgaagcttacgcagagttccagcggttgaagcaggctgctatagccgaaaagaatagggccagagtcctcggtgggctgcctgacgtcgttactattcaggaaggtaaggccctgaatcttacgtgcaacgtatggggcgaccctccaccagaagtttcgtggctcaagaatgagaaagctctggcttctgatgaccattgcaatttgaagttcgaggccggacgcaccgcttacttcaccatcaacggcgtgagcactgcagactcgggcaaatacggcctggtggttaagaacaagtatggatccgagactagcgactttactgtatccgtgttcatacctgaagaagaagccagaatggctgcgctcgagtcgctcaaaggcggtaagaaagctaagta

SEQ ID NO: 140925 - DNA, 5057 bp, Artificial Sequence
  derived and/or modified sequence
atgtcattacccttctaccagcggtgtcatcaacactatgatttgagttacaggaataaggatgtgaggtccacagtttcccactaccagcgagagaaaaagcgctccgccgtgtatactcaaggaagcactgcatactcatctcgaagtagcgccgctcaccggcgtgagtccgaggcgttccgccgagcaagtgcctcctcgtcacagcagcaggcttcacagcacgcgctgagttcagaggtgtcccgcaaggcagcaagcgcatatgactatgggtccagtcacggcctgacggactcctctctgttgctcgacgactattctagcaagctaagtccgaaacctaaaagggccaagcactcacttctgtcaggcgaagagaaggaaaacttgccgtctgattacatggtgcccattttttcaggaagacagaaacatgtgagtggtattaccgatacagaagaggaacgcattaaggaggcagcagcatatatagcacagcgtaatctgctggcaagcgaagaagggatcactaccagtaagcagtccacagcatctaagcaaactactgcctccaagcagagtactgcctccaagcagagtaccgcaagtaagcagagtacagcctctcgtcagtctaccgccagtcggcaatcagtggtctctaaacaagcgacctccgccctgcaacaggaggagacgtccgagaaaaagagtcggaaggtggtgatccgcgagaaagctgaaagactcagccttagaaaaaccctggaagagaccgaaacataccacgccaaactgaacgaggaccacttgcttcacgcacccgagttcatcattaagccacggagccacaccgtgtgggagaaggagaacgtcaaactccactgcagcatcgcaggttggccagagccccgagtcacctggtataaaaaccaagtaccgatcaatgtgcatgctaatccaggtaaatatatcatcgaatcccggtacggaatgcacacattagaaatcaatggctgcgacttcgaggatacagcccagtatcgcgctagtgccatgaatgtcaagggagagctgtccgcctacgccagtgtggtcgtgaagcggtataaaggtgaattcgatgaaacgagattccacgccggagctagcaccatgccgctgagctttggagtcaccccctatgggtacgccagtagattcgaaatccacttcgacgataagtttgacgtgtcgttcggccgagaaggcgaaaccatgtctttgggttgtagggtggttataacccccgaaattaaacatttccagcctgagattcagtggtaccggaacggagttcccctgtctccaagcaagtgggttcaaacactctggtcaggcgaaagagctacactgactttttcccacctgaacaaggaggatgagggcctgtatacaatacgggtgcggatgggagaatactatgaacagtattccgcctacgtgttcgtacgcgatgcggacgccgaaattgagggcgcacccgcagccccactcgatgtaaagtgccttgaagcaaacaaggattacatcataatctcatggaagcagcccgcagtggacggagggagcccgatcctagggtactttattgacaaatgcgaggtgggtaccgactcttggagccagtgcaatgacaccccagttaaattcgcaaggttccctgtcacaggactgatagaaggcaggtcatacatcttcagagtacgggcagtgaacaagatggggataggatttccctcccgggtgtctgagccggtcgcggctttggaccccgctgagaaggctaggctcaaatctcggcctagcgcgccttggactggtcagatcatcgttaccgaggaggaaccctcggagggcatcgttccaggcccacccaccgacttgtccgttacggaggctaccagatcctacgtggttttgtcctggaaaccaccaggtcagaggggtcacgagggtatcatgtacttcgtggaaaagtgtgaggctggcaccgaaaattggcagagagttaacactgagctgccagtaaagagtcctcggtttgccctattcgatttagccgagggcaagtcctactgctttcgggttcggtgcagtaacagtgccggagtgggtgagccctccgaggcaaccgaagtcacagtggtaggggataagttggacatcccaaaagccccaggcaagataattccaagcaggaacactgatacctcagtggtggtatcctgggaagagtccaaagacgcgaaagagctggtgggatactatatcgaggcctctgtggctggttccggtaagtgggagccctgtaacaacaatcccgttaagggttctcgctttacttgtcatggcctggtcaccggccagtcgtatattttccgggtgagggcagttaatgcggcagggttatctgagtattcccaggatagtgaggcgattgaggtcaaagccgctatcggaggaggcgtgagtcctgacgtatgtcctgcactgtcagatgaaccagggggactgacggccagtcgtggtcgagttcacgaggccagccctcctaccttccagaaggatgccctgcttggctccaagcctaacaaaccctcattaccgtctagtagccagaacctgggtcagactgaggtcagtaaggtgtccgaaaccgtgcaagaagagctcacacctcctccccagaaagcagccccacagggaaaaagtaagagtgatccattaaagaagaagacggaccgggctcctccgagccctccatgcgacattacctgtctggagagctttcgagattcaatggtgctgggctggaagcagcccgacaagataggcggtgcagagatcaccggatactatgtgaactatcgggaagttatcgacggagttccaggaaagtggcgcgaggccaatgttaaagctgtctcagaggaggcatataaaattagcaacctgaaggagaatatggtctatcagttccaggtcgctgccatgaacatggcagggctaggggcaccctctgcggtctcggagtgcttcaagtgcgaggagtggacaatcgcagtgcctggcccaccccattcactgaagtgcagtgaggtcagaaaagactcattggtgctgcaatggaaacccccagtgcatagcggcagaacacccgtcacgggctactttgtggatcttaaggaagctaaggctaaagaggaccaatggagaggcctgaatgaggcggctatcaaaaatgtatacctcaaggtgagggggctgaaggagggcgtgagttacgtgtttcgagtgcgcgctatcaatcaagccggtgtggggaagccaagtgacctggctggaccggttgtggccgaaaccaggcccggaaccaaggaggtcgtggtgaacgtcgacgatgacggggtcattagtctgaattttgagtgcgataagatgacaccgaagagcgagtttagctggtcgaaagattatgtgagtaccgaagattctccaagacttgaggtcgaatctaagggaaacaaaaccaagatgacttttaaggacctcggcatggacgacctgggcatctactcctgtgacgtcaccgatacggacggaatagctagttcctacttaatcgacgaggaagagctgaagcgtctgctagccctgagccacgaacacaagtttccgacggtaccggtgaaaagtgaactagcagtggaaatcttggagaaaggtcaggtccggttttggatgcaggccgaaaaactcagtggcaatgctaaagttaattatatcttcaatgagaaagagatattcgaaggccctaagtacaagatgcacatcgaccgcaacacagggattatagaaatgttcatggagaagctccaagacgaggacgaaggcacctatactttccaacttcaggacggcaaggcaaccaaccattccaccgtggtgctggttggagacgtgttcaagaaattgcaaaaagaagccgaattccagaggcaggagtggatccgaaagcagggaccacatttcgtggagtacctgagctgggaggtcaccggggagtgtaatgttctcctgaagtgcaaagtggctaacatcaagaaggaaactcacatcgtctggtacaaggatgaacgggagatctctgtggacgaaaagcacgatttcaaagacggcatttgcaccctcctgattaccgagtttagcaagaaggacgccggtatttacgaagttattcttaaggatgacaggggcaaagacaagtcacgactcaaacttgtcgacgaggcatttaaggaactcatgatggaggtatgcaaaaaaatagctctatcagccacagatttgaagattcagtccacggctgaagggattcagctatattcatttgtgacttattacgtggaagacctgaaagtcaactggtcccataatgggtctgccattcggtatagtgatcgagttaaaaccggcgtaaccggagaacagatttggctacagattaatgaaccaactcccaacgacaaggggaagtatgttatggagctctttgacggaaagactggacaccagaaaaccgtcgacctatctggtcaagcctacgatgaagcctacgccgaatttcagagactgaaaaaatcgctgctgtttcaaaaagaccgcgcacgcgtgttagggggactccctgacgtggtcactatccaggaaggaaaggcccttaacctcacttgcaacgtctggggggatccaccaccagaggtcagctggctcaaaaatgaaaaagctctagcctccgatgatcactgcaatctgaagttcgaggccggaagaaccgcatatttcaccattaatggagtgtctacagctgactccgggaaatacggtctcgtggttaaaaataaatatgggtccgaaacatctgatttcaccgtgtccgtattcattcctgaggaggaagcaagaatggcagcactggagagcctcaaggggggaaagaaggctaagta

SEQ ID NO: 140926 - protein, 671 aa, Artificial Sequence
  derived and/or modified sequence
MQPDMSLNVIKMKSSDFLESAELDSGGFGKVSLCFHRTQGLMIMKTVYKGPNCIEHNEALLEEAKMMNRLRHSRVVKLLGVIIEEGKYSLVMEYMEKGNLMHVLKAEMSTPLSVKGRIILEIIEGMCYLHGKGVIHKDLKPENILVDNDFHIKIADLGLASFKMWSKLNNEEHNELREVDGTAKKNGGTLYYMAPEHLNDVNAKPTEKSDVYSFAVVLWAIFANKEPYENAICEQQLIMCIKSGNRPDVDDITEYCPREIISLMKLCWEANPEARPTFPGIEEKFRPFYLSQLEESVEEDVKSLKKEYSNENAVVKRMQSLQLDCVAVPSSRSNSATEQPGSLHSSQGLGMGPVEESWFAPSLEHPQEENEPSLQSKLQDEANYHLYGSRMDRQTKQQPRQNVAYNREEERRRRVSHDPFAQQRPYENFQNTEGKGTAYSSAASHGNAVHQPSGLTSQPQVLYQNNGLYSSHGFGTRPLDPGTAGPRVWYRPIPSHMPSLHNIPVPETNYLGNTPTMPFSSLPPTDESIKYTIYNSTGIQIGAYNYMEIGGTSSSLLDSTNTNFKEEPAAKYQAIFDNTTSLTDKHLDPIRENLGKHWKNCARKLGFTQSQIDEIDHDYERDGLKEKVYQMLQKWVMREGIKGATVGKLAQALHQCSRIDLLSSLIYVSQN

SEQ ID NO: 140927 - protein, 625 aa, Artificial Sequence
  derived and/or modified sequence
MQPDMSLNVIKMKSSDFLESAELDSGGFGKVSLCFHRTQGLMIMKTVYKGPNCIEHNEALLEEAKMMNRLRHSRVVKLLGVIIEEGKYSLVMEYMEKGNLMHVLKAEIADLGLASFKMWSKLNNEEHNELREVDGTAKKNGGTLYYMAPEHLNDVNAKPTEKSDVYSFAVVLWAIFANKEPYENAICEQQLIMCIKSGNRPDVDDITEYCPREIISLMKLCWEANPEARPTFPGIEEKFRPFYLSQLEESVEEDVKSLKKEYSNENAVVKRMQSLQLDCVAVPSSRSNSATEQPGSLHSSQGLGMGPVEESWFAPSLEHPQEENEPSLQSKLQDEANYHLYGSRMDRQTKQQPRQNVAYNREEERRRRVSHDPFAQQRPYENFQNTEGKGTAYSSAASHGNAVHQPSGLTSQPQVLYQNNGLYSSHGFGTRPLDPGTAGPRVWYRPIPSHMPSLHNIPVPETNYLGNTPTMPFSSLPPTDESIKYTIYNSTGIQIGAYNYMEIGGTSSSLLDSTNTNFKEEPAAKYQAIFDNTTSLTDKHLDPIRENLGKHWKNCARKLGFTQSQIDEIDHDYERDGLKEKVYQMLQKWVMREGIKGATVGKLAQALHQCSRIDLLSSLIYVSQN

SEQ ID NO: 140928 - DNA, 2016 bp, Artificial Sequence
  derived and/or modified sequence
atgcagcccgacatgagcctgaacgtgatcaagatgaagagcagcgacttcctggagagcgccgagctggacagcggcggcttcggcaaggtgagcctgtgcttccacagaacccagggcctgatgatcatgaagaccgtgtacaagggccccaactgcatcgagcacaacgaggccctgctggaggaggccaagatgatgaacagactgagacacagcagagtggtgaagctgctgggcgtgatcatcgaggagggcaagtacagcctggtgatggagtacatggagaagggcaacctgatgcacgtgctgaaggccgagatgagcacccccctgagcgtgaagggcagaatcatcctggagatcatcgagggcatgtgctacctgcacggcaagggcgtgatccacaaggacctgaagcccgagaacatcctggtggacaacgacttccacatcaagatcgccgacctgggcctggccagcttcaagatgtggagcaagctgaacaacgaggagcacaacgagctgagagaggtggacggcaccgccaagaagaacggcggcaccctgtactacatggcccccgagcacctgaacgacgtgaacgccaagcccaccgagaagagcgacgtgtacagcttcgccgtggtgctgtgggccatcttcgccaacaaggagccctacgagaacgccatctgcgagcagcagctgatcatgtgcatcaagagcggcaacagacccgacgtggacgacatcaccgagtactgccccagagagatcatcagcctgatgaagctgtgctgggaggccaaccccgaggccagacccaccttccccggcatcgaggagaagttcagacccttctacctgagccagctggaggagagcgtggaggaggacgtgaagagcctgaagaaggagtacagcaacgagaacgccgtggtgaagagaatgcagagcctgcagctggactgcgtggccgtgcccagcagcagaagcaacagcgccaccgagcagcccggcagcctgcacagcagccagggcctgggcatgggccccgtggaggagagctggttcgcccccagcctggagcacccccaggaggagaacgagcccagcctgcagagcaagctgcaggacgaggccaactaccacctgtacggcagcagaatggacagacagaccaagcagcagcccagacagaacgtggcctacaacagagaggaggagagaagaagaagagtgagccacgaccccttcgcccagcagagaccctacgagaacttccagaacaccgagggcaagggcaccgcctacagcagcgccgccagccacggcaacgccgtgcaccagcccagcggcctgaccagccagccccaggtgctgtaccagaacaacggcctgtacagcagccacggcttcggcaccagacccctggaccccggcaccgccggccccagagtgtggtacagacccatccccagccacatgcccagcctgcacaacatccccgtgcccgagaccaactacctgggcaacacccccaccatgcccttcagcagcctgccccccaccgacgagagcatcaagtacaccatctacaacagcaccggcatccagatcggcgcctacaactacatggagatcggcggcaccagcagcagcctgctggacagcaccaacaccaacttcaaggaggagcccgccgccaagtaccaggccatcttcgacaacaccaccagcctgaccgacaagcacctggaccccatcagagagaacctgggcaagcactggaagaactgcgccagaaagctgggcttcacccagagccagatcgacgagatcgaccacgactacgagagagacggcctgaaggagaaggtgtaccagatgctgcagaagtgggtgatgagagagggcatcaagggcgccaccgtgggcaagctggcccaggccctgcaccagtgcagcagaatcgacctgctgagcagcctgatctacgtgagccagaactag

SEQ ID NO: 140929 - DNA, 1878 bp, Artificial Sequence
  derived and/or modified sequence
atgcagcccgacatgagcctgaacgtgatcaagatgaagagcagcgacttcctggagagcgccgagctggacagcggcggcttcggcaaggtgagcctgtgcttccacagaacccagggcctgatgatcatgaagaccgtgtacaagggccccaactgcatcgagcacaacgaggccctgctggaggaggccaagatgatgaacagactgagacacagcagagtggtgaagctgctgggcgtgatcatcgaggagggcaagtacagcctggtgatggagtacatggagaagggcaacctgatgcacgtgctgaaggccgagatcgccgacctgggcctggccagcttcaagatgtggagcaagctgaacaacgaggagcacaacgagctgagagaggtggacggcaccgccaagaagaacggcggcaccctgtactacatggcccccgagcacctgaacgacgtgaacgccaagcccaccgagaagagcgacgtgtacagcttcgccgtggtgctgtgggccatcttcgccaacaaggagccctacgagaacgccatctgcgagcagcagctgatcatgtgcatcaagagcggcaacagacccgacgtggacgacatcaccgagtactgccccagagagatcatcagcctgatgaagctgtgctgggaggccaaccccgaggccagacccaccttccccggcatcgaggagaagttcagacccttctacctgagccagctggaggagagcgtggaggaggacgtgaagagcctgaagaaggagtacagcaacgagaacgccgtggtgaagagaatgcagagcctgcagctggactgcgtggccgtgcccagcagcagaagcaacagcgccaccgagcagcccggcagcctgcacagcagccagggcctgggcatgggccccgtggaggagagctggttcgcccccagcctggagcacccccaggaggagaacgagcccagcctgcagagcaagctgcaggacgaggccaactaccacctgtacggcagcagaatggacagacagaccaagcagcagcccagacagaacgtggcctacaacagagaggaggagagaagaagaagagtgagccacgaccccttcgcccagcagagaccctacgagaacttccagaacaccgagggcaagggcaccgcctacagcagcgccgccagccacggcaacgccgtgcaccagcccagcggcctgaccagccagccccaggtgctgtaccagaacaacggcctgtacagcagccacggcttcggcaccagacccctggaccccggcaccgccggccccagagtgtggtacagacccatccccagccacatgcccagcctgcacaacatccccgtgcccgagaccaactacctgggcaacacccccaccatgcccttcagcagcctgccccccaccgacgagagcatcaagtacaccatctacaacagcaccggcatccagatcggcgcctacaactacatggagatcggcggcaccagcagcagcctgctggacagcaccaacaccaacttcaaggaggagcccgccgccaagtaccaggccatcttcgacaacaccaccagcctgaccgacaagcacctggaccccatcagagagaacctgggcaagcactggaagaactgcgccagaaagctgggcttcacccagagccagatcgacgagatcgaccacgactacgagagagacggcctgaaggagaaggtgtaccagatgctgcagaagtgggtgatgagagagggcatcaagggcgccaccgtgggcaagctggcccaggccctgcaccagtgcagcagaatcgacctgctgagcagcctgatctacgtgagccagaactag

SEQ ID NO: 140930 - DNA, 2016 bp, Artificial Sequence
  derived and/or modified sequence
atgcaacccgatatgtccttaaatgtcattaagatgaagagtagcgatttcctcgaatccgctgagcttgactctggtggctttgggaaggtgagcctgtgctttcaccgaactcaggggctaatgataatgaaaactgtgtataaggggcccaactgtattgaacacaatgaagcattacttgaggaggcaaagatgatgaaccgattgcgtcacagtagggtggtcaaactgctgggggtgataattgaagagggcaagtacagcctcgtgatggagtacatggagaaaggcaatcttatgcacgtgctgaaagccgaaatgtcaacacctctgtctgtgaaaggcagaatcattcttgagataattgaagggatgtgctatctgcatggcaagggggtcattcacaaggatctaaaaccagagaatatacttgtggataacgatttccatattaagatcgctgatttgggactagcgtcattcaaaatgtggtctaaactgaacaacgaggagcataacgaactcagagaagtggacggtaccgccaaaaaaaacggaggcaccctgtactacatggctccagagcacttgaatgacgttaacgcaaagccaacggagaaaagtgacgtgtatagcttcgccgtggtgctatgggcgatatttgccaataaggaaccatacgagaacgccatctgtgagcagcaattaataatgtgcattaagtcaggtaatcgccctgacgtggatgacatcaccgagtactgtccaagagaaattatatcccttatgaagctgtgttgggaagcaaaccctgaagccagaccaacattccctggcattgaagagaaattcaggccattctatctctctcaactggaggaatccgtggaggaggacgtgaagagtttgaaaaaagagtactctaatgaaaacgccgtcgttaaacgcatgcagtctctgcagcttgattgcgtggcggttccatcctcaaggtcaaacagtgcaactgaacagcccggttccttacatagcagccaaggattgggtatggggccagtggaggagtcctggttcgctccaagtctggagcatccgcaagaggagaacgagccctctctgcagtccaaactgcaggacgaggctaactaccatctctatgggtcacgcatggaccgccagacaaagcaacaacctaggcagaacgtggcctataaccgcgaggaggagaggcggcggcgggtgtcacacgacccatttgcccagcagcggccatacgagaatttccagaacacagaaggtaaaggtacagcttattcaagcgctgcaagtcacggaaatgctgtgcaccagccctctggcctcacctcacaaccacaggtactgtaccaaaataacggtctgtactcaagccacggctttggcaccaggcccctcgaccctggaacggccgggccccgagtatggtaccgccctattccgtctcatatgccctctcttcacaatataccggtgcctgaaaccaactaccttggcaacaccccaactatgcctttcagctctctgccacccaccgatgagtccattaaatacactatttataactcaacgggtatccagattggcgcctataactatatggaaataggtggaacctcctcttcgctgctcgacagcaccaataccaatttcaaagaggaacctgctgctaaatatcaggcaatttttgacaacactacttccctgaccgacaaacatctggacccgatccgggaaaatctcggcaagcattggaaaaactgtgcccgcaagttgggcttcacacagtcccagatcgacgagattgaccacgactacgaacgagatggccttaaagaaaaagtgtaccagatgctccagaagtgggttatgcgcgaaggaatcaaaggggccactgtgggcaagctggcgcaggcactccaccagtgcagcaggatcgacctcctatctagtctcatctatgtgtcacagaactag

SEQ ID NO: 140931 - DNA, 2016 bp, Artificial Sequence
  derived and/or modified sequence
atgcagccggatatgtcccttaacgttattaagatgaagtcgtcagactttcttgaatccgcggaactagactcgggcggctttggcaaagtgtcattgtgcttccatcgcacccagggtctaatgatcatgaagacagtatacaaagggcctaattgtattgaacacaacgaggccctgcttgaggaggccaaaatgatgaacagactccggcatagcagagtggtcaaactgctcggcgtcattatcgaggagggcaaatattccctcgtgatggaatatatggagaagggtaatttaatgcacgtgttgaaagccgagatgtcgactccccttagtgtaaaaggtcgaatcatcctggagataattgaggggatgtgctacctgcacggcaagggtgtgattcacaaagatctcaaacccgaaaatatcctggtggataacgatttccacattaaaattgcggacctggggctggcgagctttaagatgtggagcaaacttaacaacgaggagcataatgaactgagggaggtagacggtactgcaaaaaagaacggaggcacactgtattacatggccccagagcatctgaatgacgttaacgctaagcctacagagaagtccgatgtctactcctttgctgtagtgctctgggcgatctttgccaacaaagagccctacgagaacgctatttgtgagcagcagctcattatgtgcattaaatcagggaataggcctgatgtagacgacataacagagtactgtccccgcgaaattatttccctcatgaaactctgctgggaagcaaatccagaagcccgacctacattcccgggaatcgaggagaagttcagacctttttatctgtctcagctggaagaaagcgtggaagaggatgtcaagtcattgaagaaagaatacagcaacgagaacgctgtggtaaaacggatgcaatctctgcagctagattgtgtggccgttcctagctcgcggtctaattccgccactgagcagccaggatctctgcattcttcacagggattaggtatgggaccggtcgaggagtcctggtttgctccttccctcgagcatcctcaagaggaaaatgagcctagcctgcaatctaaactgcaggacgaggctaattatcacctgtatgggtcccggatggatcgtcagaccaagcaacagccaaggcagaacgtggcctataatagggaggaagaaagaaggaggcgcgtgtctcacgacccatttgcccagcagcgcccttatgaaaacttccagaatacggaaggcaaaggcaccgcctactctagtgcggcgtctcacggcaatgcggtccatcaaccctctggtctcacctcccagcctcaggttctgtaccagaacaatggcctttactcaagccacgggttcggtacgaggcctctcgatcccggaactgcgggcccacgagtttggtaccgacccatcccaagtcacatgccttccctacacaacatccctgtccccgaaactaattacctcggtaatacgccaactatgcctttttccagcctgccacccacagatgaaagcataaagtacactatttacaattcaaccggcattcaaatcggggcctacaactacatggagataggcggcaccagttcatctctgctcgattcgacaaacaccaacttcaaagaggaaccggctgcaaaatatcaggcgatattcgacaacactacaagtcttacagacaagcacctggatcccattagggagaatttgggcaagcactggaaaaattgcgcgcgcaagctaggttttactcagagtcagatcgatgagattgaccatgactatgaacgtgatggcttgaaggagaaagtatatcagatgctgcagaagtgggtaatgcgcgagggcatcaagggcgctacagttggcaaactggcccaggctctgcaccaatgctcacggattgatctcctgtctagcctcatctacgtatctcagaattag

SEQ ID NO: 140932 - DNA, 1878 bp, Artificial Sequence
  derived and/or modified sequence
atgcagcccgatatgtccctgaacgtgattaaaatgaagagcagcgatttcctcgagtccgccgaattggacagcggcggctttggcaaggtaagcctatgtttccacagaacccagggacttatgataatgaaaacagtctacaaaggacctaattgtatcgaacacaacgaggcactccttgaggaggccaagatgatgaatcggttacggcactctagggttgtgaagctgttgggtgttataatagaggagggtaaatattccttggttatggagtacatggaaaagggcaatctcatgcacgtgttaaaagcggagattgccgatttggggttggcttctttcaagatgtggtctaagctgaataatgaggaacacaatgaactgcgtgaggtagatggaacagccaaaaagaacggtggcacgctttactacatggcccccgagcacctgaacgatgtgaacgctaagccgacggaaaaatctgatgtgtactctttcgctgtggtgctctgggctatctttgccaacaaggagccatatgagaatgccatctgcgagcagcagttgattatgtgcattaagtcagggaacagacccgacgttgacgatatcactgaatactgccctagagagataatttccctgatgaagctgtgttgggaagcaaatccagaggctagaccgacattcccagggatcgaagaaaaatttaggccgttttacctttcacagctggaagagagcgttgaagaagacgtcaagagcctcaaaaaggaatactccaatgagaatgcagtggttaagcgcatgcagagcctccagttggattgcgtagccgtgccaagctcccgttccaactctgcgactgagcagcctgggtcacttcattccagccagggcctaggcatggggccagtggaggaaagctggtttgctccctcactggaacatccccaagaagaaaatgaaccttccctgcaatctaaactgcaggatgaggccaactatcatttgtacgggagtcggatggatcggcagacgaagcagcagcccagacagaacgtggcatataatagagaggaggagcgaagaaggcgtgtgtcacatgacccgttcgcccagcagaggccctatgagaacttccagaatactgagggaaaagggactgcttactccagtgcagctagccacggcaacgctgtgcatcagccatctgggttgacaagccagcctcaggttttataccagaataatggtctctatagtagccacgggtttgggacgagacctctggacccaggcaccgctggcccccgagtatggtataggccgatcccgtcccatatgccaagcctacacaacattcccgtgccagagaccaattacctgggtaacactccaaccatgccctttagttccctgcccccgactgatgagtctatcaagtataccatctacaattcaaccggcattcagattggagcctataattatatggagatcggtggcacctctagcagtttgctggacagtactaacaccaatttcaaagaggaacctgctgcaaaataccaagcaatatttgataacactacctcgctgacagacaaacatttggacccaatcagagagaaccttggcaagcactggaaaaattgtgcccgtaaactcggctttacacagtctcagattgacgaaatagaccatgactacgaacgcgatggattgaaagaaaaagtgtatcagatgctccagaaatgggtgatgcgggagggaattaagggcgcaaccgtgggcaaacttgcccaggcacttcatcagtgctctcgcatcgacctgctgtcaagcctgatctacgtgagccagaactag

SEQ ID NO: 140933 - DNA, 2016 bp, Artificial Sequence
  derived and/or modified sequence
atgcagcctgacatgagcctgaatgtcatcaagatgaagagcagtgacttcctggagagcgctgagctggacagcggcggctttgggaaggtgtccctgtgcttccacaggacccagggcctgatgatcatgaagacagtgtacaagggccccaactgcatcgagcacaatgaggccctgctggaggaggccaagatgatgaaccggctgcggcacagccgggtggtgaagctgctgggcgtcatcatcgaggagggcaagtacagcctggtgatggagtacatggagaagggcaacctgatgcacgtgctgaaggccgagatgagcacccccctgtctgtgaagggccgcatcatcctggagatcatcgagggcatgtgctacctgcacggcaagggcgtcatccacaaggacctgaagccagagaacatcctggtggacaatgacttccacatcaagattgctgacctgggcctggccagcttcaagatgtggagcaagctgaacaatgaggagcacaatgagctgcgggaggtggatggaacagccaagaagaatggaggcaccctgtactacatggcccctgagcacctgaatgatgtgaatgccaagcccacagagaagagtgatgtgtacagctttgctgtggtgctgtgggccatctttgccaacaaggagccctatgaaaatgccatctgtgagcagcagctgatcatgtgcatcaagagcggcaacagaccagatgtggatgacatcacagagtactgcccccgggagatcatcagcctgatgaagctgtgctgggaggccaaccctgaggcccggcccaccttccctggcatcgaggagaagttccggcccttctacctgagccagctggaggagagcgtggaggaggatgtgaagagcctgaagaaggagtacagcaatgaaaatgctgtggtgaagaggatgcagagcctgcagctggactgtgtggccgtgcccagcagccgcagcaacagcgccacagagcagcccggcagcctgcacagcagccagggcctgggcatgggccctgtggaggagagctggtttgcccccagcctggagcacccccaggaggagaatgagcccagcctgcagagcaagctgcaggatgaggccaactaccacctgtatggcagcaggatggaccggcagaccaagcagcagccccggcagaatgtggcctacaaccgggaggaggagaggagaagaagagtgtcccatgacccctttgcccagcagaggccctatgagaacttccagaacacagagggcaaaggaacagcctacagcagcgctgccagccatggaaatgctgtgcaccagcccagcggcctgaccagccagccccaggtgctgtaccagaacaacggcctgtacagcagccacggcttcggcacccggcccctggaccctggaacagctggcccccgggtgtggtaccggcccatccccagccacatgcccagcctgcacaacatccctgtgcctgagaccaactacctgggcaacacccccaccatgcccttcagcagcctgcccccaacagatgagagcatcaagtacaccatctacaacagcacaggcatccagattggagcctacaactacatggagattggaggcaccagcagcagcctgctggacagcaccaacaccaacttcaaggaggagcctgctgccaagtaccaggccatctttgacaacaccaccagcctgacagacaagcacctggaccccatccgggagaacctgggcaagcactggaagaactgtgccaggaagctgggcttcacccagagccagattgatgaaattgaccatgactatgaaagagatggcctgaaggagaaggtgtaccagatgctgcagaagtgggtgatgagggagggcatcaagggggccaccgtgggcaagctggcccaggccctgcaccagtgcagcagaattgacctgctgagcagcctcatctacgtgtcccagaactag

SEQ ID NO: 140934 - DNA, 1878 bp, Artificial Sequence
  derived and/or modified sequence
atgcagcctgacatgagcctgaatgtcatcaagatgaagagcagtgacttcctggagagcgctgagctggacagcggcggctttgggaaggtgtccctgtgcttccacaggacccagggcctgatgatcatgaagacagtgtacaagggccccaactgcatcgagcacaatgaggccctgctggaggaggccaagatgatgaaccggctgcggcacagccgggtggtgaagctgctgggcgtcatcatcgaggagggcaagtacagcctggtgatggagtacatggagaagggcaacctgatgcacgtgctgaaggccgagattgctgacctgggcctggccagcttcaagatgtggagcaagctgaacaatgaggagcacaatgagctgcgggaggtggatggaacagccaagaagaatggaggcaccctgtactacatggcccctgagcacctgaatgatgtgaatgccaagcccacagagaagagtgatgtgtacagctttgctgtggtgctgtgggccatctttgccaacaaggagccctatgaaaatgccatctgtgagcagcagctgatcatgtgcatcaagagcggcaacagaccagatgtggatgacatcacagagtactgcccccgggagatcatcagcctgatgaagctgtgctgggaggccaaccctgaggcccggcccaccttccctggcatcgaggagaagttccggcccttctacctgagccagctggaggagagcgtggaggaggatgtgaagagcctgaagaaggagtacagcaatgaaaatgctgtggtgaagaggatgcagagcctgcagctggactgtgtggccgtgcccagcagccgcagcaacagcgccacagagcagcccggcagcctgcacagcagccagggcctgggcatgggccctgtggaggagagctggtttgcccccagcctggagcacccccaggaggagaatgagcccagcctgcagagcaagctgcaggatgaggccaactaccacctgtatggcagcaggatggaccggcagaccaagcagcagccccggcagaatgtggcctacaaccgggaggaggagaggagaagaagagtgtcccatgacccctttgcccagcagaggccctatgagaacttccagaacacagagggcaaaggaacagcctacagcagcgctgccagccatggaaatgctgtgcaccagcccagcggcctgaccagccagccccaggtgctgtaccagaacaacggcctgtacagcagccacggcttcggcacccggcccctggaccctggaacagctggcccccgggtgtggtaccggcccatccccagccacatgcccagcctgcacaacatccctgtgcctgagaccaactacctgggcaacacccccaccatgcccttcagcagcctgcccccaacagatgagagcatcaagtacaccatctacaacagcacaggcatccagattggagcctacaactacatggagattggaggcaccagcagcagcctgctggacagcaccaacaccaacttcaaggaggagcctgctgccaagtaccaggccatctttgacaacaccaccagcctgacagacaagcacctggaccccatccgggagaacctgggcaagcactggaagaactgtgccaggaagctgggcttcacccagagccagattgatgaaattgaccatgactatgaaagagatggcctgaaggagaaggtgtaccagatgctgcagaagtgggtgatgagggagggcatcaagggggccaccgtgggcaagctggcccaggccctgcaccagtgcagcagaattgacctgctgagcagcctcatctacgtgtcccagaactag

SEQ ID NO: 140935 - DNA, 2016 bp, Artificial Sequence
  derived and/or modified sequence
atgcagcccgacatgagcctgaacgtgatcaagatgaagagcagcgatttcctggagtcagcggagcttgactctggcggtttcggcaaagtgagtctgtgctttcacaggacccagggcctcatgataatgaagacagtctacaaggggcccaattgcattgaacataatgaggcgctcttggaggaggctaagatgatgaacagactgcgacactccagagtggtcaaactactgggtgtgattatcgaagagggtaagtacagtctggtgatggagtacatggaaaagggaaacctgatgcatgtgttgaaagccgagatgagcacgcccctctccgtgaaagggcggatcatcctggagattatcgagggcatgtgctacttgcacggaaagggagtgattcacaaggacttaaagccggagaatatcttggtagataacgacttccacatcaagattgccgatctcggactggcctcattcaagatgtggagcaagcttaataacgaggagcacaacgagctccgggaggtagatggcaccgctaagaaaaatggaggaacattatactatatggcacctgaacacttaaacgacgtgaacgctaagccgaccgaaaagtctgatgtttacagcttcgcagtcgtcttgtgggctattttcgcaaacaaagaaccttacgagaacgccatctgtgaacaacagcttatcatgtgcatcaagtccggaaatcgcccggacgttgacgatattaccgaatattgcccccgggaaataatatccctaatgaaactgtgctgggaagccaatcctgaggccagacccaccttccccggcatagaggaaaaatttagacctttttacctgagtcagctcgaggagagcgtggaggaagatgtaaaatctctgaagaaggagtactcgaatgagaacgctgtcgtaaaaagaatgcagtccttgcagctggattgcgtggcagtaccgagcagccgatctaattctgcaacagagcagccgggctccctacactcaagtcaggggcttggcatgggaccggttgaagaatcatggtttgcgccatctctcgaacatccccaggaagagaacgaacctagcctccaatccaagctgcaagacgaggccaactatcacttatatggctctagaatggacaggcagacgaagcagcaaccgcgccagaacgtggcctacaatcgggaggaagagcgacggagacgcgtttcacacgatccgttcgcccaacagagaccctatgaaaatttccagaatactgagggcaagggcaccgcctatagctccgccgcgagtcatgggaatgcagttcaccagccctctggcctgacatcgcagccgcaggtcttgtatcagaataacgggctttattcctctcacggattcggcacccgccctctagatccaggaacagcaggccccagagtgtggtaccgacctattccaagccacatgccctcacttcacaacatcccagtgccggaaacgaattacctcggcaatactcctactatgcctttttcaagtctacccccgactgatgaaagcattaagtataccatctacaactctacgggtatccagatcggtgcatataattacatggaaatagggggtactagtagcagcttattagactcaacaaacacaaacttcaaggaggaacctgctgcgaagtaccaagccatcttcgataacactacgagcctcacagacaaacacctcgatcccatcagggaaaacctggggaagcattggaaaaactgtgcacgcaagcttggattcacccaaagccagatcgacgaaatcgaccacgactacgagcgtgatggcttgaaggagaaggtttaccagatgttgcagaagtgggtcatgagggagggtattaaaggcgccaccgtggggaagctcgcccaagcccttcaccagtgctcaagaattgatctgctcagctcactaatttatgtgtcacaaaattag

SEQ ID NO: 140936 - DNA, 2016 bp, Artificial Sequence
  derived and/or modified sequence
atgcagcccgacatgagcctgaacgtgatcaagatgaagagcagcgactttcttgaatctgccgaacttgacagcggcggctttggaaaggtgtctctttgtttccacaggacacaagggttaatgatcatgaagaccgtgtacaagggccctaactgtatagagcataatgaggcactgctcgaggaagctaagatgatgaacagactaagacacagcagggttgtaaagcttctgggcgtgattatcgaggaaggtaaatattccctagtgatggagtacatggagaaaggcaacttaatgcatgttctgaaggctgagatgtccacgcccctgagtgttaagggcagaatcatactcgagattatcgaggggatgtgttatctgcatgggaaaggggtgatccacaaagacctcaaaccagaaaatatcctggtggataatgacttccacatcaaaatcgcagaccttggtctggcatcttttaaaatgtggagcaaattaaataatgaagaacacaacgaactaagggaagttgacggtacagctaagaagaatggcgggaccctgtactacatggccccggaacatcttaatgatgtgaatgccaagccaaccgagaaaagcgacgtttacagcttcgccgtcgttctttgggccatcttcgccaataaggaaccttatgaaaacgccatctgtgagcagcagttgataatgtgcatcaagtcaggaaatcgaccagatgtagatgatatcacggaatactgcccccgcgaaatcatttctctgatgaagctgtgctgggaagctaaccctgaggccaggccaacctttcctggtatcgaggagaaattccggcccttctacctgtctcagttagaggagtctgtggaggaggacgtaaagagtcttaaaaaagagtactctaacgagaacgctgtcgtgaaacgcatgcagtctcttcaactggactgtgtggccgtgccatcttccaggtccaattcggcaacagaacagcccggatccctgcactcaagccagggtttggggatgggccccgttgaggagtcctggtttgccccatcactggagcacccccaggaagagaatgagccttcccttcaatcaaagttacaggatgaagctaattaccacctgtacggttcccgcatggatcggcagactaaacagcagcctcgccagaatgtggcctataaccgcgaggaggagcgtagacggcgggtttctcacgacccatttgcgcagcaaaggccttacgagaattttcagaacacggagggaaagggaaccgcttacagcagtgcagcgagtcatggtaatgcagtccatcagcctagcgggctcacgtcccagccccaggtactttatcagaataacggattgtactctagccacggtttcggtacaaggccgctcgacccaggaaccgccggccccagagtctggtataggcctattcccagccatatgccatcattacacaatatcccagttcctgaaaccaattatttagggaatacacccacaatgcccttctcctccctcccacctaccgacgagtccattaagtataccatctataattccaccggaattcagataggtgcctataactacatggagattgggggcaccagctcctctttacttgatagtacgaatactaacttcaaggaggaacccgcagccaagtaccaggctatttttgataataccacttccttgaccgacaaacatctcgacccgattagggagaacctcggaaagcattggaagaactgcgcgcgcaagcttgggttcacacaaagtcaaatagatgaaatcgaccatgactacgagcgcgatggattgaaagagaaagtctaccagatgttacagaagtgggtcatgcgggagggaattaagggtgctacagtgggaaaactagcgcaggcgctgcaccaatgctcgcgtattgacctcctctcttcattgatttacgtgtcccaaaactag

SEQ ID NO: 140937 - DNA, 1878 bp, Artificial Sequence
  derived and/or modified sequence
atgcagcccgacatgagcctgaacgtgatcaagatgaagagcagcgactttctggagagtgctgagctcgactccggtgggtttggcaaagtcagcctgtgttttcatcgcactcaaggacttatgattatgaagaccgtgtataaaggaccaaattgtattgaacataatgaagcgctgcttgaggaggcaaagatgatgaataggctccgacactcaagggttgtcaagttacttggggtgatcattgaagaaggaaaatactcattagtgatggagtatatggaaaagggtaacctcatgcatgtgctgaaggcagaaattgcagacctaggattagcctccttcaagatgtggagcaagttgaataatgaggagcacaatgagctccgggaagttgatggcaccgcgaaaaagaatggcggcaccctgtactacatggcacccgagcatttaaatgacgtaaatgctaagcccacagaaaagtcggacgtgtatagctttgctgttgtactgtgggcaattttcgcaaacaaagaaccttacgaaaatgccatctgtgagcagcaacttattatgtgcataaaatccggaaacaggcccgacgtcgatgatatcaccgagtactgtccacgcgagatcatctcactaatgaagctgtgttgggaagctaatcccgaagcccgtccaaccttccctgggatcgaggagaaattccgcccattctacttatctcagctggaggagagtgtggaagaggacgtgaagagcctcaaaaaagaatacagcaacgagaacgcagttgtgaaaaggatgcagagcttacagttagattgtgtagctgtaccttcaagtcggtctaattctgcaactgagcagcccggaagcttgcattccagtcagggactggggatgggaccagtggaggagagctggtttgcccctagtttagagcaccctcaggaggagaatgagccatcccttcagagtaagctgcaagatgaagccaattaccacttgtatggctcgaggatggaccggcagaccaaacaacagcctcgtcaaaacgtcgcctacaaccgagaagaggaacggcggaggagggtgagtcatgatcccttcgcccaacagcggccctacgagaatttccagaacaccgaaggaaagggcacagcttatagcagcgccgcctcacatggaaatgccgttcaccagcctagtggcctgaccagccagccccaggtgttgtaccagaataatggactatactcttctcatggcttcggtactcggcccctggacccagggaccgcggggccccgcgtgtggtaccggcctataccctcacacatgccatctttgcacaacatcccggtgccagagacaaactatctaggcaacacccccacaatgcctttttccagcctcccaccgacagacgagtcaatcaagtacaccatatataatagcacaggcattcagattggcgcttacaactacatggaaatagggggcaccagctcctctctacttgactctaccaatacgaacttcaaggaagaacccgctgccaagtaccaagcaatctttgataataccacctctctgactgacaaacacctggatcccatccgagaaaacctgggcaagcactggaaaaattgcgcgagaaaacttggcttcactcagtcgcagatagatgagatcgaccacgactatgagagagacggcctgaaggagaaggtttatcagatgctgcagaagtgggtgatgagggaaggaatcaagggcgccaccgtgggtaaactcgctcaagccctacatcaatgcagtagaattgatctcctgtcttcactgatttacgtgtcgcaaaactag

SEQ ID NO: 140938 - DNA, 2016 bp, Artificial Sequence
  derived and/or modified sequence
atgcagcccgacatgagcctgaatgtgattaagatgaaatcctctgattttcttgagtctgcagagctcgacagcggcggttttggcaaggtgagtctttgtttccatcgtacacagggcctgatgatcatgaagactgtatacaagggcccaaattgcattgaacataacgaggcattacttgaggaggctaaaatgatgaatcggcttaggcacagccgtgttgtcaagctgctgggggttattatcgaagaaggaaaatactcactggttatggagtacatggaaaaagggaatcttatgcacgtgctaaaggcggagatgagtaccccccttagtgtgaaggggcgaataatcctggaaatcatcgagggaatgtgttatctgcacgggaaaggcgtgattcacaaagacctaaagcccgaaaacatcctagtggataacgatttccacattaagatcgccgatctggggctcgcatcatttaaaatgtggtctaaattaaacaatgaggagcacaacgaattgcgcgaagttgatggcacagccaagaagaacggagggaccctctattatatggcaccagagcacttgaatgacgtgaatgctaaacctactgaaaagagcgacgtatacagcttcgctgtcgtgctgtgggccatcttcgccaacaaggagccatatgaaaatgcgatctgcgaacagcagctcatcatgtgcattaagtcagggaacaggcctgacgtggatgatattacagagtattgtccaagggagattattagtctgatgaagttatgttgggaggcaaacccagaggcaaggccaactttccccggtattgaggaaaaattcaggcccttctatctaagccagctggaagaatctgtcgaggaagacgtgaaatcactgaagaaagagtattctaacgagaacgcagtggttaagaggatgcagtcactccagctcgactgcgtagccgtaccatcctccaggtccaatagtgccacggaacagccgggatctctccatagcagccagggcctggggatggggcctgtcgaagagtcctggttcgccccttctttagaacatcctcaggaggaaaacgagccgtcacttcagagtaagctgcaagatgaagctaactaccatctatacggatccaggatggacagacagacaaaacaacaaccccgacagaatgtcgcctacaatcgcgaggaagaaagaagaaggcgagtaagtcacgacccatttgctcaacaaaggccctacgagaacttccaaaacaccgagggcaagggtacagcatacagctctgcagctagccacggaaacgcagtccaccagccctctggactgacctctcaaccacaagtcctgtaccagaacaatggcctctattcttcgcacggctttggcacacggccactggatccaggcacagccggaccccgagtttggtacaggcccatccctagccacatgcccagcctacacaatattcccgtgcctgaaactaactaccttggcaatactcctactatgccattcagtagcctgccaccgaccgacgaaagcatcaagtacacaatctataactcaacaggcattcagatcggagcctacaattatatggagattgggggtacaagctcttctctgttggattctaccaacactaacttcaaggaggaacccgcagctaagtaccaggccatctttgacaatactaccagcctcacggacaagcatcttgatcctattagggagaatctgggcaaacattggaagaattgtgcccgaaaactggggttcacccagtcgcagatcgatgagatcgaccacgactacgaaagggacggattaaaggagaaggtgtaccagatgcttcagaaatgggtcatgagagagggcatcaagggagccaccgtcggcaagctggcgcaggctctgcatcagtgttcccgtattgacctgctgtccagcttgatctacgtcagccaaaattag

SEQ ID NO: 140939 - DNA, 2016 bp, Artificial Sequence
  derived and/or modified sequence
atgcaaccagacatgtctctgaatgtgatcaaaatgaagtcatcagatttcttggagtctgccgagcttgatagtggcggtttcggaaaggtatcactgtgcttccaccgaacccagggactcatgatcatgaaaacagtctataagggccctaactgcattgaacacaatgaggccctcctggaggaagcgaagatgatgaacaggctgcgccacagccgcgtggtgaagttgctgggagtgataatcgaggaaggaaaatatagtctggttatggaatatatggaaaaagggaacctgatgcacgtcctgaaggctgagatgagtactcctctgtctgtgaagggccgaattattcttgagataatcgaaggtatgtgttatcttcatggcaagggggtgatacataaggatttaaagcccgagaacatcctggtggataatgacttccacattaaaatcgccgacctcggattagcttctttcaagatgtggagcaagctgaacaacgaggagcacaacgaactgcgggaggtggacggtactgccaagaaaaatggcggaacactctactacatggccccagagcatctaaacgatgtcaatgcgaaaccaacggagaaatcagatgtgtacagcttcgcagtggtgctgtgggctatctttgcgaacaaagagccttatgaaaacgctatatgcgagcagcaactgatcatgtgcattaagtctggcaatcgccctgacgttgatgacataactgagtattgtcctcgggaaattatctcacttatgaaactgtgctgggaagcgaatccagaggctcggccaactttccccggaatcgaggaaaagtttcgacctttttatctctcccaattagaggaaagcgtcgaggaggacgtcaaaagcctcaagaaggagtatagtaacgaaaatgctgtggtaaagagaatgcagagcttgcaattggattgcgtcgccgtcccgtctagccgaagtaattccgccaccgagcagccaggcagtctccactcgtctcaaggcctaggaatgggtccagtggaggaatcctggttcgcaccatctctggaacatccacaggaggaaaatgaaccatccctgcaaagcaaactacaggacgaagccaattaccatctctatggctctagaatggatagacaaactaagcaacaaccacggcagaatgttgcctacaatcgggaggaagagagaagacggcgtgttagtcacgacccgtttgcccagcagaggccttacgaaaatttccagaataccgaaggaaaaggcactgcttactctagcgccgcatcccatggcaacgcggtccaccaaccctcagggctgacttcacagcctcaggtattatatcaaaataatgggctgtatagcagccacggcttcgggacccggcctctagaccccggaactgccggtcccagggtctggtatcggccaattccttcacacatgccctccctgcacaacattccagtgcccgagaccaattacctcggaaatacacctaccatgccattttcctctttaccacctacggacgagtcgattaaatacacgatctataattcaaccggaattcaaattggcgcttacaactacatggagatcgggggtacaagtagcagcctgctggatagcaccaatacaaattttaaagaggagccggctgccaaatatcaggccatctttgacaacaccaccagcctcaccgataagcacctggatccaattcgcgagaatcttggaaagcattggaagaactgtgctcgcaagctgggatttacacaatctcagatcgacgaaatcgatcatgactatgagcgcgacgggctgaaggagaaggtctaccagatgttacagaaatgggttatgagggagggtatcaagggggctacagtagggaagctcgcccaggcccttcaccagtgttcgagaattgacttactatcgtccttgatctatgtgtcgcagaactag

SEQ ID NO: 140940 - DNA, 1878 bp, Artificial Sequence
  derived and/or modified sequence
atgcagccagacatgtccttgaacgtgattaaaatgaagagcagcgactttctagagagtgccgaactcgacagtgggggattcgggaaagtgtccctgtgctttcaccgcactcaggggctgatgatcatgaagacagtctacaaggggcctaactgtatcgagcataatgaggcgctcttagaagaagcaaaaatgatgaaccggctcaggcactcgagggtggtaaagctgttaggcgtaattatcgaggaagggaaatattctcttgtaatggagtatatggagaaggggaatctaatgcacgtattaaaagcagaaatcgccgatctgggccttgcgagcttcaaaatgtggagtaagctgaataacgaagagcataatgagctgcgggaggtggacggaactgcaaaaaagaacggcggtacactgtattacatggctcctgaacacctgaatgatgtgaatgctaaacccacagaaaagtccgacgtgtactcctttgccgtggtcctgtgggccatttttgccaacaaggaaccctacgagaacgccatatgcgaacagcaactgattatgtgtattaaatccggcaatcgaccggacgtggacgacatcaccgagtactgcccacgtgagatcatcagcctgatgaaattatgctgggaggcgaacccagaggcgaggcctactttccccggtatcgaggaaaagttccgcccattttatctgagtcaattggaggagtctgtcgaggaggacgtgaagtcactgaagaaagaatactcgaacgagaatgcagttgtgaaacgaatgcagagcttgcagctggactgcgtggcagtccccagcagcagatccaacagcgctacagaacagcccggatctctacactcctcacaagggttggggatgggcccagtcgaggaaagttggtttgcccctagcctggagcacccgcaggaggagaacgagccatctctccagagcaagttgcaagacgaggccaactatcacctctacggcagtcgaatggacagacagacaaagcagcagcctcgccagaatgtggcctataacagggaagaagaaaggcggcgaagggttagccacgatcccttcgcccagcaacgaccgtacgaaaacttccagaacacagagggaaagggcacggcatactcttcagctgcaagtcacggcaatgcagtgcaccagccctccgggcttacttcccagcctcaggtgctgtatcagaacaatgggctttatagcagtcatggtttcggcacaaggccattagatcccggaaccgctggacccagagtgtggtacagaccaattccatctcatatgccctcgctccacaatatacccgttccggagacgaattacctaggcaatactccaaccatgccttttagctcacttccccctaccgatgagagtattaagtacaccatctacaacagtactggcatccagatcggggcatataactacatggagattggtggcacctcttccagcttactcgacagcaccaatactaattttaaggaggaacctgcagccaagtaccaagcgatcttcgacaacacaactagcctaaccgataaacatctggaccccatacgtgagaacctgggaaagcactggaaaaattgtgctcggaaattaggtttcacacagtctcagattgatgagattgatcacgactacgaaagggacggattgaaagagaaggtctaccaaatgcttcaaaaatgggtcatgagagagggaattaagggtgccacagtcgggaaactcgcacaggccttgcaccagtgcagcagaatcgatttactttcaagcctgatctatgtgtctcagaactag

SEQ ID NO: 140941 - DNA, 4145 bp, Artificial Sequence
  derived and/or modified sequence
cagccgggcgcgctcgacgcggacggcgggccagctgccggagcgcggcgactccaggggacccacagctggggcgccagagcgcggccatccgggcggggccgacggagcgcggcaggacttggctggacggcgcggccacggagaagggcgcggtgagcggactggcaccgcgcggggaacattccggaggccgccgggctcagtcccggtgacccccctgggtacagctctgccggggggggaaaaagtggtaccattttgggcgttcttgagcttcagaatgcaaccagacatgtccttgaatgtcattaagatgaaatccagtgacttcctggagagtgcagaactggacagcggaggctttgggaaggtgtctctgtgtttccacagaacccagggactcatgatcatgaaaacagtgtacaaggggcccaactgcattgagcacaacgaggccctcttggaggaggcgaagatgatgaacagactgagacacagccgggtggtgaagctcctgggcgtcatcatagaggaagggaagtactccctggtgatggagtacatggagaagggcaacctgatgcacgtgctgaaagccgagatgagtactccgctttctgtaaaaggaaggataattttggaaatcattgaaggaatgtgctacttacatggaaaaggcgtgatacacaaggacctgaagcctgaaaatatccttgttgataatgacttccacattaagatcgcagacctcggccttgcctcctttaagatgtggagcaaactgaataatgaagagcacaatgagctgagggaagtggacggcaccgctaagaagaatggcggcaccctctactacatggcgcccgagcacctgaatgacgtcaacgcaaagcccacagagaagtcggatgtgtacagctttgctgtagtactctgggcgatatttgcaaataaggagccatatgaaaatgctatctgtgagcagcagttgataatgtgcataaaatctgggaacaggccagatgtggatgacatcactgagtactgcccaagagaaattatcagtctcatgaagctctgctgggaagcgaatccggaagctcggccgacatttcctggcattgaagaaaaatttaggcctttttatttaagtcaattagaagaaagtgtagaagaggacgtgaagagtttaaagaaagagtattcaaacgaaaatgcagttgtgaagagaatgcagtctcttcaacttgattgtgtggcagtaccttcaagccggtcaaattcagccacagaacagcctggttcactgcacagttcccagggacttgggatgggtcctgtggaggagtcctggtttgctccttccctggagcacccacaagaagagaatgagcccagcctgcagagtaaactccaagacgaagccaactaccatctttatggcagccgcatggacaggcagacgaaacagcagcccagacagaatgtggcttacaacagagaggaggaaaggagacgcagggtctcccatgacccttttgcacagcaaagaccttacgagaattttcagaatacagagggaaaaggcactgcttattccagtgcagccagtcatggtaatgcagtgcaccagccctcagggctcaccagccaacctcaagtactgtatcagaacaatggattatatagctcacatggctttggaacaagaccactggatccaggaacagcaggtcccagagtttggtacaggccaattccaagtcatatgcctagtctgcataatatcccagtgcctgagaccaactatctaggaaatacacccaccatgccattcagctccttgccaccaacagatgaatctataaaatataccatatacaatagtactggcattcagattggagcctacaattatatggagattggtgggacgagttcatcactactagacagcacaaatacgaacttcaaagaagagccagctgctaagtaccaagctatctttgataataccactagtctgacggataaacacctggacccaatcagggaaaatctgggaaagcactggaaaaactgtgcccgtaaactgggcttcacacagtctcagattgatgaaattgaccatgactatgagcgagatggactgaaagaaaaggtttaccagatgctccaaaagtgggtgatgagggaaggcataaagggagccacggtggggaagctggcccaggcgctccaccagtgttccaggatcgaccttctgagcagcttgatttacgtcagccagaactaaccctggatgggctacggcagctgaagtggacgcctcacttagtggataaccccagaaagttggctgcctcagagcattcagaattctgtcctcactgataggggttctgtgtctgcagaaattttgtttcctgtacttcatagctggagaatggggaaagaaatctgcagcaaaggggtctcactctgttgccaggctggtctcaaacttctggactcaagtgatcctcccgcctcggccttccaaagtgctgggatatcaggcactgagccactgcgcccagccaacaatccgctctgaggaaagcgtaagcaggaagacctcttaatggcatagcaccaataaaaaaatgactcctagttgtgtttggaaagggagagaagagatgtctgaggaaggtcatgttctttcagcttatggcatttcctagagttttgttgaagcaagaagaaaaactcagagaatataaaatcaacttttaaaattgtgtgctctcttcttcacgtaggctcctgttaaaaacaaagtgcagtcagattctaagccctgttcagagacttcgtggatcacagctgcagctcaccgccacatcacaggatccgttaacgttaatacccaatactctgtcagccactgtaggctctaagaaccacgtgcagtcttcagcccattaaattatcgattattttttaatgaattgaatttatattgagtcttcaaattaactgaatggatttaaaggggtaccaaggaggggggaaacatcagaatttcccaggcagttgttgcaaggaattggtactaaccgtgactacaacaaaaattcttgattgacttttaaagttatttcctggcattctggtaccttcacccagcctgagtgccctggagagggaacaggaaatgctgatctctacccctgggtgagaccagaacctcagggctgatactgttgagtggcttcctcggtttactctgtgtactgtgaaagtattttcatattttttctgtgtgccagagtgaaaaaggacagcttctgagtgtggtaattgtgcctctagcacccagcctttcaaagcccacctgaaacctgggggtggatgaaagaactagaatagaagactgaagctgggtaggccgctcagtgtccactggcattttgctaaaccgacaaggaaggctgtgtgcttagctctccccagagggagggcgagaagggtgtggtgatggtcaatctggctgtcggaacagattctggtgtcttgggctgataacagtgttgttgattctgattgtgaatcccctcaactctagcagacacatacacacccctgaaatggggctgcagagcaggctgtctcagccttgccactgtcggcatctcggcctgggtaattctgttgtggggactgtcctgttccttgtaggatgtttagtagcatccctgcccccacctactagatgccaggggcactgttctccccagccccccgccccagttgtgacaatagtctctaaacattgtcaaatggtccaaggaaaggggaaaattgccccggttgagaagagcactgctgtaaagtaatgagcctcggctctcctgtctgcacctgtccggttactacttggccaccacgcagccttggctcctacagcccaaaagggagaatggagggaggctccaggctttgctggaggggcctgggtgagttctgtttgctccttgtaccaccatccaaatggtgttatcaaatctcttagattccaaagaggttgaataattaatgttcaaaggcaagagggcaaggcattttttaacactttttaaaataaaaatttataccac

SEQ ID NO: 140942 - DNA, 3864 bp, Artificial Sequence
  derived and/or modified sequence
atgcaaccagacatgtccttgaatgtcattaagatgaaatccagtgacttcctggagagtgcagaactggacagcggaggctttgggaaggtgtctctgtgtttccacagaacccagggactcatgatcatgaaaacagtgtacaaggggcccaactgcattgagcacaacgaggccctcttggaggaggcgaagatgatgaacagactgagacacagccgggtggtgaagctcctgggcgtcatcatagaggaagggaagtactccctggtgatggagtacatggagaagggcaacctgatgcacgtgctgaaagccgagatgagtactccgctttctgtaaaaggaaggataattttggaaatcattgaaggaatgtgctacttacatggaaaaggcgtgatacacaaggacctgaagcctgaaaatatccttgttgataatgacttccacattaagatcgcagacctcggccttgcctcctttaagatgtggagcaaactgaataatgaagagcacaatgagctgagggaagtggacggcaccgctaagaagaatggcggcaccctctactacatggcgcccgagcacctgaatgacgtcaacgcaaagcccacagagaagtcggatgtgtacagctttgctgtagtactctgggcgatatttgcaaataaggagccatatgaaaatgctatctgtgagcagcagttgataatgtgcataaaatctgggaacaggccagatgtggatgacatcactgagtactgcccaagagaaattatcagtctcatgaagctctgctgggaagcgaatccggaagctcggccgacatttcctggcattgaagaaaaatttaggcctttttatttaagtcaattagaagaaagtgtagaagaggacgtgaagagtttaaagaaagagtattcaaacgaaaatgcagttgtgaagagaatgcagtctcttcaacttgattgtgtggcagtaccttcaagccggtcaaattcagccacagaacagcctggttcactgcacagttcccagggacttgggatgggtcctgtggaggagtcctggtttgctccttccctggagcacccacaagaagagaatgagcccagcctgcagagtaaactccaagacgaagccaactaccatctttatggcagccgcatggacaggcagacgaaacagcagcccagacagaatgtggcttacaacagagaggaggaaaggagacgcagggtctcccatgacccttttgcacagcaaagaccttacgagaattttcagaatacagagggaaaaggcactgcttattccagtgcagccagtcatggtaatgcagtgcaccagccctcagggctcaccagccaacctcaagtactgtatcagaacaatggattatatagctcacatggctttggaacaagaccactggatccaggaacagcaggtcccagagtttggtacaggccaattccaagtcatatgcctagtctgcataatatcccagtgcctgagaccaactatctaggaaatacacccaccatgccattcagctccttgccaccaacagatgaatctataaaatataccatatacaatagtactggcattcagattggagcctacaattatatggagattggtgggacgagttcatcactactagacagcacaaatacgaacttcaaagaagagccagctgctaagtaccaagctatctttgataataccactagtctgacggataaacacctggacccaatcagggaaaatctgggaaagcactggaaaaactgtgcccgtaaactgggcttcacacagtctcagattgatgaaattgaccatgactatgagcgagatggactgaaagaaaaggtttaccagatgctccaaaagtgggtgatgagggaaggcataaagggagccacggtggggaagctggcccaggcgctccaccagtgttccaggatcgaccttctgagcagcttgatttacgtcagccagaactaaccctggatgggctacggcagctgaagtggacgcctcacttagtggataaccccagaaagttggctgcctcagagcattcagaattctgtcctcactgataggggttctgtgtctgcagaaattttgtttcctgtacttcatagctggagaatggggaaagaaatctgcagcaaaggggtctcactctgttgccaggctggtctcaaacttctggactcaagtgatcctcccgcctcggccttccaaagtgctgggatatcaggcactgagccactgcgcccagccaacaatccgctctgaggaaagcgtaagcaggaagacctcttaatggcatagcaccaataaaaaaatgactcctagttgtgtttggaaagggagagaagagatgtctgaggaaggtcatgttctttcagcttatggcatttcctagagttttgttgaagcaagaagaaaaactcagagaatataaaatcaacttttaaaattgtgtgctctcttcttcacgtaggctcctgttaaaaacaaagtgcagtcagattctaagccctgttcagagacttcgtggatcacagctgcagctcaccgccacatcacaggatccgttaacgttaatacccaatactctgtcagccactgtaggctctaagaaccacgtgcagtcttcagcccattaaattatcgattattttttaatgaattgaatttatattgagtcttcaaattaactgaatggatttaaaggggtaccaaggaggggggaaacatcagaatttcccaggcagttgttgcaaggaattggtactaaccgtgactacaacaaaaattcttgattgacttttaaagttatttcctggcattctggtaccttcacccagcctgagtgccctggagagggaacaggaaatgctgatctctacccctgggtgagaccagaacctcagggctgatactgttgagtggcttcctcggtttactctgtgtactgtgaaagtattttcatattttttctgtgtgccagagtgaaaaaggacagcttctgagtgtggtaattgtgcctctagcacccagcctttcaaagcccacctgaaacctgggggtggatgaaagaactagaatagaagactgaagctgggtaggccgctcagtgtccactggcattttgctaaaccgacaaggaaggctgtgtgcttagctctccccagagggagggcgagaagggtgtggtgatggtcaatctggctgtcggaacagattctggtgtcttgggctgataacagtgttgttgattctgattgtgaatcccctcaactctagcagacacatacacacccctgaaatggggctgcagagcaggctgtctcagccttgccactgtcggcatctcggcctgggtaattctgttgtggggactgtcctgttccttgtaggatgtttagtagcatccctgcccccacctactagatgccaggggcactgttctccccagccccccgccccagttgtgacaatagtctctaaacattgtcaaatggtccaaggaaaggggaaaattgccccggttgagaagagcactgctgtaaagtaatgagcctcggctctcctgtctgcacctgtccggttactacttggccaccacgcagccttggctcctacagcccaaaagggagaatggagggaggctccaggctttgctggaggggcctgggtgagttctgtttgctccttgtaccaccatccaaatggtgttatcaaatctcttagattccaaagaggttgaataattaatgttcaaaggcaagagggcaaggcattttttaacactttttaaaataaaaatttataccacaa

SEQ ID NO: 140943 - DNA, 2670 bp, Artificial Sequence
  derived and/or modified sequence
atgagcccagcctgcagagtaaactccaagacgaagccaactaccatctttatggcagccgcatggacaggcagacgaaacagcagcccagacagaatgtggcttacaacagagaggaggaaaggagacgcagggtctcccatgacccttttgcacaggccctcagggctcaccagccaacctcaagtactgtatcagaacaatggattatatagctcacatggctttggaacaagaccactggatccaggaacagcaggtcccagagtttggtacaggccaattccaagtcatatgcctagtctgcataatatcccagtgcctgagaccaactatctaggaaatacacccaccatgccattcagctccttgccaccaacagatgaatctataaaatataccatatacaatagtactggcattcagattggagcctacaattatatggagattggtgggacgagttcatcactactagacagcacaaatacgaacttcaaagaagagccagctgctaagtaccaagctatctttgataataccactagtctgacggataaacacctggacccaatcagggaaaatctgggaaagcactggaaaaactgtgcccgtaaactgggcttcacacagtctcagattgatgaaattgaccatgactatgagcgagatggactgaaagaaaaggtttaccagatgctccaaaagtgggtgatgagggaaggcataaagggagccacggtggggaagctggcccaggcgctccaccagtgttccaggatcgaccttctgagcagcttgatttacgtcagccagaactaaccctggatgggctacggcagctgaagtggacgcctcacttagtggataaccccagaaagttggctgcctcagagcattcagaattctgtcctcactgataggggttctgtgtctgcagaaattttgtttcctgtacttcatagctggagaatggggaaagaaatctgcagcaaaggggtctcactctgttgccaggctggtctcaaacttctggactcaagtgatcctcccgcctcggccttccaaagtgctgggatatcaggcactgagccactgcgcccagccaacaatccgctctgaggaaagcgtaagcaggaagacctcttaatggcatagcaccaataaaaaaatgactcctagttgtgtttggaaagggagagaagagatgtctgaggaaggtcatgttctttcagcttatggcatttcctagagttttgttgaagcaagaagaaaaactcagagaatataaaatcaacttttaaaattgtgtgctctcttcttcacgtaggctcctgttaaaaacaaagtgcagtcagattctaagccctgttcagagacttcgtggatcacagctgcagctcaccgccacatcacaggatccgttaacgttaatacccaatactctgtcagccactgtaggctctaagaaccacgtgcagtcttcagcccattaaattatcgattattttttaatgaattgaatttatattgagtcttcaaattaactgaatggatttaaaggggtaccaaggaggggggaaacatcagaatttcccaggcagttgttgcaaggaattggtactaaccgtgactacaacaaaaattcttgattgacttttaaagttatttcctggcattctggtaccttcacccagcctgagtgccctggagagggaacaggaaatgctgatctctacccctgggtgagaccagaacctcagggctgatactgttgagtggcttcctcggtttactctgtgtactgtgaaagtattttcatattttttctgtgtgccagagtgaaaaaggacagcttctgagtgtggtaattgtgcctctagcacccagcctttcaaagcccacctgaaacctgggggtggatgaaagaactagaatagaagactgaagctgggtaggccgctcagtgtccactggcattttgctaaaccgacaaggaaggctgtgtgcttagctctccccagagggagggcgagaagggtgtggtgatggtcaatctggctgtcggaacagattctggtgtcttgggctgataacagtgttgttgattctgattgtgaatcccctcaactctagcagacacatacacacccctgaaatggggctgcagagcaggctgtctcagccttgccactgtcggcatctcggcctgggtaattctgttgtggggactgtcctgttccttgtaggatgtttagtagcatccctgcccccacctactagatgccaggggcactgttctccccagccccccgccccagttgtgacaatagtctctaaacattgtcaaatggtccaaggaaaggggaaaattgccccggttgagaagagcactgctgtaaagtaatgagcctcggctctcctgtctgcacctgtccggttactacttggccaccacgcagccttggctcctacagcccaaaagggagaatggagggaggctccaggctttgctggaggggcctgggtgagttctgtttgctccttgtaccaccatccaaatggtgttatcaaatctcttagattccaaagaggttgaataattaatgttcaaaggcaagagggcaaggcattttttaacactttttaaaataaaaatttataccacaa

SEQ ID NO: 140944 - DNA, 3133 bp, Artificial Sequence
  derived and/or modified sequence
cattttgggcgttcttgagcttcagaatgcaaccagacatgtccttgaatgtcattaagatgaaatccagtgacttcctggagagtgcagaactggacagcggaggctttgggaaggtgtctctgtgtttccacagaacccagggactcatgatcatgaaaacagtgtacaaggggcccaactgcattgagcacaacgaggccctcttggaggaggcgaagatgatgaacagactgagacacagccgggtggtgaagctcctgggcgtcatcatagaggaagggaagtactccctggtgatggagtacatggagaagggcaacctgatgcacgtgctgaaagccgagatcgcagacctcggccttgcctcctttaagatgtggagcaaactgaataatgaagagcacaatgagctgagggaagtggacggcaccgctaagaagaatggcggcaccctctactacatggcgcccgagcacctgaatgacgtcaacgcaaagcccacagagaagtcggatgtgtacagctttgctgtagtactctgggcgatatttgcaaataaggagccatatgaaaatgctatctgtgagcagcagttgataatgtgcataaaatctgggaacaggccagatgtggatgacatcactgagtactgcccaagagaaattatcagtctcatgaagctctgctgggaagcgaatccggaagctcggccgacatttcctggcattgaagaaaaatttaggcctttttatttaagtcaattagaagaaagtgtagaagaggacgtgaagagtttaaagaaagagtattcaaacgaaaatgcagttgtgaagagaatgcagtctcttcaacttgattgtgtggcagtaccttcaagccggtcaaattcagccacagaacagcctggttcactgcacagttcccagggacttgggatgggtcctgtggaggagtcctggtttgctccttccctggagcacccacaagaagagaatgagcccagcctgcagagtaaactccaagacgaagccaactaccatctttatggcagccgcatggacaggcagacgaaacagcagcccagacagaatgtggcttacaacagagaggaggaaaggagacgcagggtctcccatgacccttttgcacagcaaagaccttacgagaattttcagaatacagagggaaaaggcactgcttattccagtgcagccagtcatggtaatgcagtgcaccagccctcagggctcaccagccaacctcaagtactgtatcagaacaatggattatatagctcacatggctttggaacaagaccactggatccaggaacagcaggtcccagagtttggtacaggccaattccaagtcatatgcctagtctgcataatatcccagtgcctgagaccaactatctaggaaatacacccaccatgccattcagctccttgccaccaacagatgaatctataaaatataccatatacaatagtactggcattcagattggagcctacaattatatggagattggtgggacgagttcatcactactagacagcacaaatacgaacttcaaagaagagccagctgctaagtaccaagctatctttgataataccactagtctgacggataaacacctggacccaatcagggaaaatctgggaaagcactggaaaaactgtgcccgtaaactgggcttcacacagtctcagattgatgaaattgaccatgactatgagcgagatggactgaaagaaaaggtttaccagatgctccaaaagtgggtgatgagggaaggcataaagggagccacggtggggaagctggcccaggcgctccaccagtgttccaggatcgaccttctgagcagcttgatttacgtcagccagaactaaccctggatgggctacggcagctgaagtggacgcctcacttagtggataaccccagaaagttggctgcctcagagcattcagaattctgtcctcactgataggggttctgtgtctgcagaaattttgtttcctgtacttcatagctggagaatggggaaagaaatctgcagcaaaggggtctcactctgttgccaggctggtctcaaacttctggactcaagtgatcctcccgcctcggccttccaaagtgctgggatatcaggcactgagccactgcgcccagccaacaatccgctctgaggaaagcgtaagcaggaagacctcttaatggcatagcaccaataaaaaaatgactcctagttgtgtttggaaagggagagaagagatgtctgaggaaggtcatgttctttcagcttatggcatttcctagagttttgttgaagcaagaagaaaaactcagagaatataaaatcaacttttaaaattgtgtgctctcttcttcacgtaggctcctgttaaaaacaaagtgcagtcagattctaagccctgttcagagacttcgtggatcacagctgcagctcaccgccacatcacaggatccgttaacgttaatacccaatactctgtcagccactgtaggctctaagaaccacgtgcagtcttcagcccattaaattatcgattattttttaatgaattgaatttatattgagtcttcaaattaactgaatggatttaaaggggtaccaaggaggggggaaacatcagaatttcccaggcagttgttgcaaggaattggtactaaccgtgactacaacaaaaattcttgattgacttttaaagttatttcctggcattctggtaccttcacccagcctgagtgccctggagagggaacaggaaatgctgatctctacccctgggtgagaccagaacctcagggctgatactgttgagtggcttcctcggtttactctgtgtactgtgaaagtattttcatattttttctgtgtgccagagtgaaaaaggacagcttctgagtgtggtaattgtgcctctagcacccagcctttcaaagcccacctgaaacctgggggtggatgaaagaactagaatagaagactgaagctgggtaggccgctcagtgtccactggcattttgctaaaccgacaaggaaggctgtgtgcttagctctccccagagggagggcgagaagggtgtggtgatg

SEQ ID NO: 140945 - protein, 199 aa, Artificial Sequence
  derived and/or modified sequence
MEARDKQVLRSLRLELGAEVLVEGLVLQYLYQEGILTENHIQEINAQTTGLRKTMLLLDILPSRGPKAFDTFLDSLQEFPWVREKLKKAREEAMTDLPAGDRLTGIPSHILNSSPSDRQINQLAQRLGPEWEPMVLSLGLSQTDIYRCKANHPHNVQSQVVEAFIRWRQRFGKQATFQSLHNGLRAVEVDPSLLLHMLE

SEQ ID NO: 140946 - protein, 103 aa, Artificial Sequence
  derived and/or modified sequence
MEARDKQVLRSLRLELGAEVLVEGLVLQYLYQEGILTENHIQEINAQTTGLRKTMLLLDILPSRGPKAFDTFLDSLQEFPWVREKLKKAREEAMTDLPAGCWP

SEQ ID NO: 140947 - DNA, 600 bp, Artificial Sequence
  derived and/or modified sequence
atggaagctagagacaaacaggtgctaaggagtctgaggctcgaacttggcgccgaagtgcttgtggagggcttagtactgcagtatctgtatcaagaggggatcctaacagagaatcatattcaggaaatcaatgcccagaccacaggccttcgcaagactatgctgttgctggacatattaccaagcaggggtcccaaggctttcgacacattcctagatagtctgcaggaattcccatgggtgagggagaaacttaaaaaggcacgcgaggaggccatgaccgacctccccgctggcgacagattaaccggaattccgagccacatcctgaactccagtccgtctgaccgccagattaatcagctggcacagaggctggggccagagtgggagcctatggtgctgtcgttgggcctgagccagaccgacatctacaggtgtaaggccaaccatcctcataatgttcaatcccaggtggtcgaggctttcatccggtggcggcaaagattcggtaaacaggctactttccagagcctccacaatggtcttcgtgccgtggaggtcgatccatcgctgctgttgcacatgctggagtag

SEQ ID NO: 140948 - DNA, 600 bp, Artificial Sequence
  derived and/or modified sequence
atggaagctagggacaagcaggtcctcagaagtcttcgactggagctgggcgccgaggtgctcgtggaaggactcgtgctgcagtatttataccaagagggaatattgacagagaatcatattcaagaaatcaacgcccagactacaggtctccgtaagacaatgctgttgttggatatcctccctagccggggacccaaggcgtttgacacttttctcgatagccttcaggagtttccctgggtcagggaaaagctgaagaaggctcgggaggaagccatgaccgatctacccgcaggggatcgcttgaccggtataccctcccatattctcaactcatccccatctgatagacagattaaccagttggcccaaagattagggccagagtgggagcccatggtacttagccttggcctgtcgcagacggacatatatcggtgtaaagccaaccacccccacaatgtgcagtcccaggtcgtagaggcatttatacggtggagacagagatttgggaaacaggcaactttccagtctcttcacaatggattgcgcgctgttgaggtggacccctcactgctgctccacatgctcgaatag

SEQ ID NO: 140949 - DNA, 600 bp, Artificial Sequence
  derived and/or modified sequence
atggaggcccgggacaagcaggtgctgcggagcctgcggctggagctgggcgctgaggtgctggtggagggcctggtgctgcagtacctgtaccaggagggcatcctgacagagaaccacatccaggagatcaatgcccagaccaccggcctgaggaagaccatgctgctgctggacatcctgcccagccggggccccaaggcctttgacaccttcctggacagcctgcaggagttcccctgggtgcgggagaagctgaagaaggcccgggaggaggccatgacagacctgcctgctggggaccggctgaccggcatccccagccacatcctgaacagcagccccagcgaccggcagatcaaccagctggcccagaggctgggccctgagtgggagcccatggtgctgagcctgggcctgagccagacagacatctaccgctgcaaggccaaccacccccacaacgtgcagagccaggtggtggaggccttcatccgctggaggcagagatttgggaagcaggccaccttccagagcctgcacaacggcctgcgggctgtggaggtggaccccagcctgctgctgcacatgctggagtag

SEQ ID NO: 140950 - DNA, 600 bp, Artificial Sequence
  derived and/or modified sequence
atggaggcccgggacaagcaggtgctgcggagcctgcggctggagctgggggcagaagtcctggtcgaaggactggttcttcagtatttgtaccaggaagggatcttgacagagaatcacatccaagagattaatgctcagacaactggcctcagaaaaacaatgcttctgctcgatattctgccatcacgaggtcctaaagcatttgacacgtttctggacagcctccaggagttcccctgggtccgggagaaactgaaaaaagcccgagaggaggctatgaccgacctaccggctggcgatagactgaccggcatcccttcccacattctcaattcttctccttctgaccggcagataaatcagctggcccaaagactggggcctgagtgggaacccatggttctctcgcttggcctctcacagacagatatttacaggtgcaaggcaaaccacccgcataatgtacagtctcaggtggtggaggcgtttattaggtggcgccagaggttcgggaagcaggccacttttcagagtctgcataatgggctccgcgcggttgaggtggatccatccctgctcctgcacatgttggaatag

SEQ ID NO: 140951 - DNA, 600 bp, Artificial Sequence
  derived and/or modified sequence
atggaggcccgggacaagcaggtgctgcggagcctgcggctggagctgggcgctgaggtacttgttgagggtctagtccttcagtacctgtatcaggagggtatccttaccgaaaaccacatccaagagatcaacgcccagacaaccgggttgcgaaagacaatgcttctcctcgatatcttaccctctcggggccctaaggccttcgatacgttcttagattccctgcaggaatttccttgggttagagagaaactgaagaaagctcgggaagaagccatgactgatttaccagctggggatcggctcaccggtatacccagtcatatcctaaactcgagtccctccgacagacagatcaatcagctggctcagcgtttaggccctgaatgggagccaatggtgctgtctttgggactgtcccagacagatatttaccgctgtaaggcaaaccatccccataacgttcaatcccaggtggtggaagcctttataaggtggcggcaacgctttgggaaacaagccacattccagagtttacacaatgggctccgcgcagtagaagtcgatccctcattactcttacacatgctggagtag

SEQ ID NO: 140952 - DNA, 600 bp, Artificial Sequence
  derived and/or modified sequence
atggaggctcgggacaagcaggtgctacggagcttacgcttggaactgggggcagaggttctcgttgaggggttggtacttcaatacctgtaccaggaaggcattttaactgaaaatcacatccaggaaattaatgcccagaccacaggccttaggaagactatgctcctgctggacattttgcctagtagaggaccaaaggcttttgacaccttccttgatagcctgcaggagttcccttgggttagagagaagctcaagaaagctcgggaagaggcgatgacggacctgccagcgggagacaggctcactggcatcccatctcatatcctgaactcttccccttctgatcggcaaatcaaccagctggctcagagattaggacctgagtgggaacccatggtgctgagccttgggctgtcacagaccgatatttatagatgcaaggcaaaccacccccacaacgtgcagagtcaggtcgtagaggctttcatacgctggcgacagcgatttggcaagcaagctaccttccagtcactgcacaatggccttagggccgtagaggttgaccccagcctgctcctccatatgcttgagtag

SEQ ID NO: 140953 - DNA, 600 bp, Artificial Sequence
  derived and/or modified sequence
atggaggcaagagacaagcaggttctcagaagtctgcgcctcgaacttggtgcagaggtactggttgagggattagttctgcagtacctgtaccaggagggcatattgactgaaaatcatatccaggaaattaatgcccagaccaccggtttgcgcaaaactatgttactcctggatattctgccgtctcgtggccctaaagctttcgacacgtttctcgattccctccaagaatttccgtgggttagagagaaactgaagaaggctcgcgaggaggctatgactgacttgcctgccggtgaccggctgacggggataccctctcacatactcaacagtagccccagcgataggcagattaaccagcttgcgcagcgcctgggtccagagtgggagccaatggttctttctctgggcctgagccagaccgatatatacagatgcaaagcgaaccaccctcataatgtgcagtctcaggtggtggaagccttcattaggtggcgacaacgcttcggtaagcaggcaacgttccagtctctgcacaatggcctgcgcgctgtggaagttgacccaagcctcttgttgcacatgttggaatag

SEQ ID NO: 140954 - DNA, 1169 bp, Artificial Sequence
  derived and/or modified sequence
gccattaacaaagatggtgcttatggggcaggttccctaacagtcaggattccggttgcagtttttctcccccgccccaaagatacgtggttgcagacggagaaatggaggccagagacaaacaagtactccgctcacttcgcctggagctgggtgcagaggtattggtggagggactggttcttcagtacctctaccaggaaggaatcttgacggaaaaccatattcaagaaatcaatgctcaaaccacaggcctccggaaaacaatgctcctgctggatatcctaccttccaggggccctaaagcatttgatacattcctagattccctacaggagtttccctgggtcagggagaagctgaagaaggcaagggaagaggccatgaccgacctgcctgcaggtgacagattgactgggatcccctcgcacatcctcaacagctccccatcagaccggcagattaaccagctggcccagaggctgggccctgagtgggagcccatggtgctgtctctgggactgtcccagacggatatctaccgctgtaaggccaaccacccccacaacgtgcagtcgcaggtggtggaggccttcatccgttggcggcagcgcttcgggaagcaggccaccttccagagcctgcacaacgggctgcgggctgtggaggtggacccctcgctgctcctgcacatgttggagtgatggtgcctccagcaaccgctggggagtgtgtccctgagtcatgtgggctgaatcctgactttcactcagagcaggtggttttttgtgtaggtttgttttttatttttgatgatcttcagatggaaggagaaaacagggtttccactagacattacttgaaaggccagattactcagcagatctcccatgttggctcaacaattctttgtttttaattgcttgaagattgcattgttgtaattgttcagtttttaaatgtgtaatggcattttaatagactagtaaatcacagtggttcaaaatatatatccatatatatatatatccatatatatatctcatgtcatcacattacaggcaggtgtctcatatgtaaaacatttacctgaatgttgtctgaggactgaactgtggactttactattcataatgataaaataataaaatgcgaattactatatataa

SEQ ID NO: 140955 - DNA, 1403 bp, Artificial Sequence
  derived and/or modified sequence
aagggtttcagcggccgaagcagagcctttttaaatagttcccaatgggcgctcacggccaaacgtgaacacctcccctcctcacctgtcacctcctgaactttacagggttgcgagggggagtgtgggatcgggtgtcgcctagccgtggtcgtactgcccgggtgtgtctgaagccccatctgtcatccctgcctgccttcccggtcacttaaccttcactgccttacacacaaccaagccacagcacactggtgcaggggtggtggaactgcaccttcaaatcgtgcctggctactgaccagtgctgggggagaaatggaggccagagacaaacaagtactccgctcacttcgcctggagctgggtgcagaggtattggtggagggactggttcttcagtacctctaccaggaaggaatcttgacggaaaaccatattcaagaaatcaatgctcaaaccacaggcctccggaaaacaatgctcctgctggatatcctaccttccaggggccctaaagcatttgatacattcctagattccctacaggagtttccctgggtcagggagaagctgaagaaggcaagggaagaggccatgaccgacctgcctgcaggtgacagattgactgggatcccctcgcacatcctcaacagctccccatcagaccggcagattaaccagctggcccagaggctgggccctgagtgggagcccatggtgctgtctctgggactgtcccagacggatatctaccgctgtaaggccaaccacccccacaacgtgcagtcgcaggtggtggaggccttcatccgttggcggcagcgcttcgggaagcaggccaccttccagagcctgcacaacgggctgcgggctgtggaggtggacccctcgctgctcctgcacatgttggagtgatggtgcctccagcaaccgctggggagtgtgtccctgagtcatgtgggctgaatcctgactttcactcagagcaggtggttttttgtgtaggtttgttttttatttttgatgatcttcagatggaaggagaaaacagggtttccactagacattacttgaaaggccagattactcagcagatctcccatgttggctcaacaattctttgtttttaattgcttgaagattgcattgttgtaattgttcagtttttaaatgtgtaatggcattttaatagactagtaaatcacagtggttcaaaatatatatccatatatatatatatccatatatatatctcatgtcatcacattacaggcaggtgtctcatatgtaaaacatttacctgaatgttgtctgaggactgaactgtggactttactattcataatgataaaataataaaatgcgaattactatatataatgtgcctcactcatgagaaa

SEQ ID NO: 140956 - DNA, 600 bp, Artificial Sequence
  derived and/or modified sequence
atggaggccagagacaagcaggtgctgagaagcctgagactggagctgggcgccgaggtgctggtggagggcctggtgctgcagtacctgtaccaggagggcatcctgaccgagaaccacatccaggagatcaacgcccagaccaccggcctgagaaagaccatgctgctgctggacatcctgcccagcagaggccccaaggccttcgacaccttcctggacagcctgcaggagttcccctgggtgagagagaagctgaagaaggccagagaggaggccatgaccgacctgcccgccggcgacagactgaccggcatccccagccacatcctgaacagcagccccagcgacagacagatcaaccagctggcccagagactgggccccgagtgggagcccatggtgctgagcctgggcctgagccagaccgacatctacagatgcaaggccaaccacccccacaacgtgcagagccaggtggtggaggccttcatcagatggagacagagattcggcaagcaggccaccttccagagcctgcacaacggcctgagagccgtggaggtggaccccagcctgctgctgcacatgctggagtag

SEQ ID NO: 140957 - protein, 91 aa, Artificial Sequence
  derived and/or modified sequence
MCPCPLHRGRGPPAVCACSAGRLGLRSSAAQLTAARLKALGDELHQRTMWRRRARSRRAPAPGALPTYWPWLCAAAQVAALAAWLLGRRNL

SEQ ID NO: 140958 - DNA, 276 bp, Artificial Sequence
  derived and/or modified sequence
atgtgcccctgccccctgcacagaggcagaggcccccccgccgtgtgcgcctgcagcgccggcagactgggcctgagaagcagcgccgcccagctgaccgccgccagactgaaggccctgggcgacgagctgcaccagagaaccatgtggagaagaagagccagaagcagaagagcccccgcccccggcgccctgcccacctactggccctggctgtgcgccgccgcccaggtggccgccctggccgcctggctgctgggcagaagaaacctgtag

SEQ ID NO: 140959 - DNA, 276 bp, Artificial Sequence
  derived and/or modified sequence
atgtgcccttgtccattacacagagggcgcggacctcccgccgtgtgtgcatgctcagctggtaggctgggactgcgctcttccgccgcccagcttactgctgcccggctgaaggcactgggggacgagctgcaccaaagaactatgtggagacgtagagcccgctcacgcagagcgcccgccccgggagctctgcccacatactggccatggctgtgtgcggccgctcaggttgctgcgcttgcagcttggttgttagggaggaggaacctatag

SEQ ID NO: 140960 - DNA, 697 bp, Artificial Sequence
  derived and/or modified sequence
gaaacttggtgtccaggggaggcccccggcggctggagcgcggcggcagcgggcgcagaggccggagggagaggaggcgaggggcggcccgagcgcggggcgggagcgaggccagcggtcatgtgcccgtgccccctgcaccgcggccgcggccccccggccgtgtgcgcctgcagcgcgggtcgcctggggctgcgctcgtccgccgcgcagctcaccgccgcccggctcaaggcgctaggcgacgagctgcaccagcgcaccatgtggcggcgccgcgcgcggagccggagggcgccggcgcccggcgcgctccccacctactggccttggctgtgcgcggccgcgcaggtggcggcgctggcggcctggctgctcggcaggcggaacttgtaggaacgcggggcttcttggtggggccggagccgagacccagccggagcgagcaacaggttggtgaaaaccctgtgtccttggagaaagctggttcccgttttccagagggggagcccagagcttgaaaggccgcggttggcacttcgagaaggaagtggagagtaaagacagcgcctggagcgatcgtagaaacacagaatgggactggggaagccctttggaaatccagctgcagaaacagacaccccaatgctatttacatacagctctatatatataaaaaaagaaaatatgaatatta

SEQ ID NO: 140961 - DNA, 276 bp, Artificial Sequence
  derived and/or modified sequence
atgtgcccctgccccctgcaccggggccggggccccccagctgtgtgtgcctgcagcgctggccgcctgggcctgcggagcagcgctgcccagctgacagctgcccggctgaaggccctgggagatgagctgcaccagaggaccatgtggaggcggcgggcccggagcagaagagccccagcccctggggccctgcccacctactggccctggctgtgtgccgccgcccaggtggccgccctggccgcctggctgctgggcagaagaaacctgtag

SEQ ID NO: 140962 - DNA, 276 bp, Artificial Sequence
  derived and/or modified sequence
atgtgcccctgccccctgcaccggggccggggcccccccgccgtgtgcgcctgctctgcggggaggcttggtctgcgtagtagtgcagctcaactaaccgccgcgcgcctcaaggccctcggagatgagctccaccagagaactatgtggaggaggcgtgctaggtcaaggagagccccagcccctggtgcactgcctacgtattggccttggctatgcgcagctgcccaggtcgcggccctggcagcatggctcctcggacggcgtaacttatag

SEQ ID NO: 140963 - DNA, 276 bp, Artificial Sequence
  derived and/or modified sequence
atgtgcccatgtccgctgcaccgtggccgagggcctcctgccgtgtgcgcctgctccgctggcaggttaggactcagatcctccgctgctcagcttactgcggctcgccttaaagcgcttggtgatgagctgcatcaacgcaccatgtggcgaaggcgcgctcgatccaggcgcgctccggctcccggtgctctaccaacgtactggccatggctgtgcgctgctgcccaggtggcagccctcgcagcatggctactcggacggcgaaatctgtag

SEQ ID NO: 140964 - protein, 240 aa, Artificial Sequence
  derived and/or modified sequence
MEESVVRPSVFVVDGQTDIPFTRLGRSHRRQSCSVARVGLGLLLLLMGAGLAVQGWFLLQLHWRLGEMVTRLPDGPAGSWEQLIQERRSHEVNPAAHLTGANSSLTGSGGPLLWETQLGLAFLRGLSYHDGALVVTKAGYYYIYSKVQLGGVGCPLGLASTITHGLYKRTPRYPEELELLVSQQSPCGRATSSSRVWWDSSFLGGVVHLEAGEKVVVRVLDERLVRLRDGTRSYFGAFMV

SEQ ID NO: 140965 - DNA, 723 bp, Artificial Sequence
  derived and/or modified sequence
atggaggagagcgtggtgagacccagcgtgttcgtggtggacggccagaccgacatccccttcaccagactgggcagaagccacagaagacagagctgcagcgtggccagagtgggcctgggcctgctgctgctgctgatgggcgccggcctggccgtgcagggctggttcctgctgcagctgcactggagactgggcgagatggtgaccagactgcccgacggccccgccggcagctgggagcagctgatccaggagagaagaagccacgaggtgaaccccgccgcccacctgaccggcgccaacagcagcctgaccggcagcggcggccccctgctgtgggagacccagctgggcctggccttcctgagaggcctgagctaccacgacggcgccctggtggtgaccaaggccggctactactacatctacagcaaggtgcagctgggcggcgtgggctgccccctgggcctggccagcaccatcacccacggcctgtacaagagaacccccagataccccgaggagctggagctgctggtgagccagcagagcccctgcggcagagccaccagcagcagcagagtgtggtgggacagcagcttcctgggcggcgtggtgcacctggaggccggcgagaaggtggtggtgagagtgctggacgagagactggtgagactgagagacggcaccagaagctacttcggcgccttcatggtgtag

SEQ ID NO: 140966 - DNA, 723 bp, Artificial Sequence
  derived and/or modified sequence
atggaagagagcgtggtgcggccctctgtcttcgtggtcgacggacagaccgacatcccctttacccggctcggacggtctcatagaagacagtcctgctcagtagcacgcgtgggcctgggtctcctcctattacttatgggggcgggtttggccgtccagggctggttccttctgcaacttcactggagactgggcgagatggtgaccagattaccggacggacccgctggatcttgggaacagttaatacaggagcgccgctcccatgaagtgaatcctgcagcccatctcaccggcgccaattcgagtctcactgggtcgggtggccctctgttatgggagacccaactggggctcgccttcctccgaggactgtcttaccatgatggggctctcgtcgtgactaaagctgggtattactatatctatagcaaggtgcagctgggtggcgtggggtgtcccttaggccttgccagcactatcactcatgggctgtataagaggacccccagatatcccgaggagctggagttgctggtgtctcagcagagcccttgcgggagagcgacgagcagttcccgcgtctggtgggacagctccttcctcgggggagtggtccatcttgaggccggtgaaaaagtcgttgtgagggtactcgatgaacggctggtccggttgcgcgacgggaccaggtcctatttcggagccttcatggtgtag

SEQ ID NO: 140967 - DNA, 723 bp, Artificial Sequence
  derived and/or modified sequence
atggaagagagcgtcgtgcggcccagtgtcttcgtggtggacggccaaaccgacattccctttacacgtctcgggcggagccacaggaggcagtcctgcagcgtcgctagggtgggtcttggactgctgctgctccttatgggtgcagggttggctgtacagggctggttcttgctccagctccattggcgtctgggggagatggttacccgccttcccgacggacctgcaggatcttgggagcagctcatccaagagcggcgctctcacgaggtgaatcctgcagctcacttaacaggagcgaacagctctctcaccggctccggcggcccccttctgtgggaaactcagttgggcctagcctttctgcggggcctgtcgtaccatgacggcgcacttgtcgttacgaaggccggctattactacatctattcgaaggttcagttaggcggtgtgggctgcccactgggtctcgcctccactatcactcatggactgtacaagcgaactccaagatatccggaagagctggagctcctcgtgagtcagcaaagcccctgtggccgcgccacctcatcaagcagggtgtggtgggacagtagcttccttgggggtgtcgtccatctggaggccggggagaaggtggtcgttcgagtgctggatgaaaggcttgtcaggttaagagacggcacaagatcctatttcggcgcctttatggtgtag

SEQ ID NO: 140968 - DNA, 723 bp, Artificial Sequence
  derived and/or modified sequence
atggaggagagcgtggtgcggcccagcgtgtttgtggtggatggccagacagacatccccttcacccggctgggccgcagccaccggcggcagagctgcagcgtggcccgggtgggcctgggcctgctgctgctgctgatgggcgccggcctggccgtgcagggctggttcctgctgcagctgcactggaggctgggggagatggtgacccggctgcctgatggccctgctggctcctgggagcagctgatccaggagaggaggagccatgaggtgaacccagctgcccacctgactggagccaacagcagcctgaccggcagcggcggccccctgctgtgggagacccagctgggcctggccttcctgcggggcctgagctaccatgatggagccctggtggtgaccaaggccggctactactacatctacagcaaggtgcagctgggcggcgtgggctgccccctgggcctggccagcaccatcacccacggcctgtacaagaggaccccccgctacccagaggagctggagctgctggtgtcccagcagagcccctgtggccgggccaccagcagcagccgggtgtggtgggacagcagcttcctgggcggcgtggtgcacctggaggccggggagaaggtggtggtgcgggtgctggatgagcggctggtgcggctgagagatggcaccaggagctactttggagccttcatggtgtag

SEQ ID NO: 140969 - DNA, 723 bp, Artificial Sequence
  derived and/or modified sequence
atggaggagagcgtggtgcggcccagcgtgttcgtggtggacggccaaacagacatcccctttaccaggctggggaggagccaccgaaggcagtcatgctctgtggctagagtggggctgggactattgctactgttgatgggagccggactcgcggttcaaggctggtttctgctgcagctacactggagactgggggaaatggtgacaaggctgcctgacggccctgccgggtcgtgggagcagctcatccaggaaagacgaagtcacgaagttaatccagctgcccacttgaccggcgcaaacagcagcctgaccggaagcggaggccctttgctttgggaaacccaactgggattggcttttctgcggggcctatcttaccacgacggggccttggtggttactaaggccgggtattactatatttactcaaaggttcagcttggaggagtagggtgcccattaggtctggcctcaacaataacccatggcctgtacaagaggaccccccgctatcctgaggagctggagctactggtaagccagcagtcgccttgcggcagggctacctcctctagcagagtttggtgggacagtagcttcctgggcggcgttgtgcacttggaagccggcgaaaaggtggtggtccgcgtcttggacgagcgcctcgtcagactgcgcgacggcacccggtcttattttggcgccttcatggtgtag

SEQ ID NO: 140970 - DNA, 723 bp, Artificial Sequence
  derived and/or modified sequence
atggaggagagcgtggtgcggcccagcgtgttcgtggtggacggccagacagatattcccttcacccgcctggggcgaagccaccgtaggcagtcttgtagcgttgcccgtgtggggctggggctgctcttgctgttaatgggcgccggtctggcggtgcagggctggtttctccttcagttgcattggcgattgggcgagatggtcacacggctgccagatgggcccgccgggtcttgggagcagctcattcaggagcgccggagtcacgaagttaaccccgcggcacatctgaccggggccaactcaagcctgacggggtctggcggccccctgctctgggagacccaattgggactcgcattcctgagaggactgagctaccatgatggagccctggtggtgacaaaggcaggctattattacatttacagcaaggtgcagctagggggtgtaggttgtccactaggactggcttcaaccattacccatgggctgtacaagagaactccccggtaccccgaagagctcgagctcctggtctcacagcaaagtccttgtggacgggccacttcctctagtcgtgtgtggtgggactccagctttctcggcggagttgtccacttagaggccggggaaaaggtcgtggtccgcgtcctcgatgagagactcgtgcgcctgcgtgatggcacgcggagttactttggagcttttatggtgtag

SEQ ID NO: 140971 - DNA, 723 bp, Artificial Sequence
  derived and/or modified sequence
atggaagagagcgtagtgcggcctagtgtattcgttgtggacggacaaaccgatattcccttcactcgcttggggagaagtcacaggagacagtcctgcagtgtggctagagtcggcctgggtctgctgctgttgttgatgggagctggcctggctgtccagggctggtttttattacaacttcattggcgcctgggagagatggtgacccgcctgccggacgggccagcgggttcctgggagcagctcattcaggaacgcaggtcacacgaggttaatccggcagctcacttgacgggagctaattccagtctgactggttcaggagggcctctgctttgggagacgcagctgggtctggcttttcttagagggttgagctaccacgacggcgcactagttgtgaccaaggccggatactattatatctactctaaggtgcagctggggggagtgggttgccccctgggacttgcttctacgatcacccatgggctctacaaacggacaccacgctatcccgaggaattggaactattagttagtcagcagagtccttgtggtcgagctaccagttcctcacgcgtgtggtgggactcctcatttctcggtggcgtggttcatctcgaggctggggagaaggtggttgtaagggtactggacgagcgcctagttagactgagggatggcacccgatcatacttcggtgccttcatggtatag

SEQ ID NO: 140972 - DNA, 723 bp, Artificial Sequence
  derived and/or modified sequence
atggaagaaagcgtggttcggcctagcgtttttgtggtcgatggtcagaccgatattcccttcaccagactgggccgaagccatcgacgccaatcctgctccgttgcaagggtcggattgggcctgctactcttactgatgggcgctggtctcgctgttcagggatggttccttttgcagctccattggcgtctaggggaaatggtcacccggctgcctgacggacccgctggctcctgggaacaactgattcaggagaggcgaagccacgaggtgaacccggcagctcacctgaccggggctaattctagtctgacaggtagcgggggacctctcctgtgggagacacagctgggtctcgcttttcttagggggctaagttaccatgacggggcactcgttgttacaaaggccggatactattacatttactccaaagtgcagttgggaggagtagggtgtccacttggattagcgagtactatcacacatggtttgtacaaaagaacccccaggtaccccgaggagcttgagctactcgttagtcaacagtcgccttgtggaagggctacaagttcatccagagtgtggtgggatagtagttttctgggaggcgtggtgcatttagaggctggcgagaaggtcgttgtccgggtcctggacgaacgcttggtgaggctacgcgatgggacccgctcctacttcggagcattcatggtgtag

SEQ ID NO: 140973 - DNA, 1476 bp, Artificial Sequence
  derived and/or modified sequence
cgagactccatctcaaaaacaaaacaaataaacgaacaaaaaaacccacaacgtattattttcttgtttacgaggtttcttgtctctctggctccaccagaagaggagcagggacccttcttgctgttgttcattgctgcatcccccacaccgagagcagagcctggcatgggcagaaagtcctcagtcgatatttggtggccccaagcgaatgaagcatccaagaagggaaagctgggggctccccactgcacttgccacctgagtcacattttcagaagcctctggaaagtcgtgcacagcccaggagtgttgagcaatttcggtttcctctgaggttgaaggacccaggcgtgtcagccctgctccagacaccttgggcatggaggagagtgtcgtacggccctcagtgtttgtggtggatggacagaccgacatcccattcacgaggctgggacgaagccaccggagacagtcgtgcagtgtggcccgggtgggtctgggtctcttgctgttgctgatgggggccgggctggccgtccaaggctggttcctcctgcagctgcactggcgtctaggagagatggtcacccgcctgcctgacggacctgcaggctcctgggagcagctgatacaagagcgaaggtctcacgaggtcaacccagcagcgcatctcacaggggccaactccagcttgaccggcagcggggggccgctgttatgggagactcagctgggcctggccttcctgaggggcctcagctaccacgatggggcccttgtggtcaccaaagctggctactactacatctactccaaggtgcagctgggcggtgtgggctgcccgctgggcctggccagcaccatcacccacggcctctacaagcgcacaccccgctaccccgaggagctggagctgttggtcagccagcagtcaccctgcggacgggccaccagcagctcccgggtctggtgggacagcagcttcctgggtggtgtggtacacctggaggctggggagaaggtggtcgtccgtgtgctggatgaacgcctggttcgactgcgtgatggtacccggtcttacttcggggctttcatggtgtgaaggaaggagcgtggtgcattggacatgggtctgacacgtggagaactcagagggtgcctcaggggaaagaaaactcacgaagcagaggctgggcgtggtggctctcgcctgtaatcccagcactttgggaggccaaggcaggcggatcacctgaggtcaggagttcgagaccagcctggctaacatggcaaaaccccatctctactaaaaatacaaaaattagccggacgtggtggtgcctgcctgtaatccagctactcaggaggctgaggcaggataattttgcttaaacccgggaggcggaggttgcagtgagccgagatcacaccactgcactccaacctgggaaacgcagtgagactgtgcctcaa

SEQ ID NO: 140974 - DNA, 2894 bp, Artificial Sequence
  derived and/or modified sequence
cgagactccatctcaaaaacaaaacaaataaacgaacaaaaaaacccacaacgtattattttcttgtttacgaggtttcttgtctctctggctccaccagaagaggagcagggacccttcttgctgttgttcattgctgcatcccccacaccgagagcagagcctggcatgggcagaaagtcctcagtcgatatttggtggccccaagcgaatgaagcatccaagaagggaaagctgggggctccccactgcacttgccacctgagtcacattttcagaagcctctggaaagtcgtgcacagcccaggagtgttgagcaatttcggtttcctctgaggttgaaggacccaggcgtgtcagccctgctccagacaccttgggcatggaggagagtgtcgtacggccctcagtgtttgtggtggatggacagaccgacatcccattcacgaggctgggacgaagccaccggagacagtcgtgcagtgtggcccgggtgggtctgggtctcttgctgttgctgatgggggccgggctggccgtccaaggctggttcctcctgcagctgcactggcgtctaggagagatggtcacccgcctgcctgacggacctgcaggctcctgggagcagctgatacaagagcgaaggtctcacgaggtcaacccagcagcgcatctcacaggggccaactccagcttgaccggcagcggggggccgctgttatgggagactcagctgggcctggccttcctgaggggcctcagctaccacgatggggcccttgtggtcaccaaagctggctactactacatctactccaaggtgcagctgggcggtgtgggctgcccgctgggcctggccagcaccatcacccacggcctctacaagcgcacaccccgctaccccgaggagctggagctgttggtcagccagcagtcaccctgcggacgggccaccagcagctcccgggtctggtgggacagcagcttcctgggtggtgtggtacacctggaggctggggagaaggtggtcgtccgtgtgctggatgaacgcctggttcgactgcgtgatggtacccggtcttacttcggggctttcatggtgtgaaggaaggagcgtggtgcattggacatgggtctgacacgtggagaactcagagggtgcctcaggggaaagaaaactcacgaagcagaggctgggcgtggtggctctcgcctgtaatcccagcactttgggaggccaaggcaggcggatcacctgaggtcaggagttcgagaccagcctggctaacatggcaaaaccccatctctactaaaaatacaaaaattagccggacgtggtggtgcctgcctgtaatccagctactcaggaggctgaggcaggataattttgcttaaacccgggaggcggaggttgcagtgagccgagatcacaccactgcactccaacctgggaaacgcagtgagactgtgcctcaaaaaaaagaaaggaagaaaaaagaaaactcaggaaacagatcttgggggacactccagggaacccaaaactcaaaggcggagagctcagtgggcaccaccaaggcgagatgaagccccagcaggcaccttcagaagacccacgtagactgcagaccctgccacggacaatactaaggacaaaaacccagagacttggggtctgtgggcccccaaacatggggtaaagttgatttgcctgatattcaggaagaaggggtgaggggtgggtatttatgcttttgattcagaagaaagtggggcttgggattccagggacttggctgggggtgggaaacttcatccacttccctactctcatcatgagtacggacagggtgggcgggagactgatcatcgggactcatcatgaagagcccagccccaccccacatactcagatcccacccacagactggtggccacacctcagcctggtcacaaagagttacactcagatacatgagcacggcagcgtgctcataactgtttaacaaccagctgtcctgggagggggacagctttgtaatgtttgccaatttccatggtgtaaatgctaccaccatggctgatttcatcactgccaagcatagacatccctaataggacaccacggatctgtccccggcatccggcccagggcctggcacaaagcatgctctagggaaatgcttgctgattgaaaggaaggaagaatgactctacagtcacacctatggcatcccacaaaatctgtcacatggctgcataatctcagccactctttcacaactatagactcatacacgcgaagtgccagattcatgcacaaccacacaatcacatggaagtcacagacggcatcacagacagtcacagcactgtgtgtatgttataacacaagcacacaaaactcagacagcatcccagctacacagccactcccagaggtgtcaccgtcacacttggtaattaatactcattacattagacacagacagaccaagttatagtcagacctggttacacacatacacacacacaatatcaccatgacaaatacacattacacacacacaacatcacaatgacaaacacacattacacacacaacatcacgatgacaaacacacattacacacacaacatcacgatgacaaacacacattacacacacatcacaatgacaaacacaacattacacacacacaacatcacaatgacacacacatcacacacacatcacaatgacaaacacacaacattacacacatatacacacagcctgagggccctccccagcccagactaacacatctcggggtgaggaccagaccttgttcataaccctgggcctcttaaccactgatctttgaaataaatggcaaatagttgtacctgga

SEQ ID NO: 140975 - protein, 250 aa, Artificial Sequence [sequence omitted]

SEQ ID NO: 140976 - DNA, 753 bp, Artificial Sequence
  derived and/or modified sequence
atgccagcttctagcccttttctgctggccccaaaagggccaccaggcaacatgggcggtcccgtgagagaacctgccctgagcgtggctctgtggctgagttggggagctgcacttggcgctgttgcatgcgccatggctttgctgacccagcagaccgaacttcaatccctgaggagagaggtgtcacgactccagggcaccggcggaccttcccagaatggggaagggtacccatggcagagtcttccagagcagagctcggacgcccttgaggcctgggaaaatggagagcggtccagaaaaagaagggcagtgctgacccagaagcagaagaagcaacactccgtgttgcatctggttcccatcaacgcaacctcaaaagatgacagcgatgtgacagaggtgatgtggcaacccgctctgcgtcggggtcgagggctgcaggcccagggatacggagtgcggattcaggatgccggagtgtaccttctttactcccaggtactgttccaggacgtcacattcactatgggacaggtcgtctctagagaggggcaaggccgtcaagaaaccctttttagatgcatacgatccatgcctagtcatccagatagagcctacaattcctgctattccgccggtgtattccatctgcatcaaggtgacatcctgtccgtgataatccccagagccagggcaaagctcaacctcagccctcacggaacgtttctcgggttcgtaaaactttag

SEQ ID NO: 140977 - DNA, 753 bp, Artificial Sequence
  derived and/or modified sequence
atgccagcttctagtcctttccttttggccccaaaaggccctcctggaaacatgggtggccctgtgcgtgaacccgctctgagcgtggcactctggctttcctggggcgctgcactaggagccgtcgcttgtgctatggcattgttgacacagcagactgaattgcagagtctcagaagggaagtctcccgactccaagggacaggaggtccatctcagaacggggagggttatccctggcagtctctgcctgagcagtccagcgacgcactcgaagcctgggaaaacggtgagcgctccagaaagcgaagagcggtacttacacaaaaacaaaagaagcagcatagcgtccttcatctagttccaattaacgcaacgtcaaaggacgatagcgatgttactgaggttatgtggcaacctgccctaagaaggggacgcggcctgcaggcacaggggtacggtgtgcggatccaggacgccggtgtttatctactatatagtcaggtcctgttccaggatgtaacattcactatgggccaggttgtaagtagggagggtcagggaagacaagaaacactgttcaggtgtatccgctcgatgccttctcacccagatcgcgcttacaacagctgttatagtgcgggagtgtttcacctgcaccagggcgatattctgtcggtgatcattcctcgggcgcgtgccaaactgaatctgtctcctcatggcacctttctaggttttgtgaaactctag

SEQ ID NO: 140978 - DNA, 753 bp, Artificial Sequence
  derived and/or modified sequence
atgcccgcaagcagtccctttttgttagctcccaaaggcccgccgggcaacatgggcggaccagtacgtgagcccgcgctgagcgttgccctgtggttgtcgtggggagccgccctgggagctgtagcgtgtgccatggccctactcactcagcaaacagagctgcagagcttacgtcgggaagtgtcccgcctgcagggaaccggtggcccaagtcagaacggagaagggtatccgtggcagtcattgcctgagcagtcttctgacgccttggaggcctgggaaaatggcgaaaggtctcggaaaaggcgtgccgtgcttacgcagaagcagaaaaagcagcattctgtgctccatctagtacctattaacgctacctccaaagacgacagcgatgtaaccgaagtgatgtggcagcctgcccttcgaagaggacgtggtctccaggctcagggctatggggtaagaattcaggatgccggggtttatctactctactcccaggtactctttcaggacgttacatttacgatgggtcaggtggtcagtagagaaggccaagggaggcaagaaactctatttcggtgtatcagaagcatgccgtcccatccagatagagcctacaactcatgctactcggccggtgtgttccatttgcaccagggtgacatcctctcagtgattattccacgagccagagcaaaattaaatctctctccccacggcaccttcctgggatttgtgaagttatag

SEQ ID NO: 140979 - DNA, 753 bp, Artificial Sequence
  derived and/or modified sequence
atgcccgccagcagccccttcctgctggcccccaagggcccccccggcaacatgggcggccccgtgagagagcccgccctgagcgtggccctgtggctgagctggggcgccgccctgggcgccgtggcctgcgccatggccctgctgacccagcagaccgagctgcagagcctgagaagagaggtgagcagactgcagggcaccggcggccccagccagaacggcgagggctacccctggcagagcctgcccgagcagagcagcgacgccctggaggcctgggagaacggcgagagaagcagaaagagaagagccgtgctgacccagaagcagaagaagcagcacagcgtgctgcacctggtgcccatcaacgccaccagcaaggacgacagcgacgtgaccgaggtgatgtggcagcccgccctgagaagaggcagaggcctgcaggcccagggctacggcgtgagaatccaggacgccggcgtgtacctgctgtacagccaggtgctgttccaggacgtgaccttcaccatgggccaggtggtgagcagagagggccagggcagacaggagaccctgttcagatgcatcagaagcatgcccagccaccccgacagagcctacaacagctgctacagcgccggcgtgttccacctgcaccagggcgacatcctgagcgtgatcatccccagagccagagccaagctgaacctgagcccccacggcaccttcctgggcttcgtgaagctgtag

SEQ ID NO: 140980 - DNA, 1971 bp, Artificial Sequence
  derived and/or modified sequence
ccgagggtcttccaccctcgccctgaccctggacactgcccagcttggccccccatcctgctcctggcacaatgccctctagccagccaaccttccctcccccaaccctggggccgccccagggttcctgcgcactgcctgttcctcctgggtgtcactggcagccctgtccttcctagagggactggaacctaattctcctgaggctgagggagggtggagggtctcaaggcaacgctggccccacgacggagtgccaggagcactaacagtacccttagcttgctttcctcctccctcctttttattttcaagttcctttttatttctccttgcgtaacaaccttcttcccttctgcaccactgcccgtacccttacccgccccgccacctccttgctaccccactcttgaaaccacagctgttggcagggtccccagctcatgccagcctcatctcctttcttgctagcccccaaagggcctccaggcaacatggggggcccagtcagagagccggcactctcagttgccctctggttgagttggggggcagctctgggggccgtggcttgtgccatggctctgctgacccaacaaacagagctgcagagcctcaggagagaggtgagccggctgcaggggacaggaggcccctcccagaatggggaagggtatccctggcagagtctcccggagcagagttccgatgccctggaagcctgggagaatggggagagatcccggaaaaggagagcagtgctcacccaaaaacagaagaagcagcactctgtcctgcacctggttcccattaacgccacctccaaggatgactccgatgtgacagaggtgatgtggcaaccagctcttaggcgtgggagaggcctacaggcccaaggatatggtgtccgaatccaggatgctggagtttatctgctgtatagccaggtcctgtttcaagacgtgactttcaccatgggtcaggtggtgtctcgagaaggccaaggaaggcaggagactctattccgatgtataagaagtatgccctcccacccggaccgggcctacaacagctgctatagcgcaggtgtcttccatttacaccaaggggatattctgagtgtcataattccccgggcaagggcgaaacttaacctctctccacatggaaccttcctggggtttgtgaaactgtgattgtgttataaaaagtggctcccagcttggaagaccagggtgggtacatactggagacagccaagagctgagtatataaaggagagggaatgtgcaggaacagaggcgtcttcctgggtttggctccccgttcctcacttttcccttttcattcccaccccctagactttgattttacggatatcttgcttctgttccccatggagctccgaattcttgcgtgtgtgtagatgaggggcgggggacgggcgccaggcattgtccagacctggtcggggcccactggaagcatccagaacagcaccaccatctagcggccgctcgagggaagcacccgccggttggccgaagtccacgaagccgccctctgctagggaaaacccctggttctccatgccacacctctctccaggtgccctctgcctcttcaccccacaagaagccttatcctacgtccttctctccatctatcggaccccagtttccatcactatctccagagatgtagctattatgcgcccgtctacagggggtgcccgacgatgacggtgccttcgcagtcaaattactcttcgggtcccaaggtttggctttcacgcgctccattgccccggcgtggcaggccattccaagcccttccgggctggaactggtgtcggaggagcctcgggtgtatcgtacgccctggtgttggtgttgcctcactcctctgagctcttctttctgatcaagccctgcttaaagttaaataaaatagaatgaatgataccccggc

SEQ ID NO: 140981 - DNA, 753 bp, Artificial Sequence
  derived and/or modified sequence
atgcccgcctcctcaccctttctgctggccccgaagggcccgcccggtaacatgggaggacccgtgcgagagccagccctttcagttgcactgtggctgagttggggcgccgctttgggcgcggtagcctgcgccatggcgctgctcacacagcagaccgagctacagagtctgagaagggaagtgtccagactccagggtacaggcggcccaagccaaaatggcgagggctatccctggcagtccctcccagaacagagcagcgatgccctcgaggcatgggagaacggagagaggtcccgcaaacggagagccgtgttgacccagaagcaaaagaagcagcattcagtgcttcacctggtgccaattaacgccacctcaaaagacgacagtgatgttacagaagtaatgtggcaacctgccctcaggcgcggaagaggcctgcaggcacagggttacggcgtgcggattcaggatgcaggagtgtatctcctgtattcacaggtcctgtttcaagacgtgaccttcacgatgggccaggtagtgtctcgggagggccagggtagacaggagaccctgttcaggtgcatacgaagtatgcccagtcatccggatagggcttacaatagttgctacagtgccggcgtatttcacctgcaccagggagatatcctttctgtgattatcccacgggcgagggctaagcttaatctgagccctcatggcaccttcttgggtttcgtcaaactgtag

SEQ ID NO: 140982 - DNA, 753 bp, Artificial Sequence
  derived and/or modified sequence
atgcctgccagcagccccttcctgctggcccccaagggccccccaggcaacatgggcggccctgtgcgggagcccgccctgtctgtggccctgtggctgtcctggggcgccgccctgggcgctgtggcctgtgccatggccctgctgacccagcagacagagctgcagagcctgcggcgggaggtgtcccggctgcagggcaccggcggccccagccagaatggagagggctacccctggcagagcctgcctgagcagagcagtgatgccctggaggcctgggagaatggagagaggagcaggaagagaagagctgtgctgacccagaagcagaagaagcagcacagcgtgctgcacctggtgcccatcaatgccaccagcaaggatgacagtgatgtgacagaggtgatgtggcagcctgccctgcggcggggccggggcctgcaggcccagggctatggagtgcgcatccaggatgctggggtgtacctgctgtacagccaggtgctcttccaggatgtgaccttcaccatgggccaggtggtgtcccgggagggccagggccggcaggagaccctcttccgctgcatccgctccatgcccagccacccagaccgggcctacaacagctgctacagcgctggggtcttccacctgcaccagggcgacatcctgagcgtcatcatcccccgggcccgggccaagctgaacctgagcccccacggcaccttcctgggctttgtgaagctgtag

SEQ ID NO: 140983 - DNA, 753 bp, Artificial Sequence
  derived and/or modified sequence
atgcccgccagcagccccttcctgctggcccccaagggcccccccggaaatatgggcggtcctgtacgcgagccagctttgagtgtggctttgtggttgagctggggggcagccctgggcgccgttgcatgtgccatggccctgttgactcagcagacagagctacagagtcttcggcgggaggtttcccgcctgcagggcacgggtggacccagtcagaatggcgagggatatccttggcagtctttacctgagcaaagttctgacgccctcgaggcatgggagaacggggaacgcagccgcaaacgccgagcggtcttaacacagaaacaaaagaagcagcactccgtcctgcacctggtgccaataaacgctacctcaaaggacgactcagacgtgacagaggtgatgtggcagccagccctccgcaggggcaggggcctccaagcccaggggtatggcgttcggattcaagatgccggcgtgtacctgttgtattctcaagtgctattccaggacgtgaccttcactatggggcaggtagtgtcccgagaagggcagggtcgccaagagacccttttccgctgcatcagatccatgcctagtcatccggaccgagcatacaactcctgttatagtgcgggggtgttccacctgcatcagggtgatatcctctcagttattatcccaagggcgcgcgcaaagctgaacctgtccccgcacggcacattcctgggttttgtcaaactgtag

SEQ ID NO: 140984 - RNA, 753 nt, Artificial Sequence
  derived and/or modified sequence
augccagcuucuaguccuuuccuuuuggccccaaaaggcccuccuggaaacauggguggcccugugcgugaacccgcucugagcguggcacucuggcuuuccuggggcgcugcacuaggagccgucgcuugugcuauggcauuguugacacagcagacugaauugcagagucucagaagggaagucucccgacuccaagggacaggagguccaucucagaacggggaggguuaucccuggcagucucugccugagcaguccagcgacgcacucgaagccugggaaaacggugagcgcuccagaaagcgaagagcgguacuuacacaaaaacaaaagaagcagcauagcguccuucaucuaguuccaauuaacgcaacgucaaaggacgauagcgauguuacugagguuauguggcaaccugcccuaagaaggggacgcggccugcaggcacagggguacggugugcggauccaggacgccgguguuuaucuacuauauagucagguccuguuccaggauguaacauucacuaugggccagguuguaaguagggagggucagggaagacaagaaacacuguucagguguauccgcucgaugccuucucacccagaucgcgcuuacaacagcuguuauagugcgggaguguuucaccugcaccagggcgauauucugucggugaucauuccucgggcgcgugccaaacugaaucugucuccucauggcaccuuucuagguuuugugaaacucuag

SEQ ID NO: 140985 - RNA, 753 nt, Artificial Sequence
  derived and/or modified sequence
augcccgcaagcagucccuuuuuguuagcucccaaaggcccgccgggcaacaugggcggaccaguacgugagcccgcgcugagcguugcccugugguugucguggggagccgcccugggagcuguagcgugugccauggcccuacucacucagcaaacagagcugcagagcuuacgucgggaagugucccgccugcagggaaccgguggcccaagucagaacggagaaggguauccguggcagucauugccugagcagucuucugacgccuuggaggccugggaaaauggcgaaaggucucggaaaaggcgugccgugcuuacgcagaagcagaaaaagcagcauucugugcuccaucuaguaccuauuaacgcuaccuccaaagacgacagcgauguaaccgaagugauguggcagccugcccuucgaagaggacguggucuccaggcucagggcuaugggguaagaauucaggaugccgggguuuaucuacucuacucccagguacucuuucaggacguuacauuuacgaugggucagguggucaguagagaaggccaagggaggcaagaaacucuauuucgguguaucagaagcaugccgucccauccagauagagccuacaacucaugcuacucggccgguguguuccauuugcaccagggugacauccucucagugauuauuccacgagccagagcaaaauuaaaucucucuccccacggcaccuuccugggauuugugaaguuauag

SEQ ID NO: 140986 - protein, 249 aa, Artificial Sequence
  derived and/or modified sequence
MAARRSQRRRGRRGEPGTALLVPLALGLGLALACLGLLLAVVSLGSRASLSAQEPAQEELVAEEDQDPSELNPQTEESQDPAPFLNRLVRPRRSAPKGRKTRARRAIAAHYEVHPRPGQDGAQAGVDGTVSGWEEARINSSSPLRYNRQIGEFIVTRAGLYYLYCQVHFDEGKAVYLKLDLLVDGVLALRCLEEFSATAASSLGPQLRLCQVSGLLALRPGSSLRIRTLPWAHLKAAPFLTYFGLFQVH

SEQ ID NO: 140987 - DNA, 750 bp, Artificial Sequence
  derived and/or modified sequence
atggccgccagaagaagccagagaagaagaggcagaagaggcgagcccggcaccgccctgctggtgcccctggccctgggcctgggcctggccctggcctgcctgggcctgctgctggccgtggtgagcctgggcagcagagccagcctgagcgcccaggagcccgcccaggaggagctggtggccgaggaggaccaggaccccagcgagctgaacccccagaccgaggagagccaggaccccgcccccttcctgaacagactggtgagacccagaagaagcgcccccaagggcagaaagaccagagccagaagagccatcgccgcccactacgaggtgcaccccagacccggccaggacggcgcccaggccggcgtggacggcaccgtgagcggctgggaggaggccagaatcaacagcagcagccccctgagatacaacagacagatcggcgagttcatcgtgaccagagccggcctgtactacctgtactgccaggtgcacttcgacgagggcaaggccgtgtacctgaagctggacctgctggtggacggcgtgctggccctgagatgcctggaggagttcagcgccaccgccgccagcagcctgggcccccagctgagactgtgccaggtgagcggcctgctggccctgagacccggcagcagcctgagaatcagaaccctgccctgggcccacctgaaggccgcccccttcctgacctacttcggcctgttccaggtgcactag

SEQ ID NO: 140988 - DNA, 750 bp, Artificial Sequence
  derived and/or modified sequence
atggccgcgcggcggtctcagcggcggagaggccggcgtggtgagcctggtacagccctgcttgtgccactggcgctgggccttggcttggccttagcatgcttaggcctactcctcgctgttgtcagcctgggatctcgcgcatctctctcagcacaggaacccgctcaagaggagctggttgctgaagaagatcaggatccctctgaactcaaccctcagaccgaggagtctcaagatccggccccgtttctgaaccgccttgttagaccacggcgcagtgcgccaaaaggaaggaaaactagggctcgccgtgctatcgcagcacattatgaagtacatcctagacctggccaagatggagcccaggccggggtcgacggcacggtgagtggctgggaggaggcaaggataaactcttcctccccactgcggtacaatcgccagattggcgaattcatcgtgaccagagcgggcctgtattatttgtactgtcaggtccactttgacgaggggaaagccgtctacctcaaacttgacctgctcgtagatggcgtcctggcgctgaggtgtttggaggagttctccgctaccgcagcctcatctctgggtccacagctgaggttgtgtcaggtgagtgggctgctcgctttgagacctggtagcagcctgcggattcgaactcttccatgggcacacctgaaagccgctccttttctcacttatttcggactgttccaagtccactag

SEQ ID NO: 140989 - DNA, 750 bp, Artificial Sequence
  derived and/or modified sequence
atggccgcccggcgcagccagaggagaagaggccggcggggggagcccggcacagccctgctggtgcccctggccctgggcctgggcctggccctggcctgcctgggcctgctgctggccgtggtgtccctgggcagccgggccagcctgagcgcccaggagcccgcccaggaggagctggtggccgaggaggaccaggaccccagcgagctgaacccccagacagaggagagccaggaccctgcccccttcctgaaccggctggtgcggccccggcgcagcgcccccaagggcaggaagacccgggcccggcgggccatcgccgcccactatgaggtgcaccccaggcctggccaggatggagcccaggccggcgtggatggcaccgtgtctggctgggaggaggcccgcatcaacagcagcagccccctgcgctacaaccggcagatcggggagttcatcgtgacccgggccggcctgtactacctgtactgccaggtgcactttgatgagggcaaggctgtgtacctgaagctggacctgctggtggatggagtgctggccctgcgctgcctggaggagttcagcgccacagctgccagcagcctgggcccccagctgcggctgtgccaggtgtctggcctgctggccctgcggcccggcagcagcctgcgcatccgcaccctgccctgggcccacctgaaggccgcccccttcctgacctacttcggcctcttccaggtgcactag

SEQ ID NO: 140990 - DNA, 750 bp, Artificial Sequence
  derived and/or modified sequence
atggccgcccggcggagccagcggcggcggggccggcggggcgagcccggcaccgctctgcttgtcccactggcactcgggctggggctagcgttagcttgtctgggactactgctggcggtagtttcactgggcagcagggcctccctaagcgctcaggaacccgcacaagaagagctcgtggcagaggaggaccaggatccctctgaacttaatccccagacagaggagtcccaggatcccgctccctttttgaatagactagttagaccacgcaggtctgcccccaagggaagaaagacccgagccagacgcgctatcgccgctcactacgaagtgcacccaagacccgggcaggatggtgctcaggctggagtcgatggaaccgtgtcaggatgggaggaagcgcgcataaattccagcagtccgctgagatataaccggcaaatcggcgagttcatcgtaacaagggctggactctattacctctactgtcaggtgcactttgatgagggtaaggcagtttacttaaagctggatttgcttgtggacggcgtgctggccctgcggtgccttgaagaattctcggccaccgcggcctcttcgctgggaccccaactgcgattatgtcaagtgtccggactgcttgcactgagaccaggaagttctctgcgtatccggactctgccctgggctcacttgaaggcagctcccttcctgacttactttggcttgttccaggtgcactag

SEQ ID NO: 140991 - DNA, 750 bp, Artificial Sequence
  derived and/or modified sequence
atggcggcaagacgttcgcagagacgcagagggagaaggggcgagcccggaactgcactgctggtgcccttagctctggggctgggcctggcgttagcgtgcttgggcctcctgttggccgtcgtttcgctcgggagtagagcaagtctctcagcccaggagcctgcccaggaagaactggttgcggaagaggatcaggatccgagcgagcttaacccacagacagaagagtctcaggacccggcaccttttctaaatcgcctggtccgccctcggaggtccgctccgaagggacgaaaaacccgtgctcgcagggccattgctgcccactacgaggtgcacccgaggccgggacaagacggggcacaggcgggagtggatggcactgtatccggctgggaagaagctcgaattaactccagttctcctctgcggtacaataggcaaatcggggagttcatcgtcactagggccggtctgtactacctctactgccaggtgcattttgacgagggcaaagctgtgtatttgaaacttgacctgctcgtcgacggggtgctggcactgcgctgcctcgaggagttttctgcaaccgcggctagctcactgggaccacagttaaggctgtgccaagtctcagggttattggcacttcgtcctggatcaagcctacgcatacggactctgccctgggcgcatctgaaagcagcaccattcctcacttattttgggttgttccaggtgcactag

SEQ ID NO: 140992 - DNA, 1553 bp, Artificial Sequence
  derived and/or modified sequence
cctcgccctggtggtgcacgcccgggctgggcgctcagaggtcgggtgggcgcccactccgttcgctgcgcgcacagcgcccggcgagaggctcggagtttgatcacacacagcgtccggcttcctgtccccagcgccccctcccgccccgtttcccttgcccctccctctccccggcccgatccgcccgccggctccccctcccccgatccctcgggtcccgggatgggggggcggtgaggcaggcacagccccccgcccccatggccgcccgtcggagccagaggcggagggggcgccggggggagccgggcaccgccctgctggtcccgctcgcgctgggcctgggcctggcgctggcctgcctcggcctcctgctggccgtggtcagtttggggagccgggcatcgctgtccgcccaggagcctgcccaggaggagctggtggcagaggaggaccaggacccgtcggaactgaatccccagacagaagaaagccaggatcctgcgcctttcctgaaccgactagttcggcctcgcagaagtgcacctaaaggccggaaaacacgggctcgaagagcgatcgcagcccattatgaagttcatccacgacctggacaggacggagcgcaggcaggtgtggacgggacagtgagtggctgggaggaagccagaatcaacagctccagccctctgcgctacaaccgccagatcggggagtttatagtcacccgggctgggctctactacctgtactgtcaggtgcactttgatgaggggaaggctgtctacctgaagctggacttgctggtggatggtgtgctggccctgcgctgcctggaggaattctcagccactgcggcgagttccctcgggccccagctccgcctctgccaggtgtctggtctgttggccctgcggccagggtcctccctgcggatccgcaccctcccctgggcccatctcaaggctgcccccttcctcacctacttcggactcttccaggttcactgaggggccctggtctccccgcagtcgtcccaggctgccggctcccctcgacagctctctgggcacccggtcccctctgccccaccctcagccgctctttgctccagacctgcccctccctctagaggctgcctgggcctgttcacgtgttttccatcccacataaatacagtattcccactcttatcttacaactcccccaccgcccactctccacctcactagctccccaatccctgaccctttgaggcccccagtgatctcgactcccccctggccacagacccccagggcattgtgttcactgtactctgtgggcaaggatgggtccagaagaccccacttcaggcactaagaggggctggacctggcggcaggaagccaaagagactgggcctaggccaggagttcccaaatgtgaggggcgagaaacaagacaagctcctcccttgagaattccctgtggatttttaaaacagatattatttttattattattgtgacaaaatgttgataaatggatattaaatagaataagtcata

SEQ ID NO: 140993 - protein, 281 aa, Artificial Sequence [sequence omitted]

SEQ ID NO: 140994 - DNA, 846 bp, Artificial Sequence
  derived and/or modified sequence
atggccatgatggaggtgcagggcggccccagcctgggccagacctgcgtgctgatcgtgatcttcaccgtgctgctgcagagcctgtgcgtggccgtgacctacgtgtacttcaccaacgagctgaagcagatgcaggacaagtacagcaagagcggcatcgcctgcttcctgaaggaggacgacagctactgggaccccaacgacgaggagagcatgaacagcccctgctggcaggtgaagtggcagctgagacagctggtgagaaagatgatcctgagaaccagcgaggagaccatcagcaccgtgcaggagaagcagcagaacatcagccccctggtgagagagagaggcccccagagagtggccgcccacatcaccggcaccagaggcagaagcaacaccctgagcagccccaacagcaagaacgagaaggccctgggcagaaagatcaacagctgggagagcagcagaagcggccacagcttcctgagcaacctgcacctgagaaacggcgagctggtgatccacgagaagggcttctactacatctacagccagacctacttcagattccaggaggagatcaaggagaacaccaagaacgacaagcagatggtgcagtacatctacaagtacaccagctaccccgaccccatcctgctgatgaagagcgccagaaacagctgctggagcaaggacgccgagtacggcctgtacagcatctaccagggcggcatcttcgagctgaaggagaacgacagaatcttcgtgagcgtgaccaacgagcacctgatcgacatggaccacgaggccagcttcttcggcgccttcctggtgggctag

SEQ ID NO: 140995 - DNA, 846 bp, Artificial Sequence
  derived and/or modified sequence
atggctatgatggaggttcagggtgggcccagcctgggccagacctgcgtcctcatcgtgatctttacagttctgctccagagcctgtgtgtcgcggtgacctacgtgtatttcaccaatgagctgaagcagatgcaggacaagtatagtaaaagcggaattgcatgtttcctgaaggaagatgactcctactgggaccccaacgacgaggaatccatgaattcaccttgctggcaggttaaatggcagctgcggcagctggtacggaagatgattttgagaacctccgaggaaacgatttccaccgtgcaagagaagcagcagaacattagcccgctggttagagagcgaggtccgcagagagtggccgcccatattaccgggacccgcggccggagtaatactctttcctctccaaacagcaaaaacgaaaaggcattgggtcggaagatcaactcgtgggagtcatcccggtcagggcattctttcctgtctaaccttcatctcagaaatggggaacttgtgatacatgagaaggggttttattatatatattctcaaacctatttcaggttccaggaggaaatcaaggagaacaccaaaaacgacaagcagatggtgcagtacatttacaaatacacctcttatccagatccaatcctcctaatgaaaagtgcacgtaacagctgctggtcgaaagatgcagagtacggcctttatagcatctaccagggcggcatcttcgagcttaaggaaaatgatcgcatattcgtctcggtcacgaatgaacacctcatcgacatggatcacgaagcttcttttttcggcgccttcctcgtgggctag

SEQ ID NO: 140996 - DNA, 846 bp, Artificial Sequence
  derived and/or modified sequence
atggccatgatggaggtgcagggcggccccagcctgggccagacctgtgtgctgattgtcatcttcaccgtgctgctgcagagcctgtgtgtggccgtgacctacgtgtacttcaccaatgagctgaagcagatgcaggacaagtacagcaagagcggcatcgcctgcttcctgaaggaggatgacagctactgggaccccaatgatgaggagagcatgaacagcccctgctggcaggtgaagtggcagctgcggcagctggtgaggaagatgatcctgcggaccagcgaggagaccatcagcacagtgcaggagaagcagcagaacatcagccccctggtgcgggagcggggcccccagagggtggccgcccacatcaccggcacccggggccgcagcaacaccctgagcagccccaacagcaagaatgagaaggccctgggcaggaagatcaacagctgggagagcagccgcagcggccacagcttcctgagcaacctgcacctgagaaatggagagctggtgattcatgagaagggcttctactacatctacagccagacctacttccgcttccaggaggagatcaaggagaacaccaagaatgacaagcagatggtgcagtacatctacaagtacaccagctacccagaccccatcctgctgatgaagagcgccaggaacagctgctggagcaaggatgctgaatatggcctgtacagcatctaccagggcggcatctttgagctgaaggaaaatgaccgcatctttgtgtctgtgaccaatgagcacctgattgacatggaccacgaggccagcttctttggagccttcctggtgggctag

SEQ ID NO: 140997 - DNA, 846 bp, Artificial Sequence
  derived and/or modified sequence
atggccatgatggaggtgcagggcggccccagcctgggccagacctgcgtgctcatcgtgatctttactgttttgctgcagtccttgtgtgtggccgttacatacgtttactttacaaatgagctcaaacaaatgcaggacaagtattctaagagtggcatcgcctgttttctcaaggaggatgatagctactgggacccgaacgacgaggagtcaatgaacagtccttgttggcaggtgaagtggcagcttagacagttggtgagaaaaatgatcctacgaacgtcagaggaaaccatttccacagtccaggagaagcagcagaatattagtcccttggtgcgcgagaggggtccccagcgggtcgcagctcacattacaggaacccgcgggcgatcaaatactctctcaagccccaattccaagaatgaaaaagccctgggacgaaagattaattcttgggaatcctcccggtccggacatagcttcctgtcaaatctgcacctgcgaaacggtgagctggtgattcatgagaagggtttttactatatctactcccagacctatttccggttccaagaggaaattaaggagaacacgaaaaatgataaacagatggtgcaatacatttataagtacacctcctatcccgatccgatccttttgatgaagagcgctcgcaactcatgttggtcaaaggatgccgaatacggcctttactcaatctatcaagggggcatttttgagctcaaagaaaatgaccggatttttgttagcgtgactaacgagcacctgattgatatggaccatgaggcctccttctttggggctttcctggtgggctag

SEQ ID NO: 140998 - DNA, 846 bp, Artificial Sequence
  derived and/or modified sequence
atggccatgatggaggtacagggcggaccctcactggggcagacctgtgtactcattgtgatctttacggtgctgctccagagcctgtgcgttgcagttacttacgtgtatttcactaacgaattgaagcagatgcaagacaagtattccaaaagtggaatcgcctgcttccttaaagaggatgattcttactgggaccccaatgatgaagagtccatgaacagcccttgctggcaagtgaagtggcagttgcggcaactggtgcgaaagatgattttacgaacctccgaagagacgataagcaccgtccaggagaaacagcagaatattagtccactggtaagggaacgaggcccacagcgggtggctgctcatatcaccggaacaagaggaagaagcaacacactgtctagtcccaattctaagaacgagaaggcgctaggtaggaaaataaacagttgggagtcttcgagaagcggccactccttcctgagcaatttgcatctcaggaacggagagttagttatccatgagaaaggattttactacatttattcacaaacatattttcgcttccaggaggaaatcaaggaaaatacaaaaaatgacaagcaaatggtgcaatatatttacaaatatacctcctatcccgatcccatccttcttatgaagagcgcacgcaacagctgctggtccaaggatgctgagtacggcctctatagcatttatcagggtggaatctttgagctcaaagaaaatgatagaatctttgtgtccgtgacgaatgagcacctaattgatatggatcacgaggcatctttcttcggagctttcctggtcggctag

SEQ ID NO: 140999 - DNA, 1619 bp, Artificial Sequence
  derived and/or modified sequence
atttcctcactgactataaaagaatagagaaggaagggcttcagtgaccggctgcctggctgacttacagcagtcagactctgacaggatcatggctatgatggaggtccaggggggacccagcctgggacagacctgcgtgctgatcgtgatcttcacagtgctcctgcagtctctctgtgtggctgtaacttacgtgtactttaccaacgagctgaagcagatgcaggacaagtactccaaaagtggcattgcttgtttcttaaaagaagatgacagttattgggaccccaatgacgaagagagtatgaacagcccctgctggcaagtcaagtggcaactccgtcagctcgttagaaagactccaagaatgaaaaggctctgggccgcaaaataaactcctgggaatcatcaaggagtgggcattcattcctgagcaacttgcacttgaggaatggtgaactggtcatccatgaaaaagggttttactacatctattcccaaacatactttcgatttcaggaggaaataaaagaaaacacaaagaacgacaaacaaatggtccaatatatttacaaatacacaagttatcctgaccctatattgttgatgaaaagtgctagaaatagttgttggtctaaagatgcagaatatggactctattccatctatcaagggggaatatttgagcttaaggaaaatgacagaatttttgtttctgtaacaaatgagcacttgatagacatggaccatgaagccagtttttttggggcctttttagttggctaactgacctggaaagaaaaagcaataacctcaaagtgactattcagttttcaggatgatacactatgaagatgtttcaaaaaatctgaccaaaacaaacaaacagaaaacagaaaacaaaaaaacctctatgcaatctgagtagagcagccacaaccaaaaaattctacaacacacactgttctgaaagtgactcacttatcccaagagaatgaaattgctgaaagatctttcaggactctacctcatatcagtttgctagcagaaatctagaagactgtcagcttccaaacattaatgcaatggttaacatcttctgtctttataatctactccttgtaaagactgtagaagaaagagcaacaatccatctctcaagtagtgtatcacagtagtagcctccaggtttccttaagggacaacatccttaagtcaaaagagagaagaggcaccactaaaagatcgcagtttgcctggtgcagtggctcacacctgtaatcccaacattttgggaacccaaggtgggtagatcacgagatcaagagatcaagaccatagtgaccaacatagtgaaaccccatctctactgaaagtacaaaaattagctgggtgtgttggcacatgcctgtagtcccagctacttgagaggctgaggcaagagaattgtttgaacccgggaggcagaggttgcagtgtggtgagatcatgccactacactccagcctggcgacagagcgagacttggtttcaaaaaaaaaaaaaaaaaaaacttcagtaagtacgtgttatttttttcaataaaattctattacagtatgtcatgtttgctgtag

SEQ ID NO: 141000 - DNA, 1953 bp, Artificial Sequence
  derived and/or modified sequence
acagaacccagaaaaacaactcattcgctttcatttcctcactgactataaaagaatagagaaggaagggcttcagtgaccggctgcctggctgacttacagcagtcagactctgacaggatcatggctatgatggaggtccaggggggacccagcctgggacagacctgcgtgctgatcgtgatcttcacagtgctcctgcagtctctctgtgtggctgtaacttacgtgtactttaccaacgagctgaagcagatgcaggacaagtactccaaaagtggcattgcttgtttcttaaaagaagatgacagttattgggaccccaatgacgaagagagtatgaacagcccctgctggcaagtcaagtggcaactccgtcagctcgttagaaagatgattttgagaacctctgaggaaaccatttctacagttcaagaaaagcaacaaaatatttctcccctagtgagagaaagaggtcctcagagagtagcagctcacataactgggaccagaggaagaagcaacacattgtcttctccaaactccaagaatgaaaaggctctgggccgcaaaataaactcctgggaatcatcaaggagtgggcattcattcctgagcaacttgcacttgaggaatggtgaactggtcatccatgaaaaagggttttactacatctattcccaaacatactttcgatttcaggaggaaataaaagaaaacacaaagaacgacaaacaaatggtccaatatatttacaaatacacaagttatcctgaccctatattgttgatgaaaagtgctagaaatagttgttggtctaaagatgcagaatatggactctattccatctatcaagggggaatatttgagcttaaggaaaatgacagaatttttgtttctgtaacaaatgagcacttgatagacatggaccatgaagccagtttttttggggcctttttagttggctaactgacctggaaagaaaaagcaataacctcaaagtgactattcagttttcaggatgatacactatgaagatgtttcaaaaaatctgaccaaaacaaacaaacagaaaacagaaaacaaaaaaacctctatgcaatctgagtagagcagccacaaccaaaaaattctacaacacacactgttctgaaagtgactcacttatcccaagagaatgaaattgctgaaagatctttcaggactctacctcatatcagtttgctagcagaaatctagaagactgtcagcttccaaacattaatgcaatggttaacatcttctgtctttataatctactccttgtaaagactgtagaagaaagagcaacaatccatctctcaagtagtgtatcacagtagtagcctccaggtttccttaagggacaacatccttaagtcaaaagagagaagaggcaccactaaaagatcgcagtttgcctggtgcagtggctcacacctgtaatcccaacattttgggaacccaaggtgggtagatcacgagatcaagagatcaagaccatagtgaccaacatagtgaaaccccatctctactgaaagtacaaaaattagctgggtgtgttggcacatgcctgtagtcccagctacttgagaggctgaggcaagagaattgtttgaacccgggaggcagaggttgcagtgtggtgagatcatgccactacactccagcctggcgacagagcgagacttggtttcaaaaaaaaaaaaaaaaaaaacttcagtaagtacgtgttatttttttcaataaaattctattacagtatgtcatgtttgctgtagtgctcatatttattgttgtttttgttttagtactcacttgtttcataatatcaagattactaaaaatgggggaaaagacttctaatctttttttcataatatctttgacacatattacagaagaaataaatttcttacttttaatttaatatga

SEQ ID NO: 141001 - protein, 254 aa, Artificial Sequence
  derived and/or modified sequence
MEYASDASLDPEAPWPPAPRARACRVLPWALVAGLLLLLLLAAACAVFLACPWAVSGARASPGSAASPRLREGPELSPDDPAGLLDLRQGMFAQLVAQNVLLIDGPLSWYSDPGLAGVSLTGGLSYKEDTKELVVAKAGVYYVFFQLELRRVVAGEGSGSVSLALHLQPLRSAAGAAALALTVDLPPASSEARNSAFGFQGRLLHLSAGQRLGVHLHTEARARHAWQLTQGATVLGLFRVTPEIPAGLPSPRSE

SEQ ID NO: 141002 - DNA, 765 bp, Artificial Sequence
  derived and/or modified sequence
atggagtacgccagcgacgccagcctggaccccgaggccccctggccccccgcccccagagccagagcctgcagagtgctgccctgggccctggtggccggcctgctgctgctgctgctgctggccgccgcctgcgccgtgttcctggcctgcccctgggccgtgagcggcgccagagccagccccggcagcgccgccagccccagactgagagagggccccgagctgagccccgacgaccccgccggcctgctggacctgagacagggcatgttcgcccagctggtggcccagaacgtgctgctgatcgacggccccctgagctggtacagcgaccccggcctggccggcgtgagcctgaccggcggcctgagctacaaggaggacaccaaggagctggtggtggccaaggccggcgtgtactacgtgttcttccagctggagctgagaagagtggtggccggcgagggcagcggcagcgtgagcctggccctgcacctgcagcccctgagaagcgccgccggcgccgccgccctggccctgaccgtggacctgccccccgccagcagcgaggccagaaacagcgccttcggcttccagggcagactgctgcacctgagcgccggccagagactgggcgtgcacctgcacaccgaggccagagccagacacgcctggcagctgacccagggcgccaccgtgctgggcctgttcagagtgacccccgagatccccgccggcctgcccagccccagaagcgagtag

SEQ ID NO: 141003 - DNA, 765 bp, Artificial Sequence
  derived and/or modified sequence
atggagtatgcgagtgatgccagcctggatccggaagccccatggcctcctgctccccgggcccgcgcttgtcgcgttctcccctgggctctggtggctggattgctcttgcttttattgttggcagccgcatgtgccgtttttctcgcatgcccatgggcagtgtcaggggcgagggcttctccaggatctgctgcctccccaagactgcgggaaggacctgagctgtctcccgacgaccccgccgggcttctggacctgcgccaaggaatgtttgcccagctggtagcacagaacgtgttactcatagatggccccctttcatggtacagcgacccgggtctcgcaggggtatcgctgactggcggtctctcatataaagaggatactaaagaactggtagtggccaaagcaggagtgtattatgttttttttcagctcgaactccgacgcgtcgttgctggggagggcagcgggagtgtgagcctagccctgcacttgcagcccctgcggagcgctgccggagcggccgccctggccttaacagtggacctcccccctgcgagctcagaagcaagaaatagcgcattcggattccaggggcgactgctgcacctctccgcgggccagagacttggtgtgcacttgcacacggaggcccgcgctcgccacgcttggcagttaacccagggggctactgtcctggggctcttccgtgtgactcctgagattccagccggcctgccttcccccaggagcgaatag

SEQ ID NO: 141004 - DNA, 765 bp, Artificial Sequence
  derived and/or modified sequence
atggagtatgccagtgatgccagcctggaccctgaggccccctggcccccagccccccgggcccgggcctgccgggtgctgccctgggccctggtggccggcctgctgctgctgctgctgctggccgccgcctgtgctgtgttcctggcctgcccctgggccgtgtctggggcccgggccagccctggcagcgctgccagcccccggctgcgggagggccctgagctgagcccagatgatcctgctggcctgctggacctgcggcagggcatgtttgcccagctggtggcccagaatgtgctgctgattgatggccccctgtcctggtacagcgaccccggcctggccggcgtgtccctgactggaggcctgagctacaaggaggacaccaaggagctggtggtggccaaggccggcgtgtactacgtgttcttccagctggagctgcggcgggtggtggccggggagggcagcggctctgtgtccctggccctgcacctgcagcccctgcggtctgctgctggagctgctgccctggccctgactgtggacctgcccccagccagcagcgaggccagaaattctgccttcggcttccagggccgcctgctgcacctgtctgctggccagaggctgggcgtgcacctgcacacagaggcccgggcccggcatgcctggcagctgacccagggcgccaccgtgctgggcctcttccgggtgaccccagagatcccagctggcctgcccagccccaggtctgagtag

SEQ ID NO: 141005 - DNA, 765 bp, Artificial Sequence
  derived and/or modified sequence
atggagtacgccagcgacgccagcctggaccccgaggccccctggcctcccgcacctcgggcccgcgcctgccgggttctcccatgggctctcgttgccggtttgctgttgcttttgctgctggcagcagcctgtgccgtgttcttggcctgtccatgggcagtaagtggcgctagggcaagtcccggtagcgctgcttccccaagactccgggagggcccagagctgagtccagatgatcctgccgggctgctcgacctgcggcagggtatgttcgcccagcttgtggctcagaacgtgctgttgatcgacggcccccttagctggtactcagatccaggactggctggcgtgtccctgaccggcggcctgtcctacaaagaggataccaaggagcttgtagtggccaaggcgggggtgtactatgttttcttccagttggagctgaggcgtgtcgtggcaggagaaggctccggcagtgtctctctggcactgcacttacagcctctgaggtccgcggctggcgctgccgctcttgctctcaccgtcgatctgccgccagccagttctgaggcccgaaacagcgctttcgggttccagggaagattgctgcatctgtcggctggccaacgactaggggtgcatttgcataccgaggctcgtgctcggcacgcctggcagctgactcaaggagcaactgttcttggtcttttccgagtgactcctgaaatcccagccggcctgccttccccccgtagcgaatag

SEQ ID NO: 141006 - DNA, 765 bp, Artificial Sequence
  derived and/or modified sequence
atggaatatgcatcagacgccagtctggatcctgaggcaccctggccaccagccccaagggctagagcttgcagagtgctgccttgggcccttgtcgctggcctcctgctgctgctattactggcggctgcttgtgctgtcttcctggcatgcccatgggcagtctccggggcaagagcctccccaggatctgctgccagccctcgcttgagggaagggccagagctttcgcctgatgaccctgccggtctgttggatcttcgccaggggatgttcgcacagcttgtggcccagaacgtgctcttgatcgacggacctctgagttggtatagcgaccccggtctggctggagtgagcctcacagggggtctgtcttacaaagaggacactaaggaacttgtagtagctaaggctggcgtatattacgtgttctttcagttggagctgcggagagtcgtggcaggagaaggctccggtagcgtatccctggccctacatctccaaccacttcggtcagcagccggagcagctgctttggctctgactgtggacttgccgcctgcctcaagtgaggcccgaaacagtgccttcggctttcaggggaggctgctacacttaagcgcaggccagcggctgggggtccacctgcataccgaagcgcgagcacgacatgcctggcagcttactcagggggcaaccgtgctgggcctctttcgcgtgacccctgagatcccggcaggactgccaagccctagatccgagtag

SEQ ID NO: 141007 - DNA, 1665 bp, Artificial Sequence
  derived and/or modified sequence
aaaaagcggcgcgctgtgtcttcccgcagtctctcgtcatggaatacgcctctgacgcttcactggaccccgaagccccgtggcctcccgcgccccgcgctcgcgcctgccgcgtactgccttgggccctggtcgcggggctgctgctgctgctgctgctcgctgccgcctgcgccgtcttcctcgcctgcccctgggccgtgtccggggctcgcgcctcgcccggctccgcggccagcccgagactccgcgagggtcccgagctttcgcccgacgatcccgccggcctcttggacctgcggcagggcatgtttgcgcagctggtggcccaaaatgttctgctgatcgatgggcccctgagctggtacagtgacccaggcctggcaggcgtgtccctgacggggggcctgagctacaaagaggacacgaaggagctggtggtggccaaggctggagtctactatgtcttctttcaactagagctgcggcgcgtggtggccggcgagggctcaggctccgtttcacttgcgctgcacctgcagccactgcgctctgctgctggggccgccgccctggctttgaccgtggacctgccacccgcctcctccgaggctcggaactcggccttcggtttccagggccgcttgctgcacctgagtgccggccagcgcctgggcgtccatcttcacactgaggccagggcacgccatgcctggcagcttacccagggcgccacagtcttgggactcttccgggtgacccccgaaatcccagccggactcccttcaccgaggtcggaataacgtccagcctgggtgcagcccacctggacagagtccgaatcctactccatccttcatggagacccctggtgctgggtccctgctgctttctctacctcaaggggcttggcaggggtccctgctgctgacctccccttgaggaccctcctcacccactccttccccaagttggaccttgatatttattctgagcctgagctcagataatatattatatatattatatatatatatatatttctatttaaagaggatcctgagtttgtgaatggacttttttagaggagttgttttgggggggggggggtcttcgacattgccgaggctggtcttgaactcctggacttagacgatcctcctgcctcagcctcccaagcaactgggattcatcctttctattaattcattgtacttatttgcttatttgtgtgtattgagcatctgtaatgtgccagcattgtgcccaggctagggggctatagaaacatctagaaatagactgaaagaaaatctgagttatggtaatacgtgaggaatttaaagactcatccccagcctccacctcctgtgtgatacttgggggctagcttttttctttctttcttttttttgagatggtcttgttctgtcaaccaggctagaatgcagcggtgcaatcatgagtcaatgcagcctccagcctcgacctcccgaggctcaggtgatcctcccatctcagcctctcgagtagctgggaccacagttgtgtgccaccacacttggctaactttttaatttttttgcggagacggtattgctatgttgccaaggttgtttacatgccagtacaatttataataaacactcatttttcctccctctg

SEQ ID NO: 141008 - protein, 832 aa, Artificial Sequence
  derived and/or modified sequence
MKPPGSSSRQPPLAGCSLAGASCGPQRGPAGSVPASAPARTPPCRLLLVLLLLPPLAASSRPRAWGAAAPSAPHWNETAEKNLGVLADEDNTLQQNSSSNISYSNAMQKEITLPSRLIYYINQDSESPYHVLDTKARHQQKHNKAVHLAQASFQIEAFGSKFILDLILNNGLLSSDYVEIHYENGKPQYSKGGEHCYYHGSIRGVKDSKVALSTCNGLHGMFEDDTFVYMIEPLELVHDEKSTGRPHIIQKTLAGQYSKQMKNLTMERGDQWPFLSELQWLKRRKRAVNPSRGIFEEMKYLELMIVNDHKTYKKHRSSHAHTNNFAKSVVNLVDSIYKEQLNTRVVLVAVETWTEKDQIDITTNPVQMLHEFSKYRQRIKQHADAVHLISRVTFHYKRSSLSYFGGVCSRTRGVGVNEYGLPMAVAQVLSQSLAQNLGIQWEPSSRKPKCDCTESWGGCIMEETGVSHSRKFSKCSILEYRDFLQRGGGACLFNRPTKLFEPTECGNGYVEAGEECDCGFHVECYGLCCKKCSLSNGAHCSDGPCCNNTSCLFQPRGYECRDAVNECDITEYCTGDSGQCPPNLHKQDGYACNQNQGRCYNGECKTRDNQCQYIWGTKAAGSDKFCYEKLNTEGTEKGNCGKDGDRWIQCSKHDVFCGFLLCTNLTRAPRIGQLQGEIIPTSFYHQGRVIDCSGAHVVLDDDTDVGYVEDGTPCGPSMMCLDRKCLQIQALNMSSCPLDSKGKVCSGHGVCSNEATCICDFTWAGTDCSIRDPVRNLHPPKDEGPKGPSATNLIIGSIAGAILVAAIVLGGTGWGFKNVKKRRFDPTQQGPI

SEQ ID NO: 141009 - DNA, 2499 bp, Artificial Sequence
  derived and/or modified sequence
atgaagccccctggttccagcagccggcagccaccgttagcaggatgtagtctggccggtgcatcctgcggcccgcagcgagggccagcgggatccgttccagcctcagcccccgccagaacccccccgtgtagattgctcttggtcctgttactcttaccacctttagccgcaagttccagaccaagagcttggggggccgctgcccctagcgctccacactggaatgagaccgccgaaaaaaacctgggggtcttggccgacgaagacaacacactgcagcagaatagctcatccaacattagctactccaatgccatgcagaaggaaatcacactgccatcgcggctgatatactacatcaaccaagattctgaaagcccataccatgtgctggatacaaaagcacgtcaccagcagaaacataacaaggccgtgcatctcgcacaggccagcttccaaatcgaggcctttgggtccaaattcatacttgacctcatattaaacaatggcctgctgagctccgattacgtggaaatccactacgagaacggtaagcctcagtatagcaaggggggtgaacactgctattatcatggatccattcgcggagtcaaggattctaaggtggctctgtcaacgtgtaacggcttgcacggtatgtttgaggacgacactttcgtctacatgatagagcctctggaattagtgcatgacgagaagagtactgggaggccgcacattattcagaagacgctggccgggcagtatagcaaacagatgaagaacctaacgatggaacgaggagaccagtggccgttcctgagcgagttgcaatggctgaagcgacgtaagcgcgctgttaacccaagcaggggtatcttcgaggagatgaaatacttggagctgatgatcgtcaacgaccataaaacatataagaagcacaggagttcacatgctcataccaataatttcgccaaaagcgtggtgaaccttgtggactctatttacaaggagcagctgaacacacgcgtggtgcttgtagccgtcgaaacatggaccgagaaggatcagattgatatcactactaacccagttcagatgctgcatgagttcagcaagtatcgccaaagaattaagcagcacgccgatgccgtgcacttaatcagcagggtgacatttcattacaaacgaagctcacttagttactttggaggcgtctgcagtcgtacacggggggttggtgtgaatgagtatggccttccgatggccgtcgcgcaggtactgtcccagtctctggctcagaacttggggatacaatgggaaccttcttcacgaaaaccaaaatgcgactgcactgaatcctggggagggtgtattatggaggagaccggcgtgtctcattccaggaagttttcaaaatgcagtatcctcgagtacagagactttcttcaaaggggcggtggcgcatgtctcttcaacagacctacaaagttgttcgagccgacagagtgcggcaatgggtacgttgaagccggagaggagtgcgactgcggctttcacgtggagtgttatgggctctgttgcaagaagtgttctttgagcaatggagcccactgcagcgacggcccctgctgcaataatacatcttgtctcttccagccccggggttacgagtgccgcgatgctgtaaatgagtgtgacataacagagtactgcactggtgattcaggtcagtgtcccccaaaccttcataaacaggatgggtatgcttgtaaccagaaccagggtagatgctacaatggcgagtgtaagaccagggataaccagtgtcagtacatttggggcacgaaggccgcagggtccgacaagttttgctacgagaagctgaacacagagggaaccgagaagggaaactgtggtaaggatggcgacaggtggatacagtgtagcaagcacgacgtgttttgtggatttctgctgtgcacgaatcttaccagggccccccggattgggcagctgcagggagaaataattcctacctccttttatcaccaggggagggtgattgattgcagcggagcccacgtcgttctggacgacgacacagatgtcggctatgtggaggatgggacaccttgcggaccttcaatgatgtgtctggatcggaagtgccttcagatccaggccctcaacatgtcttcctgcccacttgattctaaaggaaaggtctgcagtggccatggcgtctgttctaatgaggctacatgtatctgtgactttacatgggccggaacagactgcagtatcagagacccagtgcgcaacctgcaccctcctaaggacgaggggccaaagggccctagcgctaccaacctcatcattgggtccatagcaggggcaatccttgtggccgccatagtgctgggcggaacgggctggggcttcaaaaacgtgaagaagcgacgattcgaccctacgcaacaggggccgatctag

SEQ ID NO: 141010 - DNA, 2499 bp, Artificial Sequence
  derived and/or modified sequence
atgaagcccccaggcagcagcagccggcagccccccctggccggctgcagcctggccggggccagctgtggcccccagaggggccctgctggctctgtgcctgccagcgccccagcccggaccccaccctgccgcctgctgctggtgctgctgctgctgccccccctggccgccagcagccggccccgggcctggggcgccgccgcccccagcgccccccactggaatgaaacagctgagaagaacctgggcgtgctggctgatgaggacaacaccctgcagcagaacagcagcagcaacatctcctacagcaatgccatgcagaaggagatcaccctgcccagccgcctcatctactacatcaaccaggacagcgagagcccctaccacgtgctggacaccaaggcccggcaccagcagaagcacaacaaggctgtgcacctggcccaggccagcttccagatcgaggccttcggcagcaagttcatcctggacctgatcctgaacaacggcctgctgagcagtgactatgtggagatccactatgaaaatggcaagccccagtacagcaaaggaggagagcactgctactaccacggcagcatccggggcgtgaaggacagcaaggtggccctgagcacctgcaatggcctgcacggcatgtttgaagatgacacctttgtgtacatgattgagcccctggagctggtgcatgatgagaagagcacaggccggccccacatcatccagaagaccctggccggccagtacagcaagcagatgaagaacctgaccatggagcggggggaccagtggcccttcctgtctgagctgcagtggctgaagaggaggaagagagctgtgaaccccagccggggcatctttgaggagatgaagtacctggagctgatgattgtgaatgaccacaagacctacaagaagcacaggagcagccacgcccacaccaacaactttgccaagtctgtggtgaacctggtggacagcatctacaaggagcagctgaacaccagggtggtgctggtggccgtggagacctggacagagaaggaccagattgacatcaccaccaaccctgtgcagatgctgcacgagttcagcaagtaccggcagaggatcaagcagcacgcagatgctgtgcacctgatcagccgggtgaccttccactacaagaggagcagcctgagctactttggaggagtgtgcagcaggacccggggcgtgggcgtgaatgaatatggcctgcccatggctgtggcccaggtgctgagccagagcctggcccagaacctgggcatccagtgggagcccagcagcaggaagcccaagtgtgactgcacagagagctggggcggctgcatcatggaggagaccggggtgagccacagcaggaagttcagcaagtgcagcatcctggagtacagagacttcctgcagagaggaggaggagcctgcctcttcaaccggcccaccaagctgtttgagcccacagaatgtggaaatggctacgtggaggccggggaggagtgtgactgtggcttccacgtggagtgctacggcctgtgctgcaagaagtgcagcctgagcaatggagcccactgcagtgatggcccctgctgcaacaacaccagctgcctcttccagccccggggctatgaatgtagagatgctgtgaatgaatgtgacatcacagagtactgcaccggggacagcggccagtgcccccccaacctgcacaagcaggacggctacgcctgcaaccagaaccagggccgctgctacaatggagagtgcaagacccgggacaaccagtgccagtacatctggggcaccaaggccgccggcagtgacaagttctgctatgagaagctgaacacagagggcacagagaagggcaactgtgggaaggatggagaccgctggatccagtgcagcaagcatgatgtgttctgtggcttcctgctgtgcaccaacctgacccgggcccccagaattggccagctgcagggcgagatcatccccaccagcttctaccaccagggccgggtcatcgactgcagcggggcccacgtggtgctggatgatgacacagatgtgggctacgtggaggatggcaccccctgtggccccagcatgatgtgcctggacaggaagtgcctgcagatccaggccctgaacatgagcagctgccccctggacagcaagggcaaggtgtgcagcggccacggcgtgtgcagcaatgaggccacctgcatctgtgacttcacctgggccggcacagactgcagcatccgggaccctgtgaggaacctgcacccccccaaggatgagggccccaagggccccagcgccaccaacctgatcatcggcagcattgctggggccatcctggtggccgccatcgtgctgggcggcaccggctggggcttcaagaatgtgaagaagagaagatttgaccccacccagcagggccccatctag

SEQ ID NO: 141011 - DNA, 2499 bp, Artificial Sequence
  derived and/or modified sequence
atgaagccccccggcagcagcagccggcagccccccctggccggctgcagcctagccggagccagttgcggcccacagcgaggacctgctggttcagtgcccgcttctgcccctgcccgtacgcccccatgccgcttgctgttagtcttgctgctgttgcccccgctagccgcttccagtaggccaagggcctggggggcggccgccccatccgctccccactggaacgaaacagccgaaaaaaatctcggggtgttggccgacgaggacaatactctgcagcaaaattcgtcaagtaacatctcctacagtaacgcgatgcaaaaagagataactttgcccagcagactgatctattacatcaatcaagactctgaaagtccatatcacgttctggatactaaagcccgccaccagcaaaaacataacaaggctgtgcacttggctcaagctagcttccagattgaggccttcggatcgaaattcatcctggatctcattttaaataacgggctgctgagctctgattacgtggaaattcattatgagaatggcaagcctcagtactctaaaggcggtgaacactgttactaccatggcagcatacgaggggtaaaggactccaaggtggcgttgagtacctgcaacggcctgcatggcatgttcgaagatgacacctttgtgtacatgatcgagccactcgagctagttcatgatgaaaagagcaccggacgtcctcacattatccagaaaacattggccggacagtactcaaagcaaatgaagaatctgacgatggaaaggggtgatcagtggcctttcctgagtgaattacagtggcttaaaagaagaaaaagagcagtgaatccatcccgtggaatctttgaggaaatgaaatacttagagctgatgatagtaaacgaccataaaacttataagaaacatcgcagttcccacgcacatacaaataatttcgccaagagtgtggtcaatcttgtggacagcatttacaaggagcagcttaataccagggtggttctcgttgctgtggagacctggacggagaaagaccagattgacataaccacaaaccctgtgcaaatgctgcatgaattcagcaaataccggcagcgaatcaaacagcatgccgacgccgtccacttgatcagccgggtgacattccactacaaacgttcatcccttagttattttgggggggtctgttcacggaccagaggcgtgggcgttaatgaatatggcctgccaatggccgtggctcaggtgctgtctcagtcactggctcagaatttaggaatccaatgggagccttcttccagaaaaccaaagtgcgactgtacggaaagctggggcggctgcattatggaggaaactggagtcagccattcacggaaattctctaagtgttctatcctggagtaccgggatttcctccaaaggggggggggcgcttgcctctttaatcgccccaccaagctcttcgagccaacagagtgtggcaatggatatgttgaagccggagaagagtgtgactgcggttttcatgtggaatgttacggactgtgttgtaaaaagtgttcactctctaatggtgctcactgtagtgatggtccctgctgcaataacaccagctgtctatttcagccgaggggatatgagtgccgcgatgcagtgaacgagtgcgacatcaccgaatattgcacaggcgattcaggccagtgtccccccaatctgcataagcaagatggctacgcctgcaaccagaaccagggccgctgttataatggggaatgcaaaacccgggataaccagtgccaatatatttgggggaccaaagcggcgggctccgacaagttttgctacgagaagctcaataccgagggcacagaaaaaggcaactgtgggaaggacggcgaccggtggatccagtgtagcaagcacgacgtcttctgcggattcttgctgtgtaccaacctgaccagggctccccgaatcggccaattacagggcgaaattatccctacgagcttctaccatcaagggagggtgatcgactgtagtggcgcccatgttgttctcgatgatgacacagatgtcggatacgtcgaagacggaactccatgcggaccatctatgatgtgcctcgacagaaagtgcttgcagattcaggccctcaacatgtccagttgcccactcgactcgaagggaaaagtttgcagcggacacggagtctgctcaaacgaggctacctgcatatgtgacttcacttgggccggcactgattgctccatccgggatcccgtgcggaatctgcacccgcccaaggacgagggccctaaagggccaagtgccacaaacctaataatcggatcaattgctggggcaattctggtcgcagccatcgtgctgggtggcactgggtggggcttcaagaacgtgaagaagcgccggttcgaccccacccaacagggacccatctag

SEQ ID NO: 141012 - DNA, 6327 bp, Artificial Sequence
  derived and/or modified sequence
ggcccggcggcagcccccgcagtcgctgaagcggccgcgcccgccgggggagggagtagccgctggggaggctccaagttggcggagcggcgaggacccctggactcctctgcgtcccgccccgggagtggctgcgaggctaggcgagccgggaaagggggcgccgcccagccccgagccccgcgccccgtgccccgagcccggagccccctgcccgccgcggcaccatgcgcgccgagccggcgtgaccggctccgcccgcggccgccccgcagctagcccggcgctctcgccggccacacggagcggcgcccgggagctatgagccatgaagccgcccggcagcagctcgcggcagccgcccctggcgggctgcagccttgccggcgcttcctgcggcccccaacgcggccccgccggctcggtgcctgccagcgccccggcccgcacgccgccctgccgcctgcttctcgtccttctcctgctgcctccgctcgccgcctcgtcccggccccgcgcctggggggctgctgcgcccagcgctccgcattggaatgaaactgcagaaaaaaatttgggagtcctggcagatgaagacaatacattgcaacagaatagcagcagtaatatcagttacagcaatgcaatgcagaaagaaatcacactgccttcaagactcatatattacatcaaccaagactcggaaagcccttatcacgttcttgacacaaaggcaagacaccagcaaaaacataataaggctgtccatctggcccaggcaagcttccagattgaagccttcggctccaaattcattcttgacctcatactgaacaatggtttgttgtcttctgattatgtggagattcactacgaaaatgggaaaccacagtactctaagggtggagagcactgttactaccatggaagcatcagaggcgtcaaagactccaaggtggctctgtcaacctgcaatggacttcatggcatgtttgaagatgataccttcgtgtatatgatagagccactagagctggttcatgatgagaaaagcacaggtcgaccacatataatccagaaaaccttggcaggacagtattctaagcaaatgaagaatctcactatggaaagaggtgaccagtggccctttctctctgaattacagtggttgaaaagaaggaagagagcagtgaatccatcacgtggtatatttgaagaaatgaaatatttggaacttatgattgttaatgatcacaaaacgtataagaagcatcgctcttctcatgcacataccaacaactttgcaaagtccgtggtcaaccttgtggattctatttacaaggagcagctcaacaccagggttgtcctggtggctgtagagacctggactgagaaggatcagattgacatcaccaccaaccctgtgcagatgctccatgagttctcaaaataccggcagcgcattaagcagcatgctgatgctgtgcacctcatctcgcgggtgacatttcactataagagaagcagtctgagttactttggaggtgtctgttctcgcacaagaggagttggtgtgaatgagtatggtcttccaatggcagtggcacaagtattatcgcagagcctggctcaaaaccttggaatccaatgggaaccttctagcagaaagccaaaatgtgactgcacagaatcctggggtggctgcatcatggaggaaacaggggtgtcccattctcgaaaattttcaaagtgcagcattttggagtatagagactttttacagagaggaggtggagcctgccttttcaacaggccaacaaagctatttgagcccacggaatgtggaaatggatacgtggaagctggggaggagtgtgattgtggttttcatgtggaatgctatggattatgctgtaagaaatgttccctctccaacggggctcactgcagcgacgggccctgctgtaacaatacctcatgtctttttcagccacgagggtatgaatgccgggatgctgtgaacgagtgtgatattactgaatattgtactggagactctggtcagtgcccaccaaatcttcataagcaagacggatatgcatgcaatcaaaatcagggccgctgctacaatggcgagtgcaagaccagagacaaccagtgtcagtacatctggggaacaaaggctgcagggtctgacaagttctgctatgaaaagctgaatacagaaggcactgagaagggaaactgcgggaaggatggagaccggtggattcagtgcagcaaacatgatgtgttctgtggattcttactctgtaccaatcttactcgagctccacgtattggtcaacttcagggtgagatcattccaacttccttctaccatcaaggccgggtgattgactgcagtggtgcccatgtagttttagatgatgatacggatgtgggctatgtagaagatggaacgccatgtggcccgtctatgatgtgtttagatcggaagtgcctacaaattcaagccctaaatatgagcagctgtccactcgattccaagggtaaagtctgttcgggccatggggtgtgtagtaatgaagccacctgcatttgtgatttcacctgggcagggacagattgcagtatccgggatccagttaggaaccttcacccccccaaggatgaaggacccaagggtcctagtgccaccaatctcataataggctccatcgctggtgccatcctggtagcagctattgtccttgggggcacaggctggggatttaaaaatgtcaagaagagaaggttcgatcctactcagcaaggccccatctgaatcagctgcgctggatggacaccgccttgcactgttggattctgggtatgacatactcgcagcagtgttactggaactattaagtttgtaaacaaaacctttgggtggtaatgactacggagctaaagttggggtgacaaggatggggtaaaagaaaactgtctcttttggaaataatgtcaaagaacacctttcaccacctgtcagtaaacgggggagggggcaaaagaccatgctataaaaagaactgttccagaatcttttttttccctaatggacgaaggaacaacacacacacaaaaattaaatgcaataaaggaatcattaaaaaaaatagtaaatgattttttttccctcagcctgctggcacttaatatcttctaaatgatttggcatgatttttttttctttactaccgatgacaaactccagtggcatgaagatctaattttcaaaagggtaaaaactgcatggcatatatacaacaagctagcaagccaattctcagcaaaacctgcaacagaattcctaaagtgaagatgacagatgaacacaaagaagctgcctgggcctcttcacttaaacatgtccccacaccccatcctctcggagccccacttcttaccccccacctcccaccctctataatccccactccccattggagaccaggccagggcagaactccacggaccttgctcttgttgattcactttccccattgtgttttctcctggactgagcatcctttggaaatgggagctggaatttgaacaatgatgctattgtatagttcttttataaatgtaaatatggaaataagagattttgacacatcattttcacttgtctgtattgagatattttccttgtaaaggttctctgtaaacttgagttgattttttgctccccatcttttttgtttcttgtctctctttctctgtctctgtccttctctcttgtaacgtgttatacaatgactcttgggcttgcttaaaaagacagatatagccacagatgcagggagtttgggcacaaaacacgtgcagtttaaagttggtgtgcgttaaaccaaaaataaaaggggggacataaacaacaaaataacccatatcaaagacacaaaattatgtaaatggaaatatatgtactaagtttcgaaaattttttgatgtcattataaacctatgtaaataatgtaagaaagtagacaccctttcagattaatcacaaaagtgccaagctcatgattttggttttcggttttgacaattttctttccctgtctttaatgtgaaaggaggataaacttaaagccttaaataaaaaaatttttttaaatgttaaaagcttggaaaaaattaagctttccattttatttgtatttgttagtgtcaatatttcatccatgctcattttcctgcctcaaaatatatatggtagaaccctattggaaaagtggtaatgggaatagaaggagcagttacctttgtatccgcattgttaaaataggcttttatgctgtgctgtgctttcaagaaaccttgtttgacctctggcattttactgatcagtggaccgttgcactggattataatgggattctactatatacaaatccacattgttcttctccctccagccagatttgcagatgtaatctgggctttccaagtccctctgagtttccttcacttttactgatttttttcttctaaatatggtcaagatagcttctgtcacatgttaagtaaataagctgaagaaatttggtcccggctttgttttaatgtacaaaccggtatgtgatcacttcagtgagcatccctctatagatgggctttagtaaagactgtcccaaagagcccctacttctctaatgcccccccccttttttttttaggaaaagaacatgcagttttactcatcacttcttcatgacaccaaatccattgctaggtttagctcctggtcccttttcagcaagattcatgttatccgtcttacaactttgattttggaaagtattatgtcctaaaaatgcactgcttaacacagtggggtttttttcccccgaggtgtctttaactggggaagtaccacaaacatagagcagagactttaatttctatattctacaatagaccatcaccaaacatcttatcatgttgttgctttctgagtaataggtgctacgcaggtaggcgggctttctctaggactaggtgtacgtttattttgtaataacagggctatctacaaggcctctcagccttactcctggcttcataggacacaggtagcatccctctagtcattggcaatggctctttcagctcggaggaagcttggaggaaactcagattacttggtatcttttcctgttgctgcattgcttagtgtttccttgttgctgggtcctactctctagtagatactaaactgctgtgaagtacaccatacacatttcactaagattccagagccaccttggtgacataacagaaacaaaatcatgttggttacaaaacaaattaaatctctattgttaacttttaagcatttcacaaacaacattgtaaatgtgcgatgttacgttttaaatcagaccacagtggtccccaaatattatgtacatatggcaaatgtcagtgtaactttttgttacactggcaatttcataggtaatcgaacctatgctccaatgttaaattatttgtgtatatgtaaaatacacaagctttaagctatgtgtgtatgaatatgaaagttaatgcaaccatatcaattgtaaaaatggattataattatttttgatggtattaggttatgtagtttcaaactctttgctgtattttgttttgcacctgccattcatttgctaatttttgtggcgtggagattcttttttattaatttgagctcacagcacaagtgtatcactgtttaatgttacccaacaagagttagtgttaagtgatgatcaagttcccatttcacctgctctacttttgctgcattaattaatgacacccggatgaggagacgtgcgctaacttcattgctcatctgggatagtgcatgagcccattgaattagagctgctcctactagataactgagcagtacacataagtgcatgttatgaaacatgaatcacatagagcagtggagttttaccaagtggtgtgtgtggtttttgttttttactatgcaaagatgggaaatgcacaaacttttcaaagactagtgtctgaagaactttacaaacaatacttgaaccctttctttaaagttatcccatcatgttttatagtcattgttgcttccattgttagtttccattttcaagtgctttgtaattttttaagtgcactacctgaaattttgtttgaaattaataaattcattcgtatcttgttggctgcctatgaatggagattcagtagtcattgtatgcatctttaagtcaaatgtgtattaaaactttcgttaacgta

SEQ ID NO: 141013 - DNA, 2499 bp, Artificial Sequence
  derived and/or modified sequence
atgaagccccctggcagctcctcaaggcagcctccattggctggttgctcattagcaggcgcttcatgcggcccacaaagagggcctgcaggctccgtgcctgcttccgcgccagcaagaacgcccccatgccgacttctgctggttctgttgctattgccaccactggccgcaagctcacgaccacgtgcgtggggcgctgctgcaccaagcgcaccacactggaatgagacagccgaaaaaaatttgggagtattagcggacgaggacaataccttacaacaaaatagcagttctaacatctcctactccaacgccatgcagaaagaaattacgttacccagccggctcatctactacatcaatcaggactcagaatctccatatcacgtgctggacacaaaagcgagacaccaacagaagcacaacaaagcagtccatctggcccaagcttctttccagatagaggcattcggatccaaattcattctcgatttaatcctgaataatggcctcctctcatctgactatgtcgagatccactacgagaacggaaaacctcaatatagcaagggcggagaacactgttattatcacgggtcaatcaggggtgtgaaggactcaaaagtggccctttcaacctgcaatggcttacatggcatgtttgaggatgatacattcgtctacatgattgaaccactggagctagtccacgatgagaagagtaccggacggccacatatcatccagaaaacactggcgggtcagtattctaagcaaatgaagaacctgaccatggaaagaggagaccaatggccatttctgagcgagctgcaatggcttaaacgtaggaagcgggctgtgaatcccagcaggggtatttttgaagagatgaagtacctggaattgatgatcgtcaatgaccacaaaacctacaaaaagcaccgctcttcacatgctcatacaaataacttcgcaaaaagcgtggtcaacctggtggacagtatctataaagaacagctgaacacacgggttgtgctggttgccgttgagacctggacagaaaaagaccagatagatattactaccaacccagtgcagatgctccatgaattttcaaagtatagacaacgcataaaacagcacgccgacgccgtccacctgattagccgagtaaccttccactataaacggtcctcactgtcatactttggtggagtatgttcccgtactcgcggagtgggggtgaacgagtatggactccccatggcagtagcacaggttttatcccaatccctcgcacaaaatctgggcattcagtgggaaccgtcaagccgcaaacccaagtgcgattgcacagaatcatggggaggatgtattatggaggaaaccggggtaagccattcaaggaaatttagcaaatgctctattcttgaatatagggatttcctgcagaggggaggaggggcatgcctgttcaaccgacctactaaattgttcgagccaacggagtgcgggaacgggtacgtggaagctggtgaggagtgcgactgtggttttcacgtcgagtgctacggtctctgctgcaagaaatgcagtctaagcaatggtgcacactgtagcgatggcccatgttgtaacaacaccagctgtctgttccaacccagagggtacgagtgcagagatgcagtaaatgaatgtgacatcaccgagtactgtactggtgatagcggacagtgtccacctaacctccacaaacaggatgggtatgcctgcaatcaaaatcagggacgctgctataacggcgagtgtaagactcgggataaccaatgccagtatatctggggtacaaaggcggcagggagcgacaaattctgctacgagaagttgaatacggagggaacggaaaaggggaattgtgggaaggacggcgatcgatggatccaatgctccaagcacgatgtcttctgtggattcctgctttgtaccaacctgaccagggctcctaggattggccagctccaaggagaaataattccaacctctttctaccaccagggcagagtgatcgactgcagtggcgctcacgtcgtcctcgacgacgataccgatgttggctatgtggaggacggcactccttgtggaccaagtatgatgtgcctggacaggaaatgcctgcagattcaggctctgaacatgtctagctgtccacttgactccaaagggaaagtctgctccgggcacggcgtgtgcagtaacgaagctacttgtatatgcgacttcacttgggccggaactgattgctccatccgagatcctgtgcgaaacctccacccaccaaaggacgagggaccgaagggaccatcggcaacaaacttgatcattggcagtattgctggcgctattcttgtggccgctatagtccttggaggtaccgggtgggggttcaagaacgttaagaagagacgcttcgaccccacccagcagggcccaatttag

SEQ ID NO: 141014 - DNA, 2499 bp, Artificial Sequence
  derived and/or modified sequence
atgaagccccccggcagcagcagcagacagccccccctggccggctgcagcctggccggcgccagctgcggcccccagagaggccccgccggcagcgtgcccgccagcgcccccgccagaacccccccctgcagactgctgctggtgctgctgctgctgccccccctggccgccagcagcagacccagagcctggggcgccgccgcccccagcgccccccactggaacgagaccgccgagaagaacctgggcgtgctggccgacgaggacaacaccctgcagcagaacagcagcagcaacatcagctacagcaacgccatgcagaaggagatcaccctgcccagcagactgatctactacatcaaccaggacagcgagagcccctaccacgtgctggacaccaaggccagacaccagcagaagcacaacaaggccgtgcacctggcccaggccagcttccagatcgaggccttcggcagcaagttcatcctggacctgatcctgaacaacggcctgctgagcagcgactacgtggagatccactacgagaacggcaagccccagtacagcaagggcggcgagcactgctactaccacggcagcatcagaggcgtgaaggacagcaaggtggccctgagcacctgcaacggcctgcacggcatgttcgaggacgacaccttcgtgtacatgatcgagcccctggagctggtgcacgacgagaagagcaccggcagaccccacatcatccagaagaccctggccggccagtacagcaagcagatgaagaacctgaccatggagagaggcgaccagtggcccttcctgagcgagctgcagtggctgaagagaagaaagagagccgtgaaccccagcagaggcatcttcgaggagatgaagtacctggagctgatgatcgtgaacgaccacaagacctacaagaagcacagaagcagccacgcccacaccaacaacttcgccaagagcgtggtgaacctggtggacagcatctacaaggagcagctgaacaccagagtggtgctggtggccgtggagacctggaccgagaaggaccagatcgacatcaccaccaaccccgtgcagatgctgcacgagttcagcaagtacagacagagaatcaagcagcacgccgacgccgtgcacctgatcagcagagtgaccttccactacaagagaagcagcctgagctacttcggcggcgtgtgcagcagaaccagaggcgtgggcgtgaacgagtacggcctgcccatggccgtggcccaggtgctgagccagagcctggcccagaacctgggcatccagtgggagcccagcagcagaaagcccaagtgcgactgcaccgagagctggggcggctgcatcatggaggagaccggcgtgagccacagcagaaagttcagcaagtgcagcatcctggagtacagagacttcctgcagagaggcggcggcgcctgcctgttcaacagacccaccaagctgttcgagcccaccgagtgcggcaacggctacgtggaggccggcgaggagtgcgactgcggcttccacgtggagtgctacggcctgtgctgcaagaagtgcagcctgagcaacggcgcccactgcagcgacggcccctgctgcaacaacaccagctgcctgttccagcccagaggctacgagtgcagagacgccgtgaacgagtgcgacatcaccgagtactgcaccggcgacagcggccagtgcccccccaacctgcacaagcaggacggctacgcctgcaaccagaaccagggcagatgctacaacggcgagtgcaagaccagagacaaccagtgccagtacatctggggcaccaaggccgccggcagcgacaagttctgctacgagaagctgaacaccgagggcaccgagaagggcaactgcggcaaggacggcgacagatggatccagtgcagcaagcacgacgtgttctgcggcttcctgctgtgcaccaacctgaccagagcccccagaatcggccagctgcagggcgagatcatccccaccagcttctaccaccagggcagagtgatcgactgcagcggcgcccacgtggtgctggacgacgacaccgacgtgggctacgtggaggacggcaccccctgcggccccagcatgatgtgcctggacagaaagtgcctgcagatccaggccctgaacatgagcagctgccccctggacagcaagggcaaggtgtgcagcggccacggcgtgtgcagcaacgaggccacctgcatctgcgacttcacctgggccggcaccgactgcagcatcagagaccccgtgagaaacctgcacccccccaaggacgagggccccaagggccccagcgccaccaacctgatcatcggcagcatcgccggcgccatcctggtggccgccatcgtgctgggcggcaccggctggggcttcaagaacgtgaagaagagaagattcgaccccacccagcagggccccatctag

SEQ ID NO: 141015 - protein, 722 aa, Artificial Sequence
  derived and/or modified sequence
MAVDGTLVYIRVTLLLLWLGVFLSISGYCQAGPSQHFTSPEVVIPLKVISRGRSAKAPGWLSYSLRFGGQKHVVHMRVKKLLVSRHLPVFTYTDDRALLEDQLFIPDDCYYHGYVEAAPESLVVFSACFGGFRGVLKISGLTYEIEPIRHSATFEHLVYKINSNETQFPAMRCGLTEKEVARQQLEFEEAENSALEPKSAGDWWTHAWFLELVVVVNHDFFIYSQSNISKVQEDVFLVVNIVDSMYKQLGTYIILIGIEIWNQGNVFPMTSIEQVLNDFSQWKQISLSQLQHDAAHMFIKNSLISILGLAYVAGICRPPIDCGVDNFQGDTWSLFANTVAHELGHTLGMQHDEEFCFCGERGCIMNTFRVPAEKFTNCSYADFMKTTLNQGSCLHNPPRLGEIFMLKRCGNGVVEREEQCDCGSVQQCEQDACCLLNCTLRPGAACAFGLCCKDCKFMPSGELCRQEVNECDLPEWCNGTSHQCPEDRYVQDGIPCSDSAYCYQKRCNNHDQHCREIFGKDAKSASQNCYKEINSQGNRFGHCGINGTTYLKCHISDVFCGRVQCENVRDIPLLQDHFTLQHTHINGVTCWGIDYHLRMNISDIGEVKDGTVCGPGKICIHKKCVSLSVLSHVCLPETCNMKGICNNKHHCHCGYGWSPPYCQHRGYGGSIDSGPASAKRGVFLPLIVIPSLSVLTFLFTVGLLMYLRQCSGPKETKAHSSG

SEQ ID NO: 141016 - DNA, 2169 bp, Artificial Sequence
  derived and/or modified sequence
atggcggttgatggtacactggtttatatccgagtgactctgttgctactttggctaggggtgtttctctccatcagcggttattgccaagcgggaccctcccagcactttacctcaccagaagtggttattcctctcaaggtcatcagccgcgggcgctcagctaaggctccaggctggttaagctacagtctcagattcggcggacagaagcatgttgtccatatgagagtgaaaaaactcctggttagtaggcatcttcctgtgtttacctatactgatgaccgcgctctgttggaggaccaactgtttattcccgacgattgctactaccatgggtacgtagaggcagctcctgagagcctagtggtgttttccgcctgttttggtgggtttcggggggtgcttaagatcagcgggttgacatacgagatcgagccgatcagacattccgctacctttgaacatctggtgtataagattaattctaacgagacacagttcccagctatgcgctgcggcttaaccgaaaaggaggtcgccagacagcaattggagtttgaggaggctgagaatagcgccctggagcctaaatcagccggggattggtggacccacgcttggtttctcgaactcgtggtggtggttaatcatgacttctttatttactcccaatcaaatatttctaaagtacaagaagatgttttcctggtcgtgaacatcgtggactccatgtacaaacagctgggtacatacattatcttaattggtatcgaaatctggaatcagggcaacgttttccctatgacaagcatagagcaagtgctgaatgacttctcccagtggaagcagatatctctgagccagctccagcatgatgctgcccatatgttcatcaagaatagtctgatttccattctgggattggcctacgtcgctggcatttgccgaccgcccatcgactgcggcgtggataatttccagggcgatacctggagcctatttgctaatacggtcgcgcatgagttaggtcacactctgggcatgcagcacgatgaggagttctgtttctgtggggagagaggatgtattatgaatacctttagggtccccgcagaaaaatttacaaactgctcctacgccgactttatgaagacaacactgaatcagggcagctgtctgcacaatcctcctcgactgggcgagatttttatgcttaagcgctgcgggaatggcgtggtcgaacgagaagaacaatgcgactgcggcagcgtacagcaatgtgaacaggacgcgtgttgtctgctgaattgtactctacggccaggcgccgcttgcgcctttggactgtgttgcaaagactgtaaattcatgccctccggcgaactgtgccgtcaggaggtcaacgagtgtgacctgcctgagtggtgtaacggcacctcccatcagtgccccgaggaccgatacgtacaagatgggattccctgttccgattccgcttactgttaccagaagcgttgtaacaaccatgatcagcactgtcgagaaatttttgggaaggacgcaaaatctgccagccagaactgctacaaggaaatcaattcacaaggcaataggttcggccactgtgggatcaatggaacgacctacttgaaatgccacattagtgacgtcttttgcgggcgtgtccagtgtgagaacgtgcgcgatatcccgctgctgcaggatcactttacgctgcagcacacacatatcaatggggtcacatgctggggaatcgattatcatttgcggatgaatatctctgatataggtgaggtaaaggacggtaccgtgtgcgggccgggaaaaatttgtatccacaagaagtgtgttagtctgtcagtgctcagtcatgtctgcctgcccgaaacatgcaatatgaagggcatatgcaataataaacaccactgccactgcggttacggttggagccccccttactgtcaacataggggatacggcggaagcattgacagcggccccgcttctgcgaaaaggggtgtgttcttgcccctcatagtcatccccagcctgagtgtcttgaccttcttatttacagtagggttgttgatgtacttgagacagtgcagcgggccgaaagagactaaggctcactcatcaggatag

SEQ ID NO: 141017 - DNA, 2169 bp, Artificial Sequence
  derived and/or modified sequence
atggctgtggatggcaccctggtgtacatccgggtgaccctgctgctgctgtggctgggcgtcttcctgagcatcagcggctactgccaggccggccccagccagcacttcaccagccctgaggtggtgatccccctgaaggtgatcagccggggccgcagcgccaaggcccctggctggctgagctacagcctgcgctttggaggccagaagcacgtggtgcacatgagggtgaagaagctgctggtgagccgccacctgcccgtcttcacctacacagatgaccgggccctgctggaggaccagctgttcatcccagatgactgctactaccacggctacgtggaggccgcccctgagagcctggtggtgttcagcgcctgctttggaggcttccggggcgtgctgaagatcagcggcctgacctatgaaattgagcccatccgccacagcgccacctttgagcacctggtgtacaagatcaacagcaatgagacccagtttcctgccatgagatgtggcctgacagagaaggaggtggcccggcagcagctggagtttgaggaggctgaaaattctgccctggagcccaagtctgctggggactggtggacccacgcctggttcctggagctggtggtggtggtgaaccacgacttcttcatctacagccagagcaacatcagcaaggtgcaggaggatgtgttcctggtggtgaacatcgtggacagcatgtacaagcagctgggcacctacatcatcctgattggcatcgagatctggaaccagggcaatgtgttccccatgaccagcattgagcaggtgctgaatgacttcagccagtggaagcagatcagcctgagccagctgcagcatgatgctgcccacatgttcatcaagaacagcctcatcagcatcctgggcctggcctacgtggccggcatctgccggccccccatcgactgtggggtggacaacttccagggcgacacctggagcctgtttgccaacacagtggcccacgagctgggccacaccctgggcatgcagcatgatgaggagttctgcttctgtggggagcggggctgcatcatgaacaccttccgggtgcctgctgagaagttcaccaactgcagctatgctgacttcatgaagaccaccctgaaccagggcagctgcctgcacaaccccccccggctgggggagatcttcatgctgaagagatgtggaaatggagtggtggagcgggaggagcagtgtgactgtggctctgtgcagcagtgtgagcaggatgcctgctgcctgctgaactgcaccctgcggcctggggccgcctgtgccttcggcctgtgctgcaaggactgcaagttcatgcccagcggggagctgtgccggcaggaggtgaatgaatgtgacctgcctgagtggtgcaatggcaccagccaccagtgcccagaggacagatatgtgcaggacggcatcccctgcagcgacagcgcctactgctaccagaagcgctgcaacaaccacgaccagcactgccgggagatctttgggaaggatgccaagagcgccagccagaactgctacaaggagatcaacagccagggcaaccgcttcggccactgcggcatcaatggcaccacctacctgaagtgccacatcagtgatgtgttctgtggccgggtgcagtgtgaaaatgtgcgggacatccccctgctgcaggaccacttcaccctgcagcacacccacatcaacggggtgacctgctggggcatcgactaccacctgaggatgaacatcagtgacatcggggaggtgaaggatggcaccgtgtgtggccctgggaagatctgcatccacaagaagtgtgtgtccctgtctgtgctgagccacgtgtgcctgcctgagacctgcaacatgaagggcatctgcaacaacaagcaccactgccactgcggctacggctggagccccccctactgccagcaccggggctatggaggcagcattgattctggccctgccagcgccaagaggggcgtcttcctgcccctgattgtcatccccagcctgtctgtgctgaccttcctgttcaccgtgggcctgctgatgtacctgcggcagtgcagcggccccaaggagaccaaggcccacagcagtggatag

SEQ ID NO: 141018 - DNA, 2169 bp, Artificial Sequence
  derived and/or modified sequence
atggccgtggacggcaccctggtgtacatccgggtgaccctgctgctgctctggcttggcgtgttccttagcatttccggttactgccaggcgggtccaagccagcattttacttctcctgaagtcgtgattccgctgaaagttatctctcgtgggagaagcgccaaggctcccggctggctctcttactcactgcgatttggagggcagaaacacgtggtgcatatgagggtgaaaaaactgttggtctcaagacatctgcctgtttttacttacaccgacgatcgagcgcttctggaagatcagctgttcataccagacgattgctattaccacgggtacgtggaggcagcccccgagtcgctggtggtgttttcggcatgctttggaggctttcggggggtgctgaagatctccggattgacttacgagatcgaaccaatccggcatagcgcaacttttgagcaccttgtgtacaaaatcaattctaatgagacacagtttcccgctatgcgctgcggcctaaccgagaaggaggttgcgcggcagcaactggaatttgaggaagcggaaaattccgctttggagcccaaaagtgcaggggactggtggactcatgcgtggttcctagagctggtggtcgtggtgaaccacgactttttcatctactcgcagagcaacattagcaaggttcaggaggatgtttttctggtggtgaatattgttgattcaatgtacaaacagctgggaacgtatatcattttaataggcattgaaatctggaaccagggcaacgtctttccgatgacatccattgagcaagttctgaatgatttctctcagtggaagcagataagcctatcacaactgcagcacgacgcagctcatatgtttattaaaaattcccttatctcaatccttggcctagcatacgttgctggaatttgtaggcccccaattgactgcggcgtggataatttccagggcgatacgtggtcactttttgcaaatacagttgctcatgaactcggacacacgctggggatgcagcacgacgaagagttctgcttttgtggagaacgtggctgtattatgaatacattccgcgtccccgcagagaagttcacgaactgttcatacgctgatttcatgaagactacgttgaatcaaggttcttgccttcacaatccgccacggttgggcgagatatttatgctgaaaagatgtggaaatggcgttgtggagcgtgaagagcaatgcgattgtggatctgtgcagcagtgtgaacaagatgcttgctgcttacttaactgcactctcagacctggcgccgcatgtgcatttggtctgtgctgcaaggattgtaaatttatgccgtcaggcgagctgtgtcgacaagaagtcaacgagtgcgacttaccggagtggtgtaatggcacgtctcaccagtgccccgaggacagatatgtgcaagatgggattccttgcagcgacagtgcttactgctaccagaaacgttgcaacaaccacgatcagcactgtcgggaaatttttggcaaggacgctaagagcgctagccagaactgttacaaggagattaattcccaaggaaaccgttttggacattgcggtataaacgggactacatacctgaagtgtcatatctctgacgtgttttgtgggcgagtccagtgcgagaatgtgcgcgatattcctctgctgcaagaccacttcacgcttcaacatacccatataaacggcgtcacttgttggggcatcgactaccacctgcgcatgaacatttcagacattggggaggtcaaagacggaacagtgtgtggccctggtaagatctgcatacacaagaaatgcgtgtccctgtccgttttgtcccacgtatgtctgcccgagacctgtaatatgaagggaatttgcaacaataaacatcattgtcactgtgggtatggctggtctcccccttactgccagcaccgcggatatggtggatccatcgatagtggccctgcgtccgctaagcgcggcgttttcttgcccctcattgtgataccaagcttaagcgtcctcactttcttattcaccgttggcctgctgatgtaccttcggcaatgcagcggacctaaggagacgaaagctcattcctctggctag

SEQ ID NO: 141019 - DNA, 2169 bp, Artificial Sequence
  derived and/or modified sequence
atggcggtggatggaacgttggtctacatacgagttaccttgctgctgctgtggctgggggtgtttttgtcaatttccggatactgtcaggccggtcccagtcagcatttcacgagcccggaggtcgtgatacctttaaaagtgatcagtagaggcaggagtgccaaagccccaggctggctgtcatatagcctgcgcttcggcggacagaaacacgtagtacacatgagagttaagaaactcctggtatcccgacacctgcctgtatttacatacacagatgaccgagctcttctcgaggaccagttattcatccccgacgattgctactaccacgggtacgtcgaagcggcacctgaatcgctcgtcgtgttctcagcctgtttcggcggattccgcggagtcctgaagatttccggcctgacatacgaaatcgaacccattcgacactccgcaacatttgagcacctggtctacaagattaatagcaatgagacacagttccccgcaatgcgctgtgggctgacagagaaggaagttgctcgccagcaacttgagttcgaggaggccgagaacagcgccctggagccaaagagtgctggtgactggtggactcacgcctggttcctggagctagttgtggtggtaaaccatgacttttttatctattcccagtcaaacatctccaaagtacaggaagacgtgtttctcgttgtgaacattgtggatagtatgtataagcagctaggtacctatattattcttatcggaatagagatttggaatcaggggaacgtgtttcctatgacatccatagaacaggttctgaatgatttcagccagtggaaacagatttccctgagccagttacagcacgacgccgctcatatgtttattaagaatagcctaattagtatcttgggtctcgcctatgtggccggtatttgtagaccaccgatcgactgcggcgtagacaactttcagggtgatacatggtccctatttgcgaacactgttgcccacgaactgggacacacccttggcatgcagcacgatgaggagttctgcttctgcggcgagcgaggctgtattatgaacacttttcgtgtacctgctgagaaatttacaaactgttcctatgctgactttatgaaaacaacactcaatcaaggctcctgtctgcataatccacccaggctgggtgaaattttcatgctgaaacgctgtggcaatggcgtggtcgagcgggaggagcagtgtgactgcggttcagtacagcaatgcgagcaggatgcatgttgtttactgaattgtacattgagacctggcgctgcctgtgcttttggactgtgctgtaaagattgcaaatttatgccctctggagaactctgtcgacaggaagtgaatgaatgtgacctgcccgagtggtgtaacggaacatcccaccagtgtcccgaagatagatacgtacaagatggaatcccttgctcggatagcgcttactgttatcaaaaacgatgtaataaccacgaccagcactgccgggagatttttggaaaagatgccaagagcgcttctcagaattgctacaaagagattaattcgcagggtaaccggttcgggcattgcggaattaatgggacaacatacctgaagtgccacatatctgacgtattttgcggtcgtgtacaatgcgaaaatgtcagagatattcccctgctgcaggaccactttaccttgcagcacacacacatcaacggtgtgacttgctggggtatagattaccacttgcgaatgaatatctccgacatcggagaggtgaaggacggaacggtttgcggcccaggtaaaatttgtatccacaagaaatgtgtgagcctgtcagtcctgtcacatgtgtgcctacctgagacttgcaatatgaaagggatttgcaataacaaacaccactgtcactgcggatatggctggtctccaccgtattgtcaacatcgagggtatggagggagtatcgacagtggcccagcatcggcaaagcgaggcgtctttttgcccctgattgttataccaagcttgtctgtactgacattcctgtttaccgtaggattgttaatgtatctgcgtcagtgctcagggcctaaagagactaaggcgcacagttccggctag

SEQ ID NO: 141020 - DNA, 2169 bp, Artificial Sequence
  derived and/or modified sequence
atggccgtggacggcaccctggtgtacatcagagtgaccctgctgctgctgtggctgggcgtgttcctgagcatcagcggctactgccaggccggccccagccagcacttcaccagccccgaggtggtgatccccctgaaggtgatcagcagaggcagaagcgccaaggcccccggctggctgagctacagcctgagattcggcggccagaagcacgtggtgcacatgagagtgaagaagctgctggtgagcagacacctgcccgtgttcacctacaccgacgacagagccctgctggaggaccagctgttcatccccgacgactgctactaccacggctacgtggaggccgcccccgagagcctggtggtgttcagcgcctgcttcggcggcttcagaggcgtgctgaagatcagcggcctgacctacgagatcgagcccatcagacacagcgccaccttcgagcacctggtgtacaagatcaacagcaacgagacccagttccccgccatgagatgcggcctgaccgagaaggaggtggccagacagcagctggagttcgaggaggccgagaacagcgccctggagcccaagagcgccggcgactggtggacccacgcctggttcctggagctggtggtggtggtgaaccacgacttcttcatctacagccagagcaacatcagcaaggtgcaggaggacgtgttcctggtggtgaacatcgtggacagcatgtacaagcagctgggcacctacatcatcctgatcggcatcgagatctggaaccagggcaacgtgttccccatgaccagcatcgagcaggtgctgaacgacttcagccagtggaagcagatcagcctgagccagctgcagcacgacgccgcccacatgttcatcaagaacagcctgatcagcatcctgggcctggcctacgtggccggcatctgcagaccccccatcgactgcggcgtggacaacttccagggcgacacctggagcctgttcgccaacaccgtggcccacgagctgggccacaccctgggcatgcagcacgacgaggagttctgcttctgcggcgagagaggctgcatcatgaacaccttcagagtgcccgccgagaagttcaccaactgcagctacgccgacttcatgaagaccaccctgaaccagggcagctgcctgcacaacccccccagactgggcgagatcttcatgctgaagagatgcggcaacggcgtggtggagagagaggagcagtgcgactgcggcagcgtgcagcagtgcgagcaggacgcctgctgcctgctgaactgcaccctgagacccggcgccgcctgcgccttcggcctgtgctgcaaggactgcaagttcatgcccagcggcgagctgtgcagacaggaggtgaacgagtgcgacctgcccgagtggtgcaacggcaccagccaccagtgccccgaggacagatacgtgcaggacggcatcccctgcagcgacagcgcctactgctaccagaagagatgcaacaaccacgaccagcactgcagagagatcttcggcaaggacgccaagagcgccagccagaactgctacaaggagatcaacagccagggcaacagattcggccactgcggcatcaacggcaccacctacctgaagtgccacatcagcgacgtgttctgcggcagagtgcagtgcgagaacgtgagagacatccccctgctgcaggaccacttcaccctgcagcacacccacatcaacggcgtgacctgctggggcatcgactaccacctgagaatgaacatcagcgacatcggcgaggtgaaggacggcaccgtgtgcggccccggcaagatctgcatccacaagaagtgcgtgagcctgagcgtgctgagccacgtgtgcctgcccgagacctgcaacatgaagggcatctgcaacaacaagcaccactgccactgcggctacggctggagccccccctactgccagcacagaggctacggcggcagcatcgacagcggccccgccagcgccaagagaggcgtgttcctgcccctgatcgtgatccccagcctgagcgtgctgaccttcctgttcaccgtgggcctgctgatgtacctgagacagtgcagcggccccaaggagaccaaggcccacagcagcggctag

SEQ ID NO: 141021 - DNA, 2406 bp, Artificial Sequence
  derived and/or modified sequence
atggcagtggatgggaccctcgtgtacatcagagtcactcttctgctgctctggcttggggtatttttgtctatttccggctactgtcaggctgggccctcccagcatttcacttccccggaagtggtgatccccttgaaggtgatcagcaggggcagaagtgcaaaggctcctggatggctctcctatagtctgcggtttgggggccagaaacacgttgttcatatgagggtcaagaagctcttagtttctagacacctcccagtgttcacctacacagatgaccgtgcactcctggaggatcagctcttcatcccagatgactgttactatcatggttacgtggaggcagcccctgagtctctggttgtgttcagtgcttgttttgggggctttcgaggagtattaaaaataagtggcctcacttatgaaattgaacccatcaggcactctgccacatttgaacacctggtttataagataaacagtaatgagacacaattcccagctatgagatgtggcttaacagagaaggaagtagcacgccaacagttggaatttgaagaggctgagaactcagctctggaaccaaaatctgctggtgactggtggactcatgcatggtttctggagctagttgttgtggtgaaccatgatttcttcatttactctcaaagcaacatctcaaaggtgcaagaggatgtatttcttgttgtcaacatagtggattccatgtataagcagttaggtacttacataattttgattggaattgaaatttggaatcaaggaaatgttttcccaatgacaagcatagaacaggtcctgaacgatttctctcaatggaaacaaatcagtctttcccagctacagcatgatgctgcacatatgttcataaaaaattcacttataagtatacttggcctagcctatgttgcaggaatatgtcgtccacctattgattgtggagttgataattttcaaggagatacctggtctctttttgccaacactgtggcccatgagttaggtcatacgttaggtatgcagcatgatgaagaattctgtttttgtggggaaagaggttgcatcatgaatacttttagagtgccagcagagaaattcaccaattgcagttacgctgattttatgaagaccaccttaaaccagggatcatgtctgcataatcctccaagattgggggaaatctttatgctaaagcgctgtgggaatggtgtggttgaaagagaagagcagtgtgactgtggatccgtacagcagtgtgaacaagacgcctgttgtctgttgaactgcactctaaggcctggggctgcctgtgcttttgggctttgttgcaaagactgcaagttcatgccatcaggggaactctgtagacaagaggtcaatgaatgtgaccttccagaatggtgcaatggaacatctcatcagtgtccagaagatagatatgtgcaggacgggatcccctgtagtgacagtgcctactgctatcaaaagaggtgtaataaccatgaccagcattgcagggagatttttggtaaagatgcaaaaagtgcatctcagaattgctataaagaaatcaattctcagggaaaccgttttggtcactgtggtataaatggcacaacatacctaaaatgtcatatctctgatgtcttttgtgggagagttcaatgtgagaatgtgagagacattcctcttctccaagatcattttactttgcagcacactcatatcaatggtgtcacctgctggggtattgactatcatttaaggatgaacatatctgacattggtgaagtgaaagatggtactgtgtgtggcccaggaaagatctgcatccataagaagtgtgtcagtctgtctgtcttgtcacatgtctgccttcctgagacctgcaatatgaaggggatctgcaataacaaacatcactgccactgtggctatgggtggtccccaccctactgccagcacagaggctatgggggcagtattgacagtggcccagcatctgcaaagagaggagtttttttgccgctgattgtgattccttctttgtctgttttgactttcctgtttactgtcgggcttcttatgtatctacgacaatgttctggtcccaaagaaactaaggctcattcatcaggttaagaaaatgtctctaacttaatattccatgcattagtacactttagtctcttggcagtagaaacattagtacatccctgaaactgagcacatttctgaccatttccagaaagctgcaaagatcttcccttacattagtaccacaaacattgtcattaagttcaagttattcttaacatgtttctatctattgtttattgttttaagcagcaaataaagctacatccttccctcccttta

SEQ ID NO: 141022 - protein, 814 aa, Artificial Sequence
  derived and/or modified sequence
MRLALLWALGLLGAGSPLPSWPLPNIGGTEEQQAESEKAPREPLEPQVLQDDLPISLKKVLQTSLPEPLRIKLELDGDSHILELLQNRELVPGRPTLVWYQPDGTRVVSEGHTLENCCYQGRVRGYAGSWVSICTCSGLRGLVVLTPERSYTLEQGPGDLQGPPIISRIQDLHLPGHTCALSWRESVHTQKPPEHPLGQRHIRRRRDVVTETKTVELVIVADHSEAQKYRDFQHLLNRTLEVALLLDTFFRPLNVRVALVGLEAWTQRDLVEISPNPAVTLENFLHWRRAHLLPRLPHDSAQLVTGTSFSGPTVGMAIQNSICSPDFSGGVNMDHSTSILGVASSIAHELGHSLGLDHDLPGNSCPCPGPAPAKTCIMEASTDFLPGLNFSNCSRRALEKALLDGMGSCLFERLPSLPPMAAFCGNMFVEPGEQCDCGFLDDCVDPCCDSLTCQLRPGAQCASDGPCCQNCQLRPSGWQCRPTRGDCDLPEFCPGDSSQCPPDVSLGDGEPCAGGQAVCMHGRCASYAQQCQSLWGPGAQPAAPLCLQTANTRGNAFGSCGRNPSGSYVSCTPRDAICGQLQCQTGRTQPLLGSIRDLLWETIDVNGTELNCSWVHLDLGSDVAQPLLTLPGTACGPGLVCIDHRCQRVDLLGAQECRSKCHGHGVCDSNRHCYCEEGWAPPDCTTQLKATSSLTTGLLLSLLVLLVLVMLGASYWYRARLHQRLCQLKGPTCQYRAAQSGPSERPGPPQRALLARGTKSQGPAKPPPPRKPLPADPQGRCPSGDLPGPGAGIPPLVVPSRPAPPPPTVSSLYL

SEQ ID NO: 141023 - protein, 520 aa, Artificial Sequence
  derived and/or modified sequence
MRLALLWALGLLGAGSPLPSWPLPNIGGTEEQQAESEKAPREPLEPQVLQDDLPISLKKVLQTSLPEPLRIKLELDGDSHILELLQNRSFLPGLNFSNCSRRALEKALLDGMGSCLFERLPSLPPMAAFCGNMFVEPGEQCDCGFLDDCVDPCCDSLTCQLRPGAQCASDGPCCQNCQLRPSGWQCRPTRGDCDLPEFCPGDSSQCPPDVSLGDGEPCAGGQAVCMHGRCASYAQQCQSLWGPGAQPAAPLCLQTANTRGNAFGSCGRNPSGSYVSCTPRDAICGQLQCQTGRTQPLLGSIRDLLWETIDVNGTELNCSWVHLDLGSDVAQPLLTLPGTACGPGLVCIDHRCQRVDLLGAQECRSKCHGHGVCDSNRHCYCEEGWAPPDCTTQLKATSSLTTGLLLSLLVLLVLVMLGASYWYRARLHQRLCQLKGPTCQYRAAQSGPSERPGPPQRALLARGTKSQGPAKPPPPRKPLPADPQGRCPSGDLPGPGAGIPPLVVPSRPAPPPPTVSSLYL

SEQ ID NO: 141024 - DNA, 2445 bp, Artificial Sequence
  derived and/or modified sequence
atgagactggcacttttatgggccctgggcttgcttggcgctggatcaccgttaccctcatggcccctccccaacatcggtggaaccgaggagcagcaggcagaatccgaaaaggcacctagagaacccctggaaccacaggttctgcaggacgacttgccgatttctctcaaaaaggtccttcagacatccctgcccgagccacttaggatcaaactagagctcgatggggactctcatatcctggaactcttacagaacagggaactcgtgcccgggcggccaacattagtatggtaccagccagacgggacgcgggtggtaagtgagggccataccctggagaactgctgctatcaaggaagagtgaggggttacgcaggcagctgggtgtctatttgtacgtgctccggtctgagggggcttgttgtactgacccctgagcgatcctacacccttgagcagggacccggtgatttgcaagggcccccaatcatcagcaggatccaagatctccacctgcctggacacacatgcgcactatcctggcgggagagcgtacacacacagaagccccccgaacaccccctggggcagcgtcacatccggcggagacgtgacgtggtgactgagacaaagacagtcgaacttgtcatagtggccgaccatagtgaggcccagaaatatcgggatttccagcacctgttaaatagaacactcgaggtggccctgctgctggatacatttttccggcctctgaacgtgcgagtagccctagtgggcctggaggcatggacccaaagagacctagtcgagatttctcccaatccagctgtaacacttgaaaacttccttcactggcgacgcgcccatctcctccctcgcctgccacatgatagtgcccagctggttaccggaacttcattctctgggccaactgttggaatggctatccagaacagcatatgttctcccgatttctccggaggtgtgaacatggaccacagcacatcaatcctgggagtggcttcttctattgcccatgaactggggcatagcttgggccttgatcacgacctacctggtaattcctgcccctgtcccgggcctgcaccagccaagacatgcatcatggaggcaagtaccgattttctgccaggcctcaatttttcaaactgtagccgacgcgccctggagaaggcattactggacggcatgggctcttgcctgttcgaacggctgccgtccctcccacccatggccgcgttttgcgggaacatgtttgtggagccaggtgagcagtgtgactgcggattcctggatgactgcgtggacccctgttgcgacagcctgacctgtcagcttagacccggggcccagtgtgcatctgacggtccctgctgtcaaaattgccaactgcgtccttcgggatggcagtgtagaccaaccaggggtgactgcgatctgcccgagttctgccctggtgactcatcgcaatgtccccccgatgtgtcactcggcgacggcgaaccatgtgccggcggccaggctgtctgcatgcatggaagatgcgcctcatatgcgcagcagtgtcagtccttatggggacctggagctcaacccgcagctcctctctgtctgcaaaccgcgaatactagggggaatgcgtttgggagctgcggaaggaatccaagcggcagttacgtgtcatgtaccccaagggacgctatttgtggccagctgcagtgtcagacaggcagaacacagccccttctcggtagcatccgtgacttactgtgggagacaatcgatgtgaatggtaccgagctgaattgcagctgggtgcatctcgatttggggtccgatgttgcacaacctctcctcaccctgcctggtaccgcttgtgggcctggactggtctgcattgaccatagatgccaacgggtggatctccttggcgcccaggaatgccgaagcaaatgccacgggcacggcgtctgtgatagcaacaggcactgttattgcgaggaaggctgggcgccccccgattgcactacccagctcaaggccacatcctcactcactacggggctcctgctgtcactgctcgttttgctagtgctggtaatgttaggcgcaagttactggtatcgagccagactgcaccagcggctctgccagttgaaaggtcccacatgccaataccgggctgcccaatcagggccatcagaacggcccggccctccacagagagccctgctggcaagaggcacaaagtcccagggcccagccaagcccccaccgcccaggaagcctttgcccgcagatccgcaagggcgctgcccaagtggagacctccctggaccaggagcgggcataccgcccctcgtagtaccatcccgacccgcccctcccccgccaaccgtctcttctctatatctctag

SEQ ID NO: 141025 - DNA, 1563 bp, Artificial Sequence
  derived and/or modified sequence
atgcgtctcgcccttctttgggccctgggcttactgggagccggctctccactcccttcttggcctctgcccaacattggcggaaccgaagagcagcaggcggagtccgagaaggctccccgcgagcctctcgagccccaggttctgcaagatgacttgcctatttcactcaagaaagtgttgcagacctccttaccagaaccattgagaatcaaactggaactcgacggcgactcgcacatcctcgagttgctccagaaccgctcctttcttcccggcttgaactttagtaactgcagcaggcgggcactggagaaagcattgcttgacggaatggggtcctgtctatttgagcggctgcctagtctccctcctatggctgcattctgcggcaacatgtttgtcgagccaggggagcagtgtgattgcggattcttagacgactgtgtggacccatgctgcgacagcctaacctgtcagcttcggccaggagctcagtgcgcctccgatggcccctgttgccagaattgtcaactgaggccctccgggtggcaatgccgacccacacgtggcgactgcgatttacctgagttttgtcctggagactcaagtcagtgtccacctgatgtgtctctcggcgatggcgagccctgcgctggtggccaagccgtgtgcatgcacggaaggtgtgcctcctacgcccagcagtgccagtcactctgggggcctggagctcagccagccgcccccttatgcttgcaaaccgctaacacccgcggcaacgccttcggttcttgcggcagaaacccttccggcagctacgtaagctgtacgccccgggacgctatttgtggacaactccagtgccaaacaggcagaactcagccactactgggatccataagagatctgctgtgggagaccatcgatgtcaatgggactgaacttaactgttcatgggtgcacctggatttgggatctgacgtcgcccagcccttgctgacccttccaggtactgcctgcggcccaggccttgtgtgcatcgaccatcgctgccagcgtgtcgatttattaggggcccaggagtgcagaagcaagtgccatggacatggtgtttgtgactccaacagacattgttactgcgaggaggggtgggcaccccccgattgtaccactcaattaaaagccacgagtagcctaactacaggacttcttctgagcttactggtccttctcgtgcttgtgatgctgggagcatcctattggtacagggccaggctgcatcagcgactatgtcagctgaaaggccccacttgccagtatagagccgcccagtccgggccatctgagcgcccaggcccaccccagcgggcattgctggccaggggaacaaagagtcagggacccgccaaaccaccccccccaagaaagcctctccccgcagacccgcagggacgctgtccatctggcgacctgcccggccctggagccggaattccccccttggtggttccaagcagacccgccccaccaccccccaccgtctcctctctgtacttgtag

SEQ ID NO: 141026 - DNA, 2445 bp, Artificial Sequence
  derived and/or modified sequence
atgaggctggccctgctgtgggccctgggcctgctgggcgccggcagccccctgcccagctggcccctgcccaacatcggcggcacagaggagcagcaggccgagagcgagaaggccccccgggagcccctggagccccaggtgctgcaggatgacctgcccatcagcctgaagaaggtgctgcagaccagcctgcctgagcccctgcgcatcaagctggagctggatggagacagccacatcctggagctgctgcagaaccgggagctggtgcccggccggcccaccctggtgtggtaccagccagatggcaccagggtggtgtctgagggccacaccctggagaactgctgctaccagggccgggtgcggggctacgccggctcctgggtgtccatctgcacctgcagcggcctgcggggcctggtggtgctgaccccagagaggagctacaccctggagcagggccctggggacctgcagggcccccccatcatcagccgcatccaggacctgcacctgcccggccacacctgtgccctgtcctggagggagagcgtgcacacccagaagcccccagagcaccccctgggccagaggcacatcagaagaagaagagatgtggtgacagagaccaagacagtggagctggtgattgtggccgaccacagcgaggcccagaagtacagagacttccagcacctgctgaacagaaccctggaggtggccctgctgctggacaccttcttccggcccctgaatgtgcgggtggccctggtgggcctggaggcctggacccagagggacctggtggagatcagccccaacccagctgtgaccctggagaacttcctgcactggaggcgggcccacctgctgccccggctgccccatgacagcgcccagctggtgacaggcaccagcttcagcggccccaccgtgggcatggccatccagaacagcatctgcagcccagacttcagcggcggcgtgaacatggaccacagcaccagcatcctgggcgtggccagcagcatcgcccacgagctgggccacagcctgggcctggaccatgacctgcccggcaacagctgcccctgccccggccctgccccagccaagacctgcatcatggaggccagcacagacttcctgcccggcctgaacttcagcaactgcagcagaagagccctggagaaggccctgctggatggcatgggcagctgcctgtttgagcggctgcccagcctgccccccatggccgccttctgtggcaacatgtttgtggagcctggagagcagtgtgactgtggcttcctggatgactgtgtggacccctgctgtgacagcctgacctgccagctgcggcctggggcccagtgtgccagtgatggcccctgctgccagaactgccagctgcggcccagcggctggcagtgccggcccaccaggggggactgtgacctgcctgagttctgccctggggacagcagccagtgccccccagatgtgtccctgggagatggagagccctgtgccggcggccaggccgtgtgcatgcacggccgctgtgccagctatgcccagcagtgccagagcctgtggggccctggggcccagcctgctgcccccctgtgcctgcagacagccaacaccagaggaaatgccttcggcagctgtggcaggaaccccagcggcagctatgtgtcctgcaccccaagagatgccatctgtggccagctgcagtgccagacaggccgcacccagcccctgctgggcagcatccgggacctgctgtgggagaccattgatgtgaatggaacagagctgaactgctcctgggtgcacctggacctgggcagtgatgtggcccagcccctgctgaccctgcctggaacagcctgtggccctggcctggtgtgcatcgaccaccgctgccagagggtggacctgctgggcgcccaggagtgccgcagcaagtgccacggccacggcgtgtgtgacagcaacagacactgctactgtgaggagggctgggcccccccagactgcaccacccagctgaaggccaccagcagcctgaccaccggcctgctgctgagcctgctggtgctgctggtgctggtgatgctgggcgccagctactggtaccgggcccggctgcaccagaggctgtgccagctgaagggccccacctgccagtacagagctgcccagagcggccccagcgagcggcccggccccccccagagggccctgctggcccggggcaccaagagccagggccctgccaagcccccaccacccaggaagcccctgcctgctgacccccagggccgctgccccagcggggacctgcccggccctggagctggcatcccccccctggtggtgcccagcaggcctgcccctcctccacccaccgtgagcagcctgtacctgtag

SEQ ID NO: 141027 - DNA, 1563 bp, Artificial Sequence
  derived and/or modified sequence
atgaggctggccctgctgtgggccctgggcctgctgggcgccggcagccccctgcccagctggcccctgcccaacatcggcggcacagaggagcagcaggccgagagcgagaaggccccccgggagcccctggagccccaggtgctgcaggatgacctgcccatcagcctgaagaaggtgctgcagaccagcctgcctgagcccctgcgcatcaagctggagctggatggagacagccacatcctggagctgctgcagaacagaagcttcctgcccggcctgaacttcagcaactgcagcagaagagccctggagaaggccctgctggatggcatgggcagctgcctgtttgagcggctgcccagcctgccccccatggccgccttctgtggcaacatgtttgtggagcctggagagcagtgtgactgtggcttcctggatgactgtgtggacccctgctgtgacagcctgacctgccagctgcggcctggggcccagtgtgccagtgatggcccctgctgccagaactgccagctgcggcccagcggctggcagtgccggcccaccaggggggactgtgacctgcctgagttctgccctggggacagcagccagtgccccccagatgtgtccctgggagatggagagccctgtgccggcggccaggccgtgtgcatgcacggccgctgtgccagctatgcccagcagtgccagagcctgtggggccctggggcccagcctgctgcccccctgtgcctgcagacagccaacaccagaggaaatgccttcggcagctgtggcaggaaccccagcggcagctatgtgtcctgcaccccaagagatgccatctgtggccagctgcagtgccagacaggccgcacccagcccctgctgggcagcatccgggacctgctgtgggagaccattgatgtgaatggaacagagctgaactgctcctgggtgcacctggacctgggcagtgatgtggcccagcccctgctgaccctgcctggaacagcctgtggccctggcctggtgtgcatcgaccaccgctgccagagggtggacctgctgggcgcccaggagtgccgcagcaagtgccacggccacggcgtgtgtgacagcaacagacactgctactgtgaggagggctgggcccccccagactgcaccacccagctgaaggccaccagcagcctgaccaccggcctgctgctgagcctgctggtgctgctggtgctggtgatgctgggcgccagctactggtaccgggcccggctgcaccagaggctgtgccagctgaagggccccacctgccagtacagagctgcccagagcggccccagcgagcggcccggccccccccagagggccctgctggcccggggcaccaagagccagggccctgccaagcccccaccacccaggaagcccctgcctgctgacccccagggccgctgccccagcggggacctgcccggccctggagctggcatcccccccctggtggtgcccagcaggcctgcccctcctccacccaccgtgagcagcctgtacctgtag

SEQ ID NO: 141028 - DNA, 2445 bp, Artificial Sequence
  derived and/or modified sequence
atgcggctggccctgctgtgggccctgggcctgctgggcgccggctcgccgctcccctcttggcctctcccaaacatcggcgggacagaggaacagcaggcggaatccgagaaggcccccagagagcccctcgagccccaggtgctgcaagatgatctccctatctctttaaaaaaggtcctgcagactagcctccctgaacccctgcgcatcaaacttgaattagatggtgatagccacattctcgagctgcttcagaaccgggaactcgttcctggtaggcctactttggtttggtatcaacccgatggcaccagggttgtgtctgaagggcatacactggagaactgctgctatcagggcagggtgcggggatatgccgggtcctgggtgagtatctgtacctgtagtggcctaagggggctcgtggtcctgactcctgagcgatcttataccctcgaacagggccctggggaccttcaaggacccccaattattagtagaatccaagatctgcacttaccgggacacacatgtgcactgtcatggagagagtccgtacacacacaaaagcctcccgagcatccactcgggcagcgccacatccgccgtcgccgcgacgtggttaccgagaccaaaaccgtggagttagtgatcgtcgcagaccacagcgaggcccaaaagtatagggacttccagcatctgctgaacaggaccctcgaggtcgctctgctgctggacacattcttcagacctctcaatgttcgagtagcattagtgggcctggaggcctggactcagcgggacttggttgagatttcacccaaccccgcagtgactctcgagaacttcctccattggcgcagagcccatttactgcccaggctgccgcacgatagcgctcagctggttacgggcaccagtttctcggggcctactgtgggcatggccattcagaactccatctgttctccagacttttctggaggagtcaacatggaccacagcacttcaatcctgggggtcgctagcagcatcgcccatgagctcggtcatagtctgggattagatcatgacctcccaggtaactcttgcccctgcccaggcccagcccccgccaagacctgtatcatggaggccagcacagacttccttccgggtcttaacttctcaaattgcagtagacgtgccctcgagaaagcccttctggacggcatgggatcctgcctttttgagcgcctgccgagcctgcccccaatggctgctttttgcggcaatatgttcgttgaaccaggcgagcagtgtgattgcggtttcctggacgattgtgttgatccatgctgcgactcactaacctgtcagctgaggccaggggcgcagtgtgccagcgatggcccctgctgccagaactgccagctgaggccctctgggtggcagtgtaggcctacgaggggtgattgcgacttgccagagttttgccctggcgacagttcccagtgcccccccgacgtgagcttgggcgatggagagccatgcgcaggagggcaggcagtttgcatgcatggccgctgtgcgtcttacgcacagcagtgccagagcctgtgggggccaggtgcccagccggccgctcctctctgtctacaaaccgcgaacacaagagggaatgcattcggttcctgtggcaggaatccctcagggtcttatgtgagctgcacgcccagagacgctatttgcggccagctgcagtgccagaccggccggacacagcccctgctgggaagcatccgcgacctactgtgggagacaattgatgtgaatggaacggagttgaattgcagttgggtgcacttggatctgggatcagatgtagcccaacccttgctcaccttgccgggcactgcctgtgggcccggactggtgtgcattgaccaccggtgtcagagagtcgacttgctgggcgcacaggagtgtcggagtaagtgtcacggtcatggagtctgcgattcaaatcgtcattgttactgtgaggaaggctgggcaccccctgactgcaccacgcaactgaaggcaacctcctctctcaccacgggcctgctgctgagtcttctcgtgctgttggtactggtcatgctcggagcctcatattggtaccgagccaggctacatcaacggctgtgtcagctaaaaggtcccacttgccagtaccgtgcggcgcagagtggccccagcgagcggcccggcccacctcagcgtgcgctgctcgccaggggaaccaaatcacagggacccgctaaaccccccccccctcgcaagcccttgcccgccgacccccaggggcggtgtccctcgggtgatttgcctggacctggggctgggataccaccccttgtagtgcctagtagaccagccccaccgccaccgacagtgtcttcattgtacctgtag

SEQ ID NO: 141029 - DNA, 1563 bp, Artificial Sequence
  derived and/or modified sequence
atgcggctggccctgctgtgggccctgggcctgctgggcgccggctcccctctcccttcttggcctttgcctaatattggtggaactgaggagcagcaggcggaatcagaaaaagcccccagagagccgctagaacctcaagtgcttcaggacgaccttcccatatcattaaaaaaggttctgcagacatcattaccggaaccacttcggatcaaactggagctggacggggacagccacattctggagctgctgcagaataggagtttcctgccaggtctgaatttctccaactgcagtcggagggcactcgagaaagccctgttggatggaatgggtagctgcctattcgaaagactcccatcactgccccctatggctgccttctgtggtaacatgttcgtagagccaggggagcagtgtgattgcggattcttggacgactgcgtcgacccatgttgtgactcactgacatgccagctcagacccggcgcccaatgtgcctcagacggcccatgttgccaaaattgtcagctgcggccatccggctggcaatgtcgaccgacgaggggcgattgcgatctgccagagttctgccctggagactcgagccagtgtccaccagatgtgtcgctgggcgacggcgagccatgcgccggcggccaagcagtgtgtatgcacgggagatgtgcctcttatgcacagcagtgtcagagcctgtggggacctggagcacagccagccgcccccttatgccttcagaccgcaaatacacgaggaaacgcatttgggtcctgtgggcggaatccttccggttcctatgtgagctgtacaccaagagatgccatatgtggacagctccagtgtcagacgggcagaacccaacccctcctgggttcaataagagacctcctgtgggaaaccatagatgtgaatggaaccgaattgaactgtagctgggtccacctggatcttggcagtgatgtcgcacaacccctgctcaccctaccaggcaccgcctgtggtcccggtttagtttgcatcgatcatcgctgtcagagagttgatcttctgggggctcaggaatgtcgttccaaatgtcatgggcacggagtatgcgactctaatcggcactgttactgtgaggaaggctgggcgccccctgattgcacaacacagctgaaggccacctctagccttacaaccggcctgctgttgagcttactggttctgttggttctggtaatgctcggagcctcgtactggtatcgcgcaaggctgcatcagagactgtgtcagttgaaaggccccacctgccaatacagagcagctcaaagcggcccctccgagcgacccgggcccccacagcgggcactgctagcacgcggcaccaagtcccaggggcctgcaaagccccccccgccaaggaaacctctacctgctgacccacagggacggtgcccgagtggcgatctgcccggtccaggagcgggcatccccccactggtggtgccatcacggccggcccctccccccccgaccgtgagttctttgtacttgtag

SEQ ID NO: 141030 - DNA, 2445 bp, Artificial Sequence
  derived and/or modified sequence
atgagactggccctcctttgggccctagggctgttgggggcagggtcaccactccctagctggccactccctaacatcggcggtacagaggagcaacaggctgaatctgaaaaggcacccagggagcccctcgaaccacaggtcctgcaggacgacctacccatatctttgaagaaggtgctccagacatccctccctgagccactgcgaattaagctggagctggatggcgatagtcacatcttggaactcctgcagaatcgcgagctcgtgcctggcagaccaacactggtctggtaccagcctgatggcacccgtgtggtgtccgaaggacacaccttggagaattgctgttaccagggacgcgtgagggggtatgcaggcagctgggtttcaatatgtacctgttccggacttcggggactcgtcgttctgacaccagagcggtcatacacccttgagcaggggccaggcgacctgcagggcccaccaattatttcacgcatacaagacctgcacttgcctggccatacctgcgcattatcatggcgtgaaagtgtccacacgcagaagcctccagagcacccactggggcagcgacatatacgaagacgaagagacgtggttaccgaaaccaagaccgtggaactggttattgtagccgatcatagtgaagcgcaaaaatatcgtgacttccagcacctgctgaataggaccctagaagtggctcttcttctggacacattcttccgcccactgaatgtccgggttgcgctggtgggcttagaagcctggacgcagcgcgacctggtcgagatctccccaaatccggctgtcacactcgaaaattttctgcactggagacgcgctcatttgctgcccagacttccgcatgacagtgcccagctcgtgacaggtaccagcttctctggcccaacagtgggcatggctatccagaattctatctgctctccagacttctccggcggagtgaatatggatcatagcacttctatcctgggtgtggcctcaagtatcgcccatgagctggggcacagtttaggtctcgatcatgatctcccagggaatagctgtccctgcccaggtccagcccctgcgaaaacatgcatcatggaggcatctactgacttcttgccagggctgaacttctccaactgtagccggcgtgccctggaaaaagctttgcttgacggtatgggatcctgtctgttcgaaaggcttccctccctacccccaatggctgcattttgcggcaacatgttcgtcgaacctggggagcagtgtgactgtggctttttggatgactgtgtggatccatgctgcgacagcctgacatgccagcttcgaccgggagcccagtgcgcaagcgacggcccatgttgtcagaattgccaattaaggccttctggctggcagtgtcgacctacccgcggagattgcgatcttcccgaattctgtccaggggattcaagtcagtgcccccctgacgtgtccctgggtgatggtgaaccttgcgcaggaggtcaggctgtgtgcatgcatgggaggtgtgcctcctatgcacagcaatgtcaatctttgtggggcccaggcgctcagcccgcagcaccattatgtctgcagactgcaaataccaggggtaacgcattcgggagctgcggacggaatccttccggctcttacgtgagttgcacgccccgagatgccatatgcgggcagttgcagtgccagacaggccgaactcagccactgctgggatcaatccgcgaccttctgtgggagaccatcgatgtaaatgggacagaattaaactgcagttgggtgcaccttgatctgggtagcgacgtcgcccagcctctgctgacgctgcctggaaccgcttgtgggccagggctagtctgcatcgaccatagatgtcaacgagtggacctcttgggcgctcaagagtgtcggagcaagtgccatggtcacggagtgtgcgatagtaatagacactgctactgcgaagaaggatgggccccaccagattgcactacacaactgaaggctacgtcctcgctgaccacaggccttctcctgtcattgctggtattgttggtgttagtgatgctgggtgcctcttactggtatcgggcaaggttgcaccaaagactttgtcagctgaaagggcctacatgtcaatatcgcgcagctcagtctggcccttccgagcgccctggcccaccacagcgggcactcctcgctcggggaacaaagagtcagggaccagcgaagccccctccaccacggaagcctctgccagccgatccacaaggaagatgtccgtccggcgacttaccaggacccggagccggaattcccccactcgttgttcctagtcgcccagctcctccccctccaaccgtctcttcgctatatctgtag

SEQ ID NO: 141031 - DNA, 1563 bp, Artificial Sequence
  derived and/or modified sequence
atgaggctcgcactgctgtgggcccttggtctgctaggagccggttcgcccctgccctcatggcccttgcctaacatcggcggtaccgaagaacagcaggcggagagcgagaaagcccctcgcgagcctctggagccgcaagtgctacaagacgacctgccaatcagtctgaaaaaagtattgcagacgagcctccctgagcctctgagaataaagctggagctggacggagactctcatatcctggaacttctacagaaccgaagcttcttgccgggactgaatttcagcaactgttcacggagagccctggaaaaggccctactggacggaatgggatcctgtctgtttgaacgcctgcccagcttgccaccaatggccgctttctgcgggaacatgtttgtggaacccggtgagcagtgtgattgtgggttccttgatgattgcgtggacccctgctgtgactctttaacatgccagctccgtcccggagcgcagtgtgcatccgacgggccatgctgtcagaattgccagctcagaccatctgggtggcagtgccgcccaacacgaggagactgcgacctacctgagttctgccctggggattcttcacaatgtccgcctgacgtgtctcttggagatggcgagccgtgtgccggtgggcaggctgtgtgtatgcatggtcgctgcgccagctatgctcagcagtgtcagagcctttggggaccaggtgcacagcccgcagccccactgtgcctccagacggccaacactagggggaacgcttttggaagctgtggacggaacccttctggaagctacgtgagctgcacacctcgcgatgctatttgcggacagttgcagtgtcaaaccggacgcacacagccactcctggggtcaatccgagatctcctttgggagactatcgatgtcaacgggacggagctgaactgtagctgggtgcacctcgatctgggaagcgatgtcgcccagcccctactgactctgcctggtaccgcatgtggaccgggattggtgtgcatagaccatcgttgtcagagagtcgaccttctgggggcacaagaatgccggtctaaatgccacggccacggagtgtgtgactctaatagacattgctactgtgaggagggctgggctccacctgactgcacaacccagctgaaggctacctctagcctgaccactggacttctgttgtctctcctcgtgctgctggtgctggtgatgttgggagcaagctactggtaccgggctcggttgcatcagaggctgtgtcagcttaaaggacctacgtgtcagtacagggcggcacagagcggaccaagcgagagaccaggcccaccccagcgagctctgctcgccaggggcacaaaatctcaaggtcccgcaaagcctccacctccccgtaaaccacttcctgctgacccacaggggaggtgtccatccggtgacttgccgggacccggtgcaggaatccctccattggtggtccccagtcgtcccgctccgcctcctcccactgtaagtagcctttatctgtag

SEQ ID NO: 141032 - DNA, 2445 bp, Artificial Sequence
  derived and/or modified sequence
atgagactggccctgctgtgggccctgggcctgctgggcgccggcagccccctgcccagctggcccctgcccaacatcggcggcaccgaggagcagcaggccgagagcgagaaggcccccagagagcccctggagccccaggtgctgcaggacgacctgcccatcagcctgaagaaggtgctgcagaccagcctgcccgagcccctgagaatcaagctggagctggacggcgacagccacatcctggagctgctgcagaacagagagctggtgcccggcagacccaccctggtgtggtaccagcccgacggcaccagagtggtgagcgagggccacaccctggagaactgctgctaccagggcagagtgagaggctacgccggcagctgggtgagcatctgcacctgcagcggcctgagaggcctggtggtgctgacccccgagagaagctacaccctggagcagggccccggcgacctgcagggcccccccatcatcagcagaatccaggacctgcacctgcccggccacacctgcgccctgagctggagagagagcgtgcacacccagaagccccccgagcaccccctgggccagagacacatcagaagaagaagagacgtggtgaccgagaccaagaccgtggagctggtgatcgtggccgaccacagcgaggcccagaagtacagagacttccagcacctgctgaacagaaccctggaggtggccctgctgctggacaccttcttcagacccctgaacgtgagagtggccctggtgggcctggaggcctggacccagagagacctggtggagatcagccccaaccccgccgtgaccctggagaacttcctgcactggagaagagcccacctgctgcccagactgccccacgacagcgcccagctggtgaccggcaccagcttcagcggccccaccgtgggcatggccatccagaacagcatctgcagccccgacttcagcggcggcgtgaacatggaccacagcaccagcatcctgggcgtggccagcagcatcgcccacgagctgggccacagcctgggcctggaccacgacctgcccggcaacagctgcccctgccccggccccgcccccgccaagacctgcatcatggaggccagcaccgacttcctgcccggcctgaacttcagcaactgcagcagaagagccctggagaaggccctgctggacggcatgggcagctgcctgttcgagagactgcccagcctgccccccatggccgccttctgcggcaacatgttcgtggagcccggcgagcagtgcgactgcggcttcctggacgactgcgtggacccctgctgcgacagcctgacctgccagctgagacccggcgcccagtgcgccagcgacggcccctgctgccagaactgccagctgagacccagcggctggcagtgcagacccaccagaggcgactgcgacctgcccgagttctgccccggcgacagcagccagtgcccccccgacgtgagcctgggcgacggcgagccctgcgccggcggccaggccgtgtgcatgcacggcagatgcgccagctacgcccagcagtgccagagcctgtggggccccggcgcccagcccgccgcccccctgtgcctgcagaccgccaacaccagaggcaacgccttcggcagctgcggcagaaaccccagcggcagctacgtgagctgcacccccagagacgccatctgcggccagctgcagtgccagaccggcagaacccagcccctgctgggcagcatcagagacctgctgtgggagaccatcgacgtgaacggcaccgagctgaactgcagctgggtgcacctggacctgggcagcgacgtggcccagcccctgctgaccctgcccggcaccgcctgcggccccggcctggtgtgcatcgaccacagatgccagagagtggacctgctgggcgcccaggagtgcagaagcaagtgccacggccacggcgtgtgcgacagcaacagacactgctactgcgaggagggctgggccccccccgactgcaccacccagctgaaggccaccagcagcctgaccaccggcctgctgctgagcctgctggtgctgctggtgctggtgatgctgggcgccagctactggtacagagccagactgcaccagagactgtgccagctgaagggccccacctgccagtacagagccgcccagagcggccccagcgagagacccggccccccccagagagccctgctggccagaggcaccaagagccagggccccgccaagccccccccccccagaaagcccctgcccgccgacccccagggcagatgccccagcggcgacctgcccggccccggcgccggcatcccccccctggtggtgcccagcagacccgccccccccccccccaccgtgagcagcctgtacctgtag

SEQ ID NO: 141033 - DNA, 1563 bp, Artificial Sequence
  derived and/or modified sequence
atgagactggccctgctgtgggccctgggcctgctgggcgccggcagccccctgcccagctggcccctgcccaacatcggcggcaccgaggagcagcaggccgagagcgagaaggcccccagagagcccctggagccccaggtgctgcaggacgacctgcccatcagcctgaagaaggtgctgcagaccagcctgcccgagcccctgagaatcaagctggagctggacggcgacagccacatcctggagctgctgcagaacagaagcttcctgcccggcctgaacttcagcaactgcagcagaagagccctggagaaggccctgctggacggcatgggcagctgcctgttcgagagactgcccagcctgccccccatggccgccttctgcggcaacatgttcgtggagcccggcgagcagtgcgactgcggcttcctggacgactgcgtggacccctgctgcgacagcctgacctgccagctgagacccggcgcccagtgcgccagcgacggcccctgctgccagaactgccagctgagacccagcggctggcagtgcagacccaccagaggcgactgcgacctgcccgagttctgccccggcgacagcagccagtgcccccccgacgtgagcctgggcgacggcgagccctgcgccggcggccaggccgtgtgcatgcacggcagatgcgccagctacgcccagcagtgccagagcctgtggggccccggcgcccagcccgccgcccccctgtgcctgcagaccgccaacaccagaggcaacgccttcggcagctgcggcagaaaccccagcggcagctacgtgagctgcacccccagagacgccatctgcggccagctgcagtgccagaccggcagaacccagcccctgctgggcagcatcagagacctgctgtgggagaccatcgacgtgaacggcaccgagctgaactgcagctgggtgcacctggacctgggcagcgacgtggcccagcccctgctgaccctgcccggcaccgcctgcggccccggcctggtgtgcatcgaccacagatgccagagagtggacctgctgggcgcccaggagtgcagaagcaagtgccacggccacggcgtgtgcgacagcaacagacactgctactgcgaggagggctgggccccccccgactgcaccacccagctgaaggccaccagcagcctgaccaccggcctgctgctgagcctgctggtgctgctggtgctggtgatgctgggcgccagctactggtacagagccagactgcaccagagactgtgccagctgaagggccccacctgccagtacagagccgcccagagcggccccagcgagagacccggccccccccagagagccctgctggccagaggcaccaagagccagggccccgccaagccccccccccccagaaagcccctgcccgccgacccccagggcagatgccccagcggcgacctgcccggccccggcgccggcatcccccccctggtggtgcccagcagacccgccccccccccccccaccgtgagcagcctgtacctgtag

SEQ ID NO: 141034 - DNA, 2799 bp, Artificial Sequence
  derived and/or modified sequence
ccgaggcgacctggccgccggccgctcctccgcgcgctgttccgcacttgctgccctcgcccggcccggagcgccgctgccatgcggctggcgctgctctgggccctggggctcctgggcgcgggcagccctctgccttcctggccgctcccaaatataggtggcactgaggagcagcaggcagagtcagagaaggccccgagggagcccttggagccccaggtccttcaggacgatctcccaattagcctcaaaaaggtgcttcagaccagtctgcctgagcccctgaggatcaagttggagctggacggtgacagtcatatcctggagctgctacagaatagggagttggtcccaggccgcccaaccctggtgtggtaccagcccgatggcactcgggtggtcagtgagggacacactttggagaactgctgctaccagggaagagtgcggggatatgcaggctcctgggtgtccatctgcacctgctctgggctcagaggcttggtggtcctgaccccagagagaagctataccctggagcaggggcctggggaccttcagggtcctcccattatttcgcgaatccaagatctccacctgccaggccacacctgtgccctgagctggcgggaatctgtacacactcagaagccaccagagcaccccctgggacagcgccacattcgccggaggcgggatgtggtaacagagaccaagactgtggagttggtgattgtggctgatcactcggaggcccagaaataccgggacttccagcacctgctaaaccgcacactggaagtggccctcttgctggacacattcttccggcccctgaatgtacgagtggcactagtgggcctggaggcctggacccagcgtgacctggtggagatcagcccaaacccagctgtcaccctcgaaaacttcctccactggcgcagggcacatttgctgcctcgattgccccatgacagtgcccagctggtgactggtacttcattctctgggcctacggtgggcatggccattcagaactccatctgttctcctgacttctcaggaggtgtgaacatggaccactccaccagcatcctgggagtcgcctcctccatagcccatgagttgggccacagcctgggcctggaccatgatttgcctgggaatagctgcccctgtccaggtccagccccagccaagacctgcatcatggaggcctccacagacttcctaccaggcctgaacttcagcaactgcagccgacgggccctggagaaagccctcctggatggaatgggcagctgcctcttcgaacggctgcctagcctaccccctatggctgctttctgcggaaatatgtttgtggagccgggcgagcagtgtgactgtggcttcctggatgactgcgtcgatccctgctgtgattctttgacctgccagctgaggccaggtgcacagtgtgcatctgacggaccctgttgtcaaaattgccagctgcgcccgtctggctggcagtgtcgtcctaccagaggggattgtgacttgcctgaattctgcccaggagacagctcccagtgtccccctgatgtcagcctaggggatggcgagccctgcgctggcgggcaagctgtgtgcatgcacgggcgttgtgcctcctatgcccagcagtgccagtcactttggggacctggagcccagcccgctgcgccactttgcctccagacagctaatactcggggaaatgcttttgggagctgtgggcgcaaccccagtggcagttatgtgtcctgcacccctagagatgccatttgtgggcagctccagtgccagacaggtaggacccagcctctgctgggctccatccgggatctactctgggagacaatagatgtgaatgggactgagctgaactgcagctgggtgcacctggacctgggcagtgatgtggcccagcccctcctgactctgcctggcacagcctgtggccctggcctggtgtgtatagaccatcgatgccagcgtgtggatctcctgggggcacaggaatgtcgaagcaaatgccatggacatggggtctgtgacagcaacaggcactgctactgtgaggagggctgggcaccccctgactgcaccactcagctcaaagcaaccagctccctgaccacagggctgctcctcagcctcctggtcttattggtcctggtgatgcttggtgccagctactggtaccgtgcccgcctgcaccagcgactctgccagctcaagggacccacctgccagtacagggcagcccaatctggtccctctgaacggccaggacctccgcagagggccctgctggcacgaggcactaagtctcaggggccagccaagcccccacccccaaggaagccactgcctgccgacccccagggccggtgcccatcgggtgacctgcccggcccaggggctggaatcccgcccctagtggtaccctccagaccagcgccaccgcctccgacagtgtcctcgctctacctctgacctctccggaggttccgctgcctccaagccggacttagggcttcaagaggcgggcgtgccctctggagtcccctaccatgactgaaggcgccagagactggcggtgtcttaagactccgggcaccgccacgcgctgtcaagcaacactctgcggacctgccggcgtagttgcagcgggggcttggggaggggctgggggttggacgggattgaggaaggtccgcacagcctgtctctgctcagttgcaataaacgtgacatcttgggagcgtt

SEQ ID NO: 141035 - DNA, 1938 bp, Artificial Sequence
  derived and/or modified sequence
gcgcggcgctgctgggttctccgaggcgacctggccgccggccgctcctccgcgcgctgttccgcacttgctgccctcgcccggcccggagcgccgctgccatgcggctggcgctgctctgggccctggggctcctgggcgcgggcagccctctgccttcctggccgctcccaaatataggtggcactgaggagcagcaggcagagtcagagaaggccccgagggagcccttggagccccaggtccttcaggacgatctcccaattagcctcaaaaaggtgcttcagaccagtctgcctgagcccctgaggatcaagttggagctggacggtgacagtcatatcctggagctgctacagaataggagcttcctaccaggcctgaacttcagcaactgcagccgacgggccctggagaaagccctcctggatggaatgggcagctgcctcttcgaacggctgcctagcctaccccctatggctgctttctgcggaaatatgtttgtggagccgggcgagcagtgtgactgtggcttcctggatgactgcgtcgatccctgctgtgattctttgacctgccagctgaggccaggtgcacagtgtgcatctgacggaccctgttgtcaaaattgccagctgcgcccgtctggctggcagtgtcgtcctaccagaggggattgtgacttgcctgaattctgcccaggagacagctcccagtgtccccctgatgtcagcctaggggatggcgagccctgcgctggcgggcaagctgtgtgcatgcacgggcgttgtgcctcctatgcccagcagtgccagtcactttggggacctggagcccagcccgctgcgccactttgcctccagacagctaatactcggggaaatgcttttgggagctgtgggcgcaaccccagtggcagttatgtgtcctgcacccctagagatgccatttgtgggcagctccagtgccagacaggtaggacccagcctctgctgggctccatccgggatctactctgggagacaatagatgtgaatgggactgagctgaactgcagctgggtgcacctggacctgggcagtgatgtggcccagcccctcctgactctgcctggcacagcctgtggccctggcctggtgtgtatagaccatcgatgccagcgtgtggatctcctgggggcacaggaatgtcgaagcaaatgccatggacatggggtctgtgacagcaacaggcactgctactgtgaggagggctgggcaccccctgactgcaccactcagctcaaagcaaccagctccctgaccacagggctgctcctcagcctcctggtcttattggtcctggtgatgcttggtgccagctactggtaccgtgcccgcctgcaccagcgactctgccagctcaagggacccacctgccagtacagggcagcccaatctggtccctctgaacggccaggacctccgcagagggccctgctggcacgaggcactaagtctcaggggccagccaagcccccacccccaaggaagccactgcctgccgacccccagggccggtgcccatcgggtgacctgcccggcccaggggctggaatcccgcccctagtggtaccctccagaccagcgccaccgcctccgacagtgtcctcgctctacctctgacctctccggaggttccgctgcctccaagccggacttagggcttcaagaggcgggcgtgccctctggagtcccctaccatgactgaaggcgccagagactggcggtgtcttaagactccgggcaccgccacgcgctgtcaagcaacactctgcggacctgccggcgtagttgcagcgggggcttggggaggggctgggggttggacgggattgaggaaggtccgcacagcctgtctctgctcagttgcaataaacgtgacatcttgggagcgttc

SEQ ID NO: 141036 - protein, 819 aa, Artificial Sequence
  derived and/or modified sequence
MGSGARFPSGTLRVRWLLLLGLVGPVLGAARPGFQQTSHLSSYEIITPWRLTRERREAPRPYSKQVSYVIQAEGKEHIIHLERNKDLLPEDFVVYTYNKEGTLITDHPNIQNHCHYRGYVEGVHNSSIALSDCFGLRGLLHLENASYGIEPLQNSSHFEHIIYRMDDVYKEPLKCGVSNKDIEKETAKDEEEEPPSMTQLLRRRRAVLPQTRYVELFIVVDKERYDMMGRNQTAVREEMILLANYLDSMYIMLNIRIVLVGLEIWTNGNLINIVGGAGDVLGNFVQWREKFLITRRRHDSAQLVLKKGFGGTAGMAFVGTVCSRSHAGGINVFGQITVETFASIVAHELGHNLGMNHDDGRDCSCGAKSCIMNSGASGSRNFSSCSAEDFEKLTLNKGGNCLLNIPKPDEAYSAPSCGNKLVDAGEECDCGTPKECELDPCCEGSTCKLKSFAECAYGDCCKDCRFLPGGTLCRGKTSECDVPEYCNGSSQFCQPDVFIQNGYPCQNNKAYCYNGMCQYYDAQCQVIFGSKAKAAPKDCFIEVNSKGDRFGNCGFSGNEYKKCATGNALCGKLQCENVQEIPVFGIVPAIIQTPSRGTKCWGVDFQLGSDVPDPGMVNEGTKCGAGKICRNFQCVDASVLNYDCDVQKKCHGHGVCNSNKNCHCENGWAPPNCETKGYGGSVDSGPTYNEMNTALRDGLLVFFFLIVPLIVCAIFIFIKRDQLWRSYFRKKRSQTYESDGKNQANPSRQPGSVPRHVSPVTPPREVPIYANRFAVPTYAAKQPQQFPSRPPPPQPKVSSQGNLIPARPAPAPPLYSSLT

SEQ ID NO: 141037 - DNA, 2460 bp, Artificial Sequence
  derived and/or modified sequence
atgggcagcggcgctcggttcccttcaggaacattacgggtacggtggctgcttctgctgggtctggtgggacctgttctgggcgccgctcggcccggattccaacagacctcacatctttcttcctacgagatcatcaccccatggcgtttgacgcgagagcgcagagaagccccaagaccttatagtaaacaggtctcttacgtgattcaggccgagggcaaagagcatatcattcacctggagcgtaacaaggacctgcttcctgaggattttgttgtctatacttataataaggaggggacactgatcacagaccatcctaatatccagaatcactgtcattaccgcggctacgtggaaggcgttcacaattccagtatagccctgtcagactgtttcgggctgcggggactactgcacttggagaatgcgagctatgggattgagccccttcagaactcctcacatttcgaacatataatctatcggatggacgacgtctacaaggagcccctgaagtgtggggtgtctaataaggatattgagaaggagacagctaaagatgaggaagaagagcccccgtctatgacacagctcctccggagacggcgcgcagtgctgccacagacacgttacgtcgaattgtttattgtggtggacaaagagcgatacgatatgatgggtagaaatcagaccgcagttcgggaggagatgattctgctcgcaaactatctcgattctatgtatatcatgctgaatatccgcatcgtactcgtgggactggaaatttggacaaatggcaatctgatcaacattgttggcggggccggagacgtgctgggcaatttcgtgcagtggcgcgaaaagtttctgattacacggaggcgacacgacagtgcccagctcgtattgaaaaaggggtttgggggcactgctggcatggctttcgttggtacggtttgcagccggtcacatgccggcggtatcaatgtttttggccaaatcaccgtggaaacctttgctagtattgtggcgcatgagctcggccacaacctggggatgaaccatgatgatggacgggactgcagttgcggggccaaaagctgtattatgaactccggtgctagtggcagccggaacttcagctcgtgttctgcagaggatttcgagaagcttacactcaacaagggagggaattgcctcctcaatattcccaagcccgatgaagcttactccgccccctcatgtggaaataagttagtcgacgccggcgaagagtgcgattgcggcacaccaaaggaatgtgaactggatccgtgctgcgaaggaagtacttgtaaactgaagtcattcgccgagtgtgcctacggtgactgctgtaaggattgtcgcttccttccgggaggcaccttgtgccgaggaaaaacttcggaatgcgatgttccagagtactgtaacggctccagccaattttgccaacccgacgtgtttatccaaaatggttatccatgccagaataacaaagcgtattgttataatggaatgtgtcagtactacgacgcacagtgtcaggtgatcttcggatccaaagcgaaggcagcccccaaggactgttttatcgaggtgaacagcaaaggcgaccggttcgggaattgtggcttttctggaaatgaatacaagaagtgtgccaccggaaacgcactgtgcggaaaactgcaatgtgaaaacgtgcaggaaatcccagttttcggaatcgttcctgccatcatacagacgccaagccgcggtactaaatgttggggggtcgatttccagctggggagtgatgtccctgatcctggcatggttaatgaaggaacaaagtgtggcgcaggcaagatctgcagaaacttccagtgtgtcgatgcgtcggtacttaattatgactgtgacgtccagaagaaatgtcatggccacggggtgtgtaactctaacaaaaactgccactgcgaaaacgggtgggcacccccaaactgcgagacaaagggctatggaggaagtgtagactccggcccgacctacaacgagatgaataccgccctccgcgatgggcttctggtgtttttcttcctaatcgtgcctctgattgtgtgtgcgatctttatatttataaaacgcgaccaattgtggaggtcttactttcgcaaaaaaagatcccaaacttacgagtccgatggcaagaaccaagctaatccttcccggcaacccggcagcgtgcctcggcacgtatcaccagtgacacccccacgtgaagtgccgatttatgcaaatcgattcgccgtgcctacctacgctgctaaacaaccccagcagttcccgtcaagaccacccccaccccagccaaaggtgtccagccaagggaacctcatccctgcaagacccgcccccgcccccccgctctattcttcactcacctag

SEQ ID NO: 141038 - DNA, 2460 bp, Artificial Sequence
  derived and/or modified sequence
atgggcagcggggcccgcttccccagcggcaccctgcgggtgcgctggctgctgctgctgggcctggtgggccctgtgctgggcgccgcccggcccggcttccagcagaccagccacctgagcagctatgagatcatcaccccctggaggctgacccgggagcggcgggaggccccccggccctacagcaagcaggtgtcctatgtgatccaggccgagggcaaggagcacatcatccacctggagaggaacaaggacctgctgcctgaggactttgtggtgtacacctacaacaaggagggcaccctcatcacagaccaccccaacatccagaaccactgccactaccggggctacgtggagggcgtgcacaacagcagcatcgccctgagtgactgcttcggcctgcggggcctgctgcacctggagaatgccagctatggaattgagcccctgcagaacagcagccactttgagcacatcatctacaggatggatgatgtgtacaaggagcccctgaagtgtggggtgagcaacaaggacatcgagaaggagacagccaaggatgaggaggaggagccccccagcatgacccagctgctgcggcggcggcgggctgtgctgccccagaccaggtatgtggagctgttcatcgtggtggacaaggagagatatgacatgatgggcaggaaccagacagctgtgcgggaggagatgatcctgctggccaactacctggacagcatgtacatcatgctgaacatcagaattgtgctggtgggcctggagatctggaccaatggaaacctgatcaacatcgtgggcggcgctggagatgtgctgggcaactttgtgcagtggagggagaagttcctgatcaccaggagaagacatgacagcgcccagctggtgctgaagaagggctttggaggaacagctggcatggcctttgtgggcaccgtgtgcagccgcagccatgctgggggcatcaacgtgtttggccagatcaccgtggagacctttgccagcatcgtggcccacgagctgggccacaacctgggcatgaaccatgatgatggccgggactgcagctgtggggccaagagctgcatcatgaacagcggggccagcggcagcaggaacttcagcagctgcagcgctgaggactttgagaagctgaccctgaacaagggcggcaactgcctgctgaacatccccaagccagatgaggcctacagcgcccccagctgtggcaacaagctggtggatgctggggaggagtgtgactgtggcacccccaaggaatgtgagctggacccctgctgtgagggcagcacctgcaagctgaagagctttgctgaatgtgcctatggagactgctgcaaggactgccgcttcctgcccggcggcaccctgtgccggggcaagaccagtgaatgtgatgtgcctgagtactgcaatggcagcagccagttctgccagccagatgtgttcatccagaatggctacccctgccagaacaacaaggcctactgctacaacggcatgtgccagtactatgatgcccagtgccaggtgatcttcggcagcaaggccaaggccgcccccaaggactgcttcatcgaggtgaacagcaagggggaccgcttcggcaactgtggcttctctggaaatgagtacaagaagtgtgccactggaaatgccctgtgtgggaagctgcagtgtgaaaatgtgcaggagatccctgtgtttggcatcgtgcctgccatcatccagacccccagccggggcaccaagtgctggggcgtggacttccagctgggcagtgatgtgcctgaccccggcatggtgaatgaaggcaccaagtgtggggccggcaagatctgcaggaacttccagtgtgtggatgcctctgtgctgaactatgactgtgatgtgcagaagaagtgccacggccatggagtgtgcaacagcaacaagaactgccactgtgaaaatggctgggccccacccaactgtgagaccaagggctacggcggctctgtggacagcggccccacctacaatgagatgaacacagccctgagagatggcctgctggtgttcttcttcctgattgtgcccctcatcgtgtgtgccatcttcatcttcatcaagagggaccagctgtggaggagctacttcaggaagaagaggagccagacctatgaaagtgatggcaagaaccaggccaaccccagccggcagcccggctctgtgcccaggcatgtgtcccctgtgaccccaccccgggaggtgcccatctatgccaacagatttgctgtgcccacctatgctgccaagcagccccagcagttccccagccggcccccaccaccccagcccaaggtgagcagccagggcaacctgatcccagcccggcctgccccagccccacccctgtacagcagcctgacctag

SEQ ID NO: 141039 - DNA, 2460 bp, Artificial Sequence
  derived and/or modified sequence
atgggcagcggcgcccggttccccagcggcaccctgcgggtgcggtggctgctgttacttggtttggtgggaccggtcttgggggcggccaggcccggcttccaacagaccagtcaccttagctcttacgaaataattaccccatggagattgacaagagagcggcgtgaggctcctcgtccctattccaaacaggttagctatgtaattcaggccgagggaaaagaacatataatccatttagagcgtaataaggatctgttgcctgaagacttcgtcgtctacacttataacaaggaagggacactgattactgaccatccaaatatccagaatcattgtcattaccgcggatacgtggagggtgtgcacaatagcagcatagctctctccgactgcttcgggctgcgcggcctgttacacctcgaaaatgcctcatatggcatcgaaccgctacagaatagctcacatttcgaacatatcatttatcggatggatgatgtttataaagagccgttgaagtgcggagtgtcaaacaaggatatcgaaaaggagaccgctaaggacgaagaagaggagcccccatcgatgactcagctactgagacggcggagagcggtcctgcctcagacccgctacgtggaacttttcatcgtggtcgacaaggagaggtatgatatgatgggtcggaaccagaccgccgtcagagaagagatgatattactagccaactatctcgattccatgtacattatgttgaacattaggatagtgcttgtgggccttgaaatttggactaacggtaatctgatcaatatcgtcggcggggcaggggatgttttgggaaatttcgtgcaatggagggaaaagttcctgataacgcgtcggcgtcatgactccgcccagctcgtgcttaaaaagggcttcggcgggaccgcaggtatggccttcgtgggcactgtgtgcagccggagtcatgccggtggcattaatgtctttggccagatcaccgtggagacattcgcttcgattgtcgctcatgaattaggtcataatctcggaatgaaccatgacgatggtcgggattgttcatgtggcgctaagagctgtatcatgaattctggggcgtccggcagcaggaacttctcatcttgctccgccgaagacttcgagaaattaacgcttaacaagggcggcaattgcctgctcaacatcccaaaacccgatgaggcctattctgccccgagctgcgggaataagctggtggatgctggtgaagagtgtgactgcgggacaccaaaagaatgcgaactggatccttgctgcgagggaagcacttgtaagctaaaatcttttgctgaatgcgcttatggcgactgctgtaaagactgcagatttttgcctggaggaactctatgccgcggtaaaaccagtgaatgcgacgtgcctgagtactgcaacggctcctcccagttctgtcagccagacgtgttcatccagaatggctacccctgccagaataataaagcatattgttacaatggcatgtgtcagtactacgatgcacagtgccaggtgatcttcgggtctaaggctaaagcagcaccaaaggactgcttcattgaggtgaactcaaagggagataggttcggcaactgcggcttttcgggaaatgaatataaaaagtgcgcaactgggaacgctctatgtggaaagctgcaatgtgagaatgtgcaggaaattcccgtgttcggcattgtgccagctatcatacaaacgccgagccggggtaccaagtgctggggtgttgacttccaactgggatcggacgtgcctgatccagggatggtgaacgaagggaccaagtgtggagcaggtaagatctgtcgaaattttcaatgtgttgacgcttcagtcctcaattatgattgcgacgtgcagaaaaaatgccacggacatggcgtctgtaactccaacaagaattgccactgtgaaaatggctgggcaccacctaactgtgagaccaaaggttatggaggctctgtggacagcggccctacatataacgagatgaataccgccttgagagatggcctactggtctttttctttctgatcgtcccactgatcgtgtgtgcaatcttcatttttattaagcgtgaccaactttggcgtagctattttcggaaaaagagatcacaaacttacgaaagcgatggcaagaatcaggctaatccaagtcgtcagcctggctccgtacccaggcacgtcagccctgtcactccacccagagaagtgcccatatatgccaataggtttgctgtgcctacgtacgccgctaagcagccgcagcaattcccctccagaccaccgccaccacaaccaaaagtgtcaagtcagggcaacctcataccggcgagacctgcccccgcaccccccctgtacagcagtttgacctag

SEQ ID NO: 141040 - DNA, 2460 bp, Artificial Sequence
  derived and/or modified sequence
atgggatccggagctcgctttccctctgggacactcagagttcggtggctgttgctgctcggactagtggggccagttctcggcgcagcccgtcccggtttccagcagacctcacacctatctagctatgaaattataacaccatggcgtctcacgagggaaaggcgggaagcccctagaccctattcaaaacaggtgtcttatgtcatccaggcagagggaaaggagcatatcattcacttagaaagaaacaaagacctgcttccagaagattttgtggtgtacacatacaataaagagggtacactcataaccgaccacccaaacatccagaaccactgtcattaccggggttatgttgagggggtgcataactcttccatagcactcagcgactgcttcggtttgaggggcttattgcacctggagaacgcatcctatgggattgaaccgctgcagaatagcagccacttcgaacacatcatctataggatggatgacgtctacaaggagcccctgaaatgtggggtgtccaacaaggatatcgagaaggagacagctaaagacgaagaagaagagcctcccagtatgacccagctgcttaggcgtagaagagccgtcctgccacagacccgttacgtggagctcttcatcgtcgtagataaagagcggtatgacatgatgggtcgtaaccaaacagcagtgagggaggaaatgatattactcgcaaactatcttgattccatgtacatcatgttgaacatccgcatcgtcctggttggcctggaaatttggacaaatggcaatctcatcaatatcgttgggggtgctggcgacgtgttgggaaatttcgtgcagtggagggaaaaattcctgataacacggcgacgacacgacagcgcccaactggtcctgaaaaaaggttttggcggtactgctggtatggcctttgtgggaactgtgtgctcccggagccatgcaggcggaattaatgtattcggccagattaccgttgagaccttcgcatccattgtagcacacgagttgggacataatctcggtatgaatcacgatgacggcagggactgttcctgcggggcaaaatcttgcatcatgaattctggggcttcaggctcaaggaacttttccagctgctccgctgaagattttgaaaagctgacgctcaataaaggagggaattgtctcctcaacatacctaagccggatgaagcgtatagcgcgcctagctgtggcaataagttagtcgatgcaggagaggaatgtgattgcggcacgccaaaagagtgtgagctggacccatgctgcgagggctcaacatgtaagttaaaaagcttcgccgaatgcgcatatggcgactgctgcaaggactgtcggttcctgcccggaggcactctctgtcgaggcaaaacatcggaatgcgacgtgcctgaatattgcaacggaagctcccagttctgtcagccggatgtgtttattcagaatggttatccatgccaaaacaataaggcttactgctataatggcatgtgtcaatattacgacgctcagtgtcaggttatttttggcagtaaggctaaagcagcgcctaaagattgttttatagaggtaaactccaagggcgaccgatttggcaactgtggctttagtggtaacgagtacaagaaatgtgcaaccggcaacgctctctgcggcaagctgcagtgtgagaacgtacaggagatacccgtctttggcatagttcccgctataatccagacaccctcgcgcggaactaaatgctggggggtcgacttccagctgggttcagatgtgccagaccctggcatggtcaatgagggaactaagtgtggggctggcaaaatctgtcggaacttccaatgcgttgacgcctcggtgctgaactatgattgcgacgttcagaagaaatgccatgggcacggcgtgtgcaattctaataagaattgtcactgcgagaatgggtgggccccaccaaactgtgaaaccaaagggtacggagggtccgttgattccggacccacatacaatgagatgaatactgccttgcgggacggattacttgtttttttttttttaatcgtgcctctcattgtgtgcgcaatttttatcttcataaaaagagatcaactctggagaagttactttcgaaagaagagatcccagacttacgaatctgacgggaaaaatcaggccaatcctagtaggcagcccggaagcgtgccaagacacgtgtcacctgtcacgccgcctcgagaggtcccaatttacgctaaccgcttcgctgtccccacttatgcggctaaacagccccagcagttccctagccgtccaccccctcctcagcccaaagtgtcatcacagggcaacttaatccctgcaagacctgcccctgctccacctctgtactcctccttaacctag

SEQ ID NO: 141041 - DNA, 2460 bp, Artificial Sequence
  derived and/or modified sequence
atgggcagcggcgccagattccccagcggcaccctgagagtgagatggctgctgctgctgggcctggtgggccccgtgctgggcgccgccagacccggcttccagcagaccagccacctgagcagctacgagatcatcaccccctggagactgaccagagagagaagagaggcccccagaccctacagcaagcaggtgagctacgtgatccaggccgagggcaaggagcacatcatccacctggagagaaacaaggacctgctgcccgaggacttcgtggtgtacacctacaacaaggagggcaccctgatcaccgaccaccccaacatccagaaccactgccactacagaggctacgtggagggcgtgcacaacagcagcatcgccctgagcgactgcttcggcctgagaggcctgctgcacctggagaacgccagctacggcatcgagcccctgcagaacagcagccacttcgagcacatcatctacagaatggacgacgtgtacaaggagcccctgaagtgcggcgtgagcaacaaggacatcgagaaggagaccgccaaggacgaggaggaggagccccccagcatgacccagctgctgagaagaagaagagccgtgctgccccagaccagatacgtggagctgttcatcgtggtggacaaggagagatacgacatgatgggcagaaaccagaccgccgtgagagaggagatgatcctgctggccaactacctggacagcatgtacatcatgctgaacatcagaatcgtgctggtgggcctggagatctggaccaacggcaacctgatcaacatcgtgggcggcgccggcgacgtgctgggcaacttcgtgcagtggagagagaagttcctgatcaccagaagaagacacgacagcgcccagctggtgctgaagaagggcttcggcggcaccgccggcatggccttcgtgggcaccgtgtgcagcagaagccacgccggcggcatcaacgtgttcggccagatcaccgtggagaccttcgccagcatcgtggcccacgagctgggccacaacctgggcatgaaccacgacgacggcagagactgcagctgcggcgccaagagctgcatcatgaacagcggcgccagcggcagcagaaacttcagcagctgcagcgccgaggacttcgagaagctgaccctgaacaagggcggcaactgcctgctgaacatccccaagcccgacgaggcctacagcgcccccagctgcggcaacaagctggtggacgccggcgaggagtgcgactgcggcacccccaaggagtgcgagctggacccctgctgcgagggcagcacctgcaagctgaagagcttcgccgagtgcgcctacggcgactgctgcaaggactgcagattcctgcccggcggcaccctgtgcagaggcaagaccagcgagtgcgacgtgcccgagtactgcaacggcagcagccagttctgccagcccgacgtgttcatccagaacggctacccctgccagaacaacaaggcctactgctacaacggcatgtgccagtactacgacgcccagtgccaggtgatcttcggcagcaaggccaaggccgcccccaaggactgcttcatcgaggtgaacagcaagggcgacagattcggcaactgcggcttcagcggcaacgagtacaagaagtgcgccaccggcaacgccctgtgcggcaagctgcagtgcgagaacgtgcaggagatccccgtgttcggcatcgtgcccgccatcatccagacccccagcagaggcaccaagtgctggggcgtggacttccagctgggcagcgacgtgcccgaccccggcatggtgaacgagggcaccaagtgcggcgccggcaagatctgcagaaacttccagtgcgtggacgccagcgtgctgaactacgactgcgacgtgcagaagaagtgccacggccacggcgtgtgcaacagcaacaagaactgccactgcgagaacggctgggccccccccaactgcgagaccaagggctacggcggcagcgtggacagcggccccacctacaacgagatgaacaccgccctgagagacggcctgctggtgttcttcttcctgatcgtgcccctgatcgtgtgcgccatcttcatcttcatcaagagagaccagctgtggagaagctacttcagaaagaagagaagccagacctacgagagcgacggcaagaaccaggccaaccccagcagacagcccggcagcgtgcccagacacgtgagccccgtgaccccccccagagaggtgcccatctacgccaacagattcgccgtgcccacctacgccgccaagcagccccagcagttccccagcagacccccccccccccagcccaaggtgagcagccagggcaacctgatccccgccagacccgcccccgccccccccctgtacagcagcctgacctag

SEQ ID NO: 141042 - DNA, 3839 bp, Artificial Sequence
  derived and/or modified sequence
cggcagggttggaaaatgatggaagaggcggaggtggaggcgaccgagtgctgagaggaacctgcggaatcggccgagatggggtctggcgcgcgctttccctcggggacccttcgtgtccggtggttgctgttgcttggcctggtgggcccagtcctcggtgcggcgcggccaggctttcaacagacctcacatctttcttcttatgaaattataactccttggagattaactagagaaagaagagaagcccctaggccctattcaaaacaagtatcttatgttattcaggctgaaggaaaagagcatattattcacttggaaaggaacaaagaccttttgcctgaagattttgtggtttatacttacaacaaggaagggactttaatcactgaccatcccaatatacagaatcattgtcattatcggggctatgtggagggagttcataattcatccattgctcttagcgactgttttggactcagaggattgctgcatttagagaatgcgagttatgggattgaacccctgcagaacagctctcattttgagcacatcatttatcgaatggatgatgtctacaaagagcctctgaaatgtggagtttccaacaaggatatagagaaagaaactgcaaaggatgaagaggaagagcctcccagcatgactcagctacttcgaagaagaagagctgtcttgccacagacccggtatgtggagctgttcattgtcgtagacaaggaaaggtatgacatgatgggaagaaatcagactgctgtgagagaagagatgattctcctggcaaactacttggatagtatgtatattatgttaaatattcgaattgtgctagttggactggagatttggaccaatggaaacctgatcaacatagttgggggtgctggtgatgtgctggggaacttcgtgcagtggcgggaaaagtttcttatcacacgtcggagacatgacagtgcacagctagttctaaagaaaggttttggtggaactgcaggaatggcatttgtgggaacagtgtgttcaaggagccacgcaggcgggattaatgtgtttggacaaatcactgtggagacatttgcttccattgttgctcatgaattgggtcataatcttggaatgaatcacgatgatgggagagattgttcctgtggagcaaagagctgcatcatgaattcaggagcatcgggttccagaaactttagcagttgcagtgcagaggactttgagaagttaactttaaataaaggaggaaactgccttcttaatattccaaagcctgatgaagcctatagtgctccctcctgtggtaataagttggtggacgctggggaagagtgtgactgtggtactccaaaggaatgtgaattggacccttgctgcgaaggaagtacctgtaagcttaaatcatttgctgagtgtgcatatggtgactgttgtaaagactgtcggttccttccaggaggtactttatgccgaggaaaaaccagtgagtgtgatgttccagagtactgcaatggttcttctcagttctgtcagccagatgtttttattcagaatggatatccttgccagaataacaaagcctattgctacaacggcatgtgccagtattatgatgctcaatgtcaagtcatctttggctcaaaagccaaggctgcccccaaagattgtttcattgaagtgaattctaaaggtgacagatttggcaattgtggtttctctggcaatgaatacaagaagtgtgccactgggaatgctttgtgtggaaagcttcagtgtgagaatgtacaagagatacctgtatttggaattgtgcctgctattattcaaacgcctagtcgaggcaccaaatgttggggtgtggatttccagctaggatcagatgttccagatcctgggatggttaacgaaggcacaaaatgtggtgctggaaagatctgtagaaacttccagtgtgtagatgcttctgttctgaattatgactgtgatgttcagaaaaagtgtcatggacatggggtatgtaatagcaataagaattgtcactgtgaaaatggctgggctcccccaaattgtgagactaaaggatacggaggaagtgtggacagtggacctacatacaatgaaatgaatactgcattgagggacggacttctggtcttcttcttcctaattgttccccttattgtctgtgctatttttatcttcatcaagagggatcaactgtggagaagctacttcagaaagaagagatcacaaacatatgagtcagatggcaaaaatcaagcaaacccttctagacagccggggagtgttcctcgacatgtttctccagtgacacctcccagagaagttcctatatatgcaaacagatttgcagtaccaacctatgcagccaagcaacctcagcagttcccatcaaggccacctccaccacaaccgaaagtatcatctcagggaaacttaattcctgcccgtcctgctcctgcacctcctttatatagttccctcacttgatttttttaaccttctttttgcaaatgtcttcagggaactgagctaatactttttttttttcttgatgttttcttgaaaagcctttctgttgcaactatgaatgaaaacaaaacaccacaaaacagacttcactaacacagaaaaacagaaactgagtgtgagagttgtgaaatacaaggaaatgcagtaaagccagggaatttacaataacatttccgtttccatcattgaataagtcttattcagtcatcggtgaggttaatgcactaatcatggattttttgaacatgttattgcagtgattctcaaattaactgtattggtgtaagagttttgtcattaagtgtttaagtgttattctgaattttctaccttagttatcattaatgtagttcctcattgaacatgtgataatctaatacctgtgaaaactgactaatcagctgccaataatatctaatatttttcatcatgcacgaattaataatcatcatactctagaatcttgtctgtcactcactacatgaataagcaaatattgtcttcaaaagaatgcacaagaaccacaattaagatgtcatattattttgaaagtacaaaatatactaaaagagtgtgtgtgtattcacgcagttactcgcttccatttttatgacctttcaactataggtaataactcttagagaaattaatttaatattagaatttctattatgaatcatgtgaaagcatgacattcgttcacaatagcactattttaaataaattataagctttaaggtacgaagtatttaatagatctaatcaaatatgttgattcatggctataataaagcaggagcaattataaaatcttcaatcaattgaacttttacaaaaccacttgagaatttcatgagcactttaaaatctgaactttcaaagcttgctattaaatcatttagaatgtttacatttactaaggtgtgctgggtcatgtaaaatattagacactaatattttcatagaaattaggctggagaaagaaggaagaaatggttttcttaaatacctacaaaaaagttactgtggtatctatgagttatcatcttagctgtgttaaaaatgaatttttactatggcagatatggtatggatcgtaaaattttaagcactaaaaattttttcataacctttcataataaagtttaataataggtttattaactgaatttcattagttttttaaaagtgtttttggtttgtgtatatatacatatacaaatacaacatttacaataaataaaatacttgaaattctc

SEQ ID NO: 141043 - protein, 754 aa, Artificial Sequence
  derived and/or modified sequence
MLPGCIFLMILLIPQVKEKFILGVEGQQLVRPKKLPLIQKRDTGHTHDDDILKTYEEELLYEIKLNRKTLVLHLLRSREFLGSNYSETFYSMKGEAFTRHPQIMDHCFYQGSIVHEYDSAASISTCNGLRGFFRINDQRYLIEPVKYSDEGEHLVFKYNLRVPYGANYSCTELNFTRKTVPGDNESEEDSKIKGIHDEKYVELFIVADDTVYRRNGHPHNKLRNRIWGMVNFVNMIYKTLNIHVTLVGIEIWTHEDKIELYSNIETTLLRFSFWQEKILKTRKDFDHVVLLSGKWLYSHVQGISYPGGMCLPYYSTSIIKDLLPDTNIIANRMAHQLGHNLGMQHDEFPCTCPSGKCVMDSDGSIPALKFSKCSQNQYHQYLKDYKPTCMLNIPFPYNFHDFQFCGNKKLDEGEECDCGPAQECTNPCCDAHTCVLKPGFTCAEGECCESCQIKKAGSICRPAKDECDFPEMCTGHSPACPKDQFRVNGFPCKNSEGYCFMGKCPTREDQCSELFDDEAIESHDICYKMNTKGNKFGYCKNKENRFLPCEEKDVRCGKIYCTGGELSSLLGEDKTYHLKDPQKNATVKCKTIFLYHDSTDIGLVASGTKCGEGMVCNNGECLNMEKVYISTNCPSQCNENPVDGHGLQCHCEEGQAPVACEETLHVTNITILVVVLVLVIVGIGVLILLVRYRKCIKLKQVQSPPTETLGVENKGYFGDEQQIRTEPILPEIHFLNKPASKDSRGIADPNQSAK

SEQ ID NO: 141044 - DNA, 2265 bp, Artificial Sequence
  derived and/or modified sequence
atgcttccaggatgcatattccttatgatcctccttatcccccaggtaaaagagaagttcatcttgggcgtggaaggccagcagctggtgaggccaaagaagctgcctctaatccagaagagggatacaggccacacacacgacgatgacatcctgaagacatacgaggaagagttgctgtacgaaattaaactcaatcgaaaaacactggtcttacacctcctgagaagcagagaattcctcggaagcaactattctgagacattctatagcatgaaaggtgaggctttcacgaggcatccacagatcatggatcactgtttttaccagggcagcattgtccatgagtacgacagcgccgcttcaatctctacttgcaatggactgcggggtttctttcggatcaacgaccagaggtacctgatcgagcccgtgaagtactctgacgagggggagcacttagtctttaagtataatctgcgcgtcccctacggggccaattatagttgtacagaactgaatttcactcgaaaaacggttccgggagacaacgagagcgaggaggacagcaaaattaaaggcatacacgatgagaaatacgtggaactcttcatagtggctgacgacacggtctataggaggaacggccacccgcataataaactccggaacagaatctgggggatggtaaatttcgtgaacatgatctacaagactcttaatattcatgtgaccttggtcggaatcgaaatatggactcacgaagataaaatagagctgtacagtaacattgagaccacactgctgagattttcattctggcaggagaaaatccttaaaaccaggaaggactttgaccacgtagttcttttgtccggcaagtggctttactcacatgtccagggcatttcttaccctggtggcatgtgcctaccctactatagcacaagtatcataaaggacttgcttcctgatacgaatatcatcgcaaatagaatggcccaccagctggggcacaacctggggatgcaacacgacgaatttccctgtacttgcccctctgggaagtgtgtcatggacagcgatggctctatccctgcgctgaaatttagtaaatgcagtcaaaaccaataccaccagtacctcaaagattacaagcctacatgtatgttgaacattccctttccttacaacttccacgactttcaattttgtgggaacaaaaagcttgatgaaggagaagagtgtgattgtgggccagctcaggagtgcaccaatccctgctgcgacgctcacacttgcgtgctcaagcctgggttcacctgcgccgaaggagagtgctgcgagagttgccagattaaaaaggctggttctatctgcagaccagccaaggacgagtgcgacttccccgagatgtgcaccggccactccccagcttgccccaaggaccagtttcgtgttaacggctttccctgtaagaattccgaggggtactgtttcatgggaaagtgtccaacaagagaagaccagtgtagcgagttattcgatgacgaagcaattgaaagccacgacatctgctacaagatgaacactaaaggaaataaatttggatactgcaaaaacaaggaaaatagattcctgccctgcgaggagaaagatgtcaggtgcgggaaaatatactgcacaggaggcgaactgtcttctctcctgggggaagataagacataccatttaaaggatccacagaaaaacgctaccgtaaagtgcaaaaccatattcctgtaccatgatagtacggatattggcctcgtcgcttcaggaacaaagtgtggagaggggatggtgtgtaacaacggcgaatgtctgaacatggagaaagtctacatctctacaaattgcccttctcagtgcaatgaaaacccggtagacggacacgggctacagtgtcattgcgaagaaggtcaagcgcccgtggcctgcgaagagaccctgcacgtgacaaatatcaccatactggtggtagtgctggtgcttgtgattgttggcatcggtgtgctcatcctgctcgtacgttaccgaaagtgcataaagcttaaacaggtgcaatcccccccgacggaaacgcttggggtcgaaaacaaagggtatttcggcgacgaacagcagatcaggactgagccaatattgccggagatccatttcctaaacaagccagccagcaaggactccaggggcatcgctgatcctaaccagagcgcaaaatag

SEQ ID NO: 141045 - DNA, 2265 bp, Artificial Sequence
  derived and/or modified sequence
atgctgcccggctgcatcttcctgatgatcctgctgatcccccaggtgaaggagaagttcatcctgggcgtggagggccagcagctggtgcggcccaagaagctgcccctcatccagaagagggacaccggccacacccatgatgatgacatcctgaagacctatgaggaggagctgctgtatgagatcaagctgaacaggaagaccctggtgctgcacctgctgcggagccgggagttcctgggcagcaactacagcgagaccttctacagcatgaagggggaggccttcaccaggcacccccagatcatggaccactgcttctaccagggcagcatcgtgcatgaatatgattctgctgccagcatcagcacctgcaatggcctgcggggcttcttccgcatcaatgaccagcgctacctgattgagcctgtgaagtacagtgatgaaggagagcacctggtgttcaagtacaacctgcgggtgccctacggggccaactacagctgcacagagctgaacttcaccaggaagacagtgcctggggacaatgaaagtgaggaggacagcaagatcaagggcatccatgatgagaagtatgtggagctgttcatcgtggctgatgacacagtgtacagaagaaatggccacccccacaacaagctgaggaaccgcatctggggcatggtgaactttgtgaacatgatctacaagaccctgaacatccacgtgaccctggtgggcatcgagatctggacccatgaggacaagattgagctgtacagcaacatcgagaccaccctgctgcgcttctccttctggcaggagaagatcctgaagaccaggaaggactttgaccacgtggtgctgctgagcggcaagtggctgtacagccacgtgcagggcatctcctacccaggcggcatgtgcctgccctactacagcaccagcatcatcaaggacctgctgcctgacaccaacatcatcgccaacaggatggcccaccagctgggccacaacctgggcatgcagcatgatgagttcccctgcacctgccccagcgggaaatgtgtgatggacagtgatggcagcatcccagccctgaagttcagcaagtgcagccagaaccagtaccaccagtacctgaaggactacaagcccacctgcatgctgaacatccccttcccctacaacttccatgacttccagttctgtggcaacaagaagctggatgaaggagaagaatgtgactgtggccctgcccaggagtgcaccaacccctgctgtgatgcccacacctgtgtgctgaagccaggcttcacctgtgccgagggggagtgctgtgagagctgccagatcaagaaggccggcagcatctgcaggcctgccaaggatgaatgtgacttccctgagatgtgcaccggccacagccctgcctgccccaaggaccagttccgggtgaatggcttcccctgcaagaacagcgagggctactgcttcatgggcaaatgtcccacccgggaggaccagtgcagcgagctgtttgatgatgaggccatcgagagccatgacatctgctacaagatgaacaccaagggcaacaagtttggctactgcaagaacaaggaaaatcgcttcctgccctgtgaggagaaggatgtgcgctgtgggaagatctactgcaccggcggggagctgagcagcctgctgggggaggacaagacctaccacctgaaggacccccagaagaatgccaccgtgaagtgcaagaccatcttcctgtaccatgacagcacagacatcggcctggtggccagcggcaccaagtgtggggagggcatggtgtgcaacaacggggagtgcctgaacatggagaaggtgtacatcagcaccaactgccccagccagtgcaatgaaaatcctgtggatggccacggcctgcagtgccactgtgaggagggccaggcccctgtggcctgtgaggagaccctgcacgtgaccaacatcaccatcctggtggtggtgctggtgctggtgattgtgggcattggagtgctgatcctgctggtgcgctacaggaagtgcatcaagctgaagcaggtgcagagccccccaacagagaccctgggcgtggagaacaagggctactttggagatgagcagcagatcagaacagagcccatcctgcctgagatccacttcctgaacaagccagccagcaaggacagccggggcattgctgaccccaaccagagcgccaagtag

SEQ ID NO: 141046 - DNA, 2265 bp, Artificial Sequence
  derived and/or modified sequence
atgctgcccggctgcatcttcctgatgatcctgctgatcccccaggtgaaggaaaagtttattttgggcgtggagggtcagcaactcgtccggcccaagaagttgcccttgattcagaaaagagataccggccacactcacgatgacgatatcctgaagacatatgaagaggagctactgtatgaaatcaagctgaacaggaagaccctcgttctccacctgctgaggagccgtgaatttttgggctctaactatagcgagactttctactccatgaagggcgaggccttcacccgccacccccagatcatggatcattgtttttatcagggctcaatagtgcacgagtatgattctgcggcatcgattagcacatgcaacgggctcagggggttctttaggattaacgatcaaaggtacctgatcgagccggtgaagtactctgatgaaggtgaacatttggtttttaagtacaacctgagagtgccctatggcgctaattattcctgcaccgaactgaacttcacacgaaaaactgtaccaggcgacaatgaaagtgaggaggattcaaaaataaaggggatacacgatgagaagtatgtagaactttttattgtggccgatgacaccgtgtacagaaggaatgggcatccacataataaattgagaaaccgcatttgggggatggtcaactttgtcaacatgatatataagacgcttaacatccacgtaacattagtgggcattgagatctggacacatgaggacaagattgaactatactccaacattgagacaactctgctgcgctttagtttctggcaggagaagatcctgaagacccgcaaagattttgatcacgtggtgttgttatccggtaagtggctgtattcacacgtccaaggcatcagttatcccgggggaatgtgtctcccctattactccacgagcataataaaggacttactgccagacacaaatattattgcgaatcgcatggctcatcagctgggacacaacctagggatgcagcacgatgagttcccttgcacttgccccagtgggaaatgcgtaatggactcggatggaagcatccccgcccttaagttttccaagtgcagccagaatcagtaccaccagtacttaaaggactacaagcccacatgcatgctgaacatcccatttccgtacaactttcacgattttcagttctgtgggaataaaaagctggatgaaggagaggagtgtgactgtgggcccgcacaggagtgtacaaacccgtgttgcgacgcccatacatgcgtgctgaagcctggatttacttgtgccgagggcgaatgctgcgaatcctgccaaattaagaaggcgggcagtatttgccggccggctaaggatgagtgcgattttcccgaaatgtgcaccggccactcacctgcctgccccaaggaccagtttcgggtgaatgggtttccttgtaagaactctgaaggttactgtttcatgggtaagtgtcccacacgagaggaccagtgttccgaactgtttgatgacgaggccatcgagtcacatgacatctgttacaagatgaacacaaaggggaacaagttcggatactgcaagaataaggagaaccgatttctgccatgcgaagaaaaggacgtcagatgcggaaagatctactgcacaggcggtgagttatctagtctgctgggggaggataagacctatcatctgaaagatccacagaaaaacgcaaccgtaaaatgtaagacaatctttttgtaccacgacagtactgatatcgggctggtggcttccgggactaaatgcggggaaggcatggtgtgtaacaatggggagtgccttaacatggagaaagtttatatttctacaaattgtcctagccaatgcaatgagaatcccgtcgatggccacgggctgcagtgccattgtgaagaaggccaggcgccggtcgcctgcgaagagaccctgcacgtgacgaacattacaattttggtcgtggtcctggtgctggtgattgtgggaatcggcgtgctaatcctgcttgtccggtaccgtaaatgtatcaagctgaaacaggtgcaatccccacctacggaaacgttgggcgttgagaacaagggttactttggggatgagcagcagataaggacagagcccattctcccagaaattcatttcctgaacaagcctgctagcaaggactcccgtgggatagccgaccccaatcagtcagctaagtag

SEQ ID NO: 141047 - DNA, 2265 bp, Artificial Sequence
  derived and/or modified sequence
atgctcccagggtgcattttcttgatgattcttctgatcccccaagtaaaggagaagttcattttgggagttgagggacagcaactggtgcgccctaagaaactccctctgattcagaagcgcgatactggccacacacacgacgatgatattctgaagacttacgaagaagagctcctttacgaaattaaactgaatcgaaaaacgctagtgctgcacctgctccggagccgagaattcctaggctcaaattattctgaaactttttactctatgaaaggggaagcttttaccagacatccacaaattatggatcactgtttttaccagggaagcatagtccacgagtacgattcggccgcttccatatccacttgcaacgggctgaggggctttttccggattaatgaccagcggtacctgattgagccagtgaagtatagtgacgaaggagaacatctggtctttaagtacaatctgcgagtaccatatggtgctaattactcatgtacagaactgaatttcacaagaaagactgtgcctggggacaatgaaagcgaagaggacagcaagatcaaaggcatccacgacgagaaatatgttgaactattcattgtagctgacgataccgtatacagaaggaatggacacccccacaataagttgaggaaccgaatatggggtatggtaaatttcgtgaatatgatatacaaaactctgaatattcacgtcaccctagtcggcatcgagatttggacccacgaggacaaaatcgaactgtacagcaacattgaaactacccttttacgattttcattttggcaggagaagatcctgaaaacccggaaggatttcgaccacgtcgtcctgctttctggtaaatggctgtatagtcatgttcagggaatatcttacccgggaggcatgtgtctgccctattattccacatcaatcattaaagacctgctgccagacaccaatatcattgcgaacaggatggctcatcagctgggccataatctgggcatgcagcacgacgaattcccctgcacatgtccgagcgggaaatgcgtgatggattcggacggctctattccagcattgaaattctctaagtgctctcagaatcagtaccaccagtatctcaaggattacaaacctacctgcatgctgaatatcccctttccttacaacttccatgactttcagttttgcggcaacaagaagctggatgaaggcgaagaatgtgactgtgggccagctcaggagtgcaccaacccatgctgcgacgctcacacttgcgtgctaaagccgggtttcacatgcgcagagggtgagtgttgcgagtcatgtcagatcaaaaaggccggttcgatttgtcgacctgctaaagacgagtgtgacttccccgaaatgtgtaccgggcacagtcccgcttgtcctaaggatcaattccgagtgaacggctttccgtgcaagaactccgaaggatactgctttatgggaaagtgccctacccgcgaagaccagtgctctgagctgttcgatgacgaagcgatcgaaagccacgacatttgctataaaatgaacacaaaaggcaataaattcggatattgcaagaacaaagaaaaccgattcttgccttgtgaagaaaaagatgttcggtgcggaaaaatttactgtacaggcggtgagctatcctcgctgctgggagaggataaaacgtaccacctgaaggatccacagaagaatgcaaccgtcaagtgcaagacgatattcctctaccacgacagcaccgatatcggacttgttgcttccggtaccaagtgtggcgaggggatggtgtgtaacaatggcgagtgcctgaacatggaaaaagtgtatatctcgaccaactgcccatcccagtgcaacgagaatcccgtggatggacacggcctgcagtgtcactgtgaggagggccaggccccagtggcttgtgaggagaccctgcacgtcaccaatattacgatcctcgtggtggtgttggtcttggtcatcgtcggcatcggcgtcctgattcttctggtcagataccggaaatgcattaaactgaaacaggtacagtcgcccccaactgagaccctgggggtagagaacaagggctatttcggcgatgaacagcagattaggaccgaaccaattctgcccgagatacactttctgaacaagcctgcgtctaaggattcccgcggaattgcagatccgaaccaatccgcaaagtag

SEQ ID NO: 141048 - DNA, 2265 bp, Artificial Sequence
  derived and/or modified sequence
atgctgcccggctgcatcttcctgatgatcctgctgatcccccaggtgaaggagaagttcatcctgggcgtggagggccagcagctggtgagacccaagaagctgcccctgatccagaagagagacaccggccacacccacgacgacgacatcctgaagacctacgaggaggagctgctgtacgagatcaagctgaacagaaagaccctggtgctgcacctgctgagaagcagagagttcctgggcagcaactacagcgagaccttctacagcatgaagggcgaggccttcaccagacacccccagatcatggaccactgcttctaccagggcagcatcgtgcacgagtacgacagcgccgccagcatcagcacctgcaacggcctgagaggcttcttcagaatcaacgaccagagatacctgatcgagcccgtgaagtacagcgacgagggcgagcacctggtgttcaagtacaacctgagagtgccctacggcgccaactacagctgcaccgagctgaacttcaccagaaagaccgtgcccggcgacaacgagagcgaggaggacagcaagatcaagggcatccacgacgagaagtacgtggagctgttcatcgtggccgacgacaccgtgtacagaagaaacggccacccccacaacaagctgagaaacagaatctggggcatggtgaacttcgtgaacatgatctacaagaccctgaacatccacgtgaccctggtgggcatcgagatctggacccacgaggacaagatcgagctgtacagcaacatcgagaccaccctgctgagattcagcttctggcaggagaagatcctgaagaccagaaaggacttcgaccacgtggtgctgctgagcggcaagtggctgtacagccacgtgcagggcatcagctaccccggcggcatgtgcctgccctactacagcaccagcatcatcaaggacctgctgcccgacaccaacatcatcgccaacagaatggcccaccagctgggccacaacctgggcatgcagcacgacgagttcccctgcacctgccccagcggcaagtgcgtgatggacagcgacggcagcatccccgccctgaagttcagcaagtgcagccagaaccagtaccaccagtacctgaaggactacaagcccacctgcatgctgaacatccccttcccctacaacttccacgacttccagttctgcggcaacaagaagctggacgagggcgaggagtgcgactgcggccccgcccaggagtgcaccaacccctgctgcgacgcccacacctgcgtgctgaagcccggcttcacctgcgccgagggcgagtgctgcgagagctgccagatcaagaaggccggcagcatctgcagacccgccaaggacgagtgcgacttccccgagatgtgcaccggccacagccccgcctgccccaaggaccagttcagagtgaacggcttcccctgcaagaacagcgagggctactgcttcatgggcaagtgccccaccagagaggaccagtgcagcgagctgttcgacgacgaggccatcgagagccacgacatctgctacaagatgaacaccaagggcaacaagttcggctactgcaagaacaaggagaacagattcctgccctgcgaggagaaggacgtgagatgcggcaagatctactgcaccggcggcgagctgagcagcctgctgggcgaggacaagacctaccacctgaaggacccccagaagaacgccaccgtgaagtgcaagaccatcttcctgtaccacgacagcaccgacatcggcctggtggccagcggcaccaagtgcggcgagggcatggtgtgcaacaacggcgagtgcctgaacatggagaaggtgtacatcagcaccaactgccccagccagtgcaacgagaaccccgtggacggccacggcctgcagtgccactgcgaggagggccaggcccccgtggcctgcgaggagaccctgcacgtgaccaacatcaccatcctggtggtggtgctggtgctggtgatcgtgggcatcggcgtgctgatcctgctggtgagatacagaaagtgcatcaagctgaagcaggtgcagagcccccccaccgagaccctgggcgtggagaacaagggctacttcggcgacgagcagcagatcagaaccgagcccatcctgcccgagatccacttcctgaacaagcccgccagcaaggacagcagaggcatcgccgaccccaaccagagcgccaagtag

SEQ ID NO: 141049 - DNA, 3367 bp, Artificial Sequence
  derived and/or modified sequence
atccctgcagtggaagtgaggaggaagaaaggtgaactccttttctcaagcacttctgctctcctctaccagaatcactcagaatgcttcccgggtgtatattcttgatgattttactcattcctcaggttaaagaaaagttcatccttggagtagagggtcaacaactggttcgtcctaaaaagcttcctctgatacagaagcgagatactggacacacccatgatgatgacatactgaaaacgtatgaagaagaattgttgtatgaaataaaactaaatagaaaaaccttagtccttcatcttctaagatccagggagttcctaggctcaaattacagtgaaacattctactccatgaaaggagaagcgttcaccaggcatcctcagatcatggatcattgtttttaccaaggatccatagtacacgaatatgattcagctgccagtatcagtacgtgtaatggtctaaggggattcttcagaataaacgaccaaagatacctcattgaaccagtgaaatactcagatgagggagaacatttggtgttcaaatataacctgagggtgccgtatggtgccaattattcctgtacagagcttaattttaccagaaaaactgttccaggggataatgaatctgaagaagactccaaaataaaaggcatccatgatgaaaagtatgttgaattgttcattgttgctgatgatactgtgtatcgcagaaatggtcatcctcacaataaactaaggaaccgaatttggggaatggtcaattttgtcaacatgatttataaaaccttaaacatccatgtgacgttggttggcattgaaatatggacacatgaagataaaatagaactatattcaaatatagaaactaccttattgcgtttttcattttggcaagaaaagatccttaaaacacggaaggattttgatcatgttgtattactcagtgggaagtggctctactcacatgtgcaaggaatttcttatccagggggtatgtgcctgccctattattccaccagtatcattaaggatcttttacctgacacaaacataattgcaaacagaatggcacatcaactggggcataaccttgggatgcagcatgacgagttcccatgcacctgtccttcaggaaaatgcgtgatggacagtgatggaagcattcctgcactgaaattcagtaaatgcagccaaaaccaataccaccagtacttgaaggattataagccaacatgcatgctcaacattccatttccttacaattttcatgatttccaattttgtggaaacaagaagttggatgagggtgaagagtgtgactgtggccctgctcaggagtgtactaatccttgctgtgatgcacacacatgtgtactgaagccaggatttacttgtgcagaaggagaatgctgtgaatcttgtcagataaaaaaagcagggtccatatgcagaccggcgaaagatgaatgtgattttcctgagatgtgcactggccactcgcctgcctgtcctaaggaccagttcagggtcaatggatttccttgcaagaactcagaaggctactgtttcatggggaaatgtccaactcgtgaggatcagtgctctgaactatttgatgatgaggcaatagagagtcatgatatctgctacaagatgaatacaaaaggaaataaatttggatactgcaaaaacaaggaaaacagatttcttccctgtgaggagaaagatgtcagatgtggaaagatctactgcactggaggggagctttcctctctccttggagaagacaagacttatcaccttaaggatccccagaagaatgctactgtcaaatgcaaaactatttttttataccatgattctacagacattggcctggtggcgtcaggaacaaaatgtggagagggaatggtgtgcaacaatggtgaatgtctaaacatggaaaaggtctatatctcaaccaattgcccctctcagtgcaatgaaaatcctgtggatggccacggactccagtgccactgtgaggaaggacaggcacctgtagcctgtgaagaaaccttacatgttaccaatatcaccatcttggttgttgtgcttgtcctggttattgtcggtatcggagttcttatactattagttcgttaccgaaaatgtatcaagttgaagcaagttcagagcccacctacagaaaccctgggagtggagaacaaaggatactttggtgatgagcagcagataaggactgagccaatcctgccagaaattcatttcctaaataaacctgcaagtaaagattcaagaggaatcgcagatcccaatcaaagtgccaagtgagcttgaagttggatatccaaaatggccgtgcaagcttaggctggggattctggatgcaacgtctttacaaccttacctagatatctgctactcacatttttggtagtgtttcaaacgttctttatccagacagacaatgtttaagagaaacaacttatttctgttaatatttaccggtagaattcacaccctctatcataaacatatgctgcagaaaaaaaatgtcttgtggtctttcaaatgctctttagcacaatataaaaattcgtaaccttgctgtagtattttcctacaaaatgttactctgctttcttttaagaatccaaactttaaggatgataacttacagtctaagaagaaaacattgcatataaaaagttacttttttggaaacataaaagtacgttttaaaacttgaacatgacatcattagcactaattctggtttaaatgaaagtcctgcagaaatgccaaagaaggcagggcagagcggcacggattctaggtaattaaaagtgaaagaggcagaagaatagtggacagaactgcaggatagtccttaaaataatggtggtgggaaaggaaaacacagaatgctcctggcaattctaaattcctaggtttgcctttctagaattccttaagaagctgacagagaaatcagagggttacaagaatttcagaaaatttactccaagtgagaggacatactcacaactcctatgaagggtttctaaggtctttgtcctgtgcaatttgacaatgtgccatttctgtgctgtctctgccctctccctatccgtttgttatgggatgggggattaccctgggaatgatttcagctgcttcttacacagatgcctctcaaggtgttcttttgtgtcctctattttcttcttgtgaactgttaaagctacatgcattattttttttccatttactgaaataaagttttcaagttctaaataaaaatattctgactcgatgaaataaataaaggctacaaaagaaggaagaaa

SEQ ID NO: 141050 - DNA, 2068 bp, Artificial Sequence
  derived and/or modified sequence
gtttgccctcgtagctatttcctggagggaaggggtagctacagtttcctgtccctcttcagcacttctccagctccatatcgcagaaatggtcatcctcacaataaactaaggaaccgaatttggggaatggtcaattttgtcaacatgatttataaaaccttaaacatccatgtgacgttggttggcattgaaatatggacacatgaagataaaatagaactatattcaaatatagaaactaccttattgcgtttttcattttggcaagaaaagatccttaaaacacggaaggattttgatcatgttgtattactcagtgggaagtggctctactcacatgtgcaaggaatttcttatccagggggtatgtgcctgccctattattccaccagtatcattaaggatcttttacctgacacaaacataattgcaaacagaatggcacatcaactggggcataaccttgggatgcagcatgacgagttcccatgcacctgtccttcaggaaaatgcgtgatggacagtgatggaagcattcctgcactgaaattcagtaaatgcagccaaaaccaataccaccagtacttgaaggattataagccaacatgcatgctcaacattccatttccttacaattttcatgatttccaattttgtggaaacaagaagttggatgagggtgaagagtgtgactgtggccctgctcaggagtgtactaatccttgctgtgatgcacacacatgtgtactgaagccaggatttacttgtgcagaaggagaatgctgtgaatcttgtcagataaaaaaagcagggtccatatgcagaccggcgaaagatgaatgtgattttcctgagatgtgcactggccactcgcctgcctgtcctaaggaccagttcagggtcaatggatttccttgcaagaactcagaaggctactgtttcatggggaaatgtccaactcgtgaggatcagtgctctgaactatttgatgatgaggcaatagagagtcatgatatctgctacaagatgaatacaaaaggaaataaatttggatactgcaaaaacaaggaaaacagatttcttccctgtgaggagaaagatgtcagatgtggaaagatctactgcactggaggggagctttcctctctccttggagaagacaagacttatcaccttaaggatccccagaagaatgctactgtcaaatgcaaaactatttttttataccatgattctacagacattggcctggtggcgtcaggaacaaaatgtggagagggaatggtgtgcaacaatggtgaatgtctaaacatggaaaaggtctatatctcaaccaattgcccctctcagtgcaatgaaaatcctgtggatggccacggactccagtgccactgtgaggaaggacaggcacctgtagcctgtgaagaaaccttacatgttaccaatatcaccatcttggttgttgtgcttgtcctggttattgtcggtatcggagttcttatactattagttcgttaccgaaaatgtatcaagttgaagcaagttcagagcccacctacagaaaccctgggagtggagaacaaaggatactttggtgatgagcagcagataaggactgagccaatcctgccagaaattcatttcctaaataaacctgcaagtaaagattcaagaggaatcgcagatcccaatcaaagtgccaagtgagcttgaagttggatatccaaaatggccgtgcaagcttaggctggggattctggatgcaacgtctttacaaccttacctagatatctgctactcacatttttggtagtgtttcaaacgttctttatccagacagacaatgtttaagagaaacaacttatttctgttaatatttaccggtagaattcacaccctctatcataaacatatgctgcagaaaaaaaatgtcttgtggtctttcaaatgctctttagcacaatataaaaattcgtaaccttgctgtagtattttcctacaaaatgttactctgctttcttttaagaatccaaactttaaggatgataacttacagtctaagaag

SEQ ID NO: 141051 - protein, 325 aa, Artificial Sequence
  derived and/or modified sequence
MSRLRHPRTRYFLLCVNYFFYGETVTDYFFTLVQREEPLRILSKYHRFISFTLYLIGFCMFVLSLVKKHYRLQFYMFGWTHVTLLIVVTQSHLVIHNLFEGMIWFIVPISCVICNDIMAYMFGFFFGRTPLIKLSPKKTWEGFIGGFFATVVFGLLLSYVMSGYRCFVCPVEYNNDTNSFTVDCEPSDLFRLQEYNIPGVIQSVIGWKTVRMYPFQIHSIALSTFASLIGPFGGFFASGFKRAFKIKDFANTIPGHGGIMDRFDCQYLMATFVNVYIASFIRGPNPSKLIQQFLTLRPDQQLHIFNTLRSHLIDKGMLTSTTEDE

SEQ ID NO: 141052 - protein, 445 aa, Artificial Sequence
  derived and/or modified sequence
MTELRQRVAHEPVAPPEDKESESEAKVDGETASDSESRAESAPLPVSADDTPEVLNRALSNLSSRWKNWWVRGILTLAMIAFFFIIIYLGPMVLMIIVMCVQIKCFHEIITIGYNVYHSYDLPWFRTLSWYFLLCVNYFFYGETVTDYFFTLVQREEPLRILSKYHRFISFTLYLIGFCMFVLSLVKKHYRLQFYMFGWTHVTLLIVVTQSHLVIHNLFEGMIWFIVPISCVICNDIMAYMFGFFFGRTPLIKLSPKKTWEGFIGGFFATVVFGLLLSYVMSGYRCFVCPVEYNNDTNSFTVDCEPSDLFRLQEYNIPGVIQSVIGWKTVRMYPFQIHSIALSTFASLIGPFGGFFASGFKRAFKIKDFANTIPGHGGIMDRFDCQYLMATFVNVYIASFIRGPNPSKLIQQFLTLRPDQQLHIFNTLRSHLIDKGMLTSTTEDE

SEQ ID NO: 141053 - protein, 215 aa, Artificial Sequence
  derived and/or modified sequence
MFVLSLVKKHYRLQFYMFGWTHVTLLIVVTQSHLVIHNLFEGMIWFIVPISCVICNDIMAYMFGFFFGRTPLIKLSPKKTWEGFIGGFFATVVFGLLKTVRMYPFQIHSIALSTFASLIGPFGGFFASGFKRAFKIKDFANTIPGHGGIMDRFDCQYLMATFVNVYIASFIRGPNPSKLIQQFLTLRPDQQLHIFNTLRSHLIDKGMLTSTTEDE

SEQ ID NO: 141054 - DNA, 1338 bp, Artificial Sequence
  derived and/or modified sequence
atgacagaactgcggcaacgggttgctcacgagccagtggccccgccagaggacaaggagtcagagagtgaagctaaagtggatggagaaaccgccagcgatagcgagagtagggctgaatccgcacccttgcctgtgtccgcagacgatactcctgaggtactgaacagggccctgtctaacttgtcttccagatggaagaactggtgggtacgcggcattctcacactggccatgattgccttcttcttcatcatcatatatcttggaccaatggttttgatgattatcgtcatgtgcgtgcaaatcaaatgctttcacgaaattataaccattgggtataacgtgtatcactcttacgatctcccttggttccgaaccctgagttggtacttcttgctctgcgtaaactacttcttctacggtgagaccgtgacagattacttttttaccctcgttcagagggaggagcccttacggattctcagtaagtaccataggtttatttccttcacactctaccttattggcttttgtatgtttgtgctgagtctggtcaaaaaacactaccgacttcaattctacatgttcggatggactcacgtgaccctgctgatagtggtaactcagtctcacttggtcattcacaatctcttcgaaggcatgatctggtttattgtgccaatttcttgcgtaatctgtaatgatattatggcctacatgttcggatttttttttggccggacgcccttaattaaactgtcaccgaaaaaaacctgggaaggctttataggcggatttttcgctaccgtcgtcttcggactgctactcagctatgttatgtcaggctaccgatgctttgtgtgtcccgtagaatataataacgacaccaacagttttacagtggattgtgagcccagcgacctgtttcggttgcaggaatataacatacctggagtcatccagtccgttattggctggaaaactgtgcggatgtatcctttccaaattcactcgatagccttaagcacattcgccagcctgatcgggccctttggggggtttttcgcaagcggatttaagagagcatttaagattaaagatttcgccaacactatccccggccatggcggcatcatggatcgctttgactgccagtaccttatggccacattcgtgaatgtctacatagcgagtttcatccgcggacccaacccatccaagctcatccagcagttcctgactctgcggccagaccagcagttgcatatcttcaataccctgagatctcacctcattgataagggcatgctgacaagcaccaccgaggacgagtag

SEQ ID NO: 141055 - DNA, 1338 bp, Artificial Sequence
  derived and/or modified sequence
atgacagagctgcggcagagggtggcccacgagcctgtggcccccccagaggacaaggagagcgagagcgaggccaaggtggatggagaaacagccagtgacagcgagagcagagctgagagcgcccccctgcctgtgtctgcagatgacaccccagaggtgctgaacagagccctgagcaacctgagcagccgctggaagaactggtgggtgcggggcatcctgaccctggccatgattgccttcttcttcatcatcatctacctgggccccatggtgctgatgatcatcgtgatgtgtgtgcagatcaagtgcttccacgagatcatcaccatcggctacaacgtgtaccacagctatgacctgccctggttccgcaccctgtcctggtacttcctgctgtgtgtgaactacttcttctatggagagaccgtgacagactacttcttcaccctggtgcagcgggaggagcccctgcgcatcctgagcaagtaccaccgcttcatctccttcaccctgtacctgattggcttctgcatgtttgtgctgagcctggtgaagaagcactaccgcctgcagttctacatgtttggctggacccacgtgaccctgctgattgtggtgacccagagccacctggtgatccacaacctgtttgagggcatgatctggttcatcgtgcccatcagctgtgtgatctgcaatgacatcatggcctacatgtttggcttcttcttcggccgcacccccctcatcaagctgagccccaagaagacctgggagggcttcatcggcggcttctttgccaccgtggtgtttggcctgctgctgtcctatgtgatgagcggctaccgctgctttgtgtgccctgtggagtacaacaatgacaccaacagcttcaccgtggactgtgagcccagcgacctcttccggctgcaggagtacaacatccctggggtcatccagagcgtgattggctggaagacagtgaggatgtaccccttccagatccacagcatcgccctgagcacctttgccagcctgattggcccctttggaggcttctttgccagcggcttcaagagggccttcaagatcaaggactttgccaacaccatccctggccacggcggcatcatggacagatttgactgccagtacctgatggccacctttgtgaatgtgtacatcgccagcttcatccggggccccaaccccagcaagctgatccagcagttcctgaccctgcggccagaccagcagctgcacatcttcaacaccctgcggagccacctgattgacaagggcatgctgaccagcaccacagaagatgaatag

SEQ ID NO: 141056 - DNA, 1338 bp, Artificial Sequence
  derived and/or modified sequence
atgaccgagctgcggcagcgggtggcccacgagcccgtggccccccccgaagacaaggagagcgaaagcgaggcgaaggttgacggggagaccgcctcagactctgaatcccgggcggagtccgctccacttccggtgtcggccgatgacactcctgaagtgttaaatagggccctgtcaaacctgtcttctcgatggaaaaactggtgggtcagaggcattttgactctggccatgatcgcttttttttttatcattatataccttggccccatggttttgatgatcatagtcatgtgtgtacagattaaatgcttccatgagatcatcacgataggatataacgtgtatcactcttatgacctgccatggtttaggactctatcctggtactttctcctatgtgtcaattacttcttctatggagaaactgtgactgattatttcttcaccttggtgcaacgggaagagcctcttcgtatcctttcaaaatatcatagatttatttcctttacactttatctgatcgggttctgtatgtttgttctgagcctggtcaaaaagcactacaggctgcaattctatatgtttggttggacacacgtaacccttctgattgtggtcacccagtcccacttagttatccataacctgtttgaaggtatgatttggttcatcgtccctatcagttgcgtcatctgcaatgacattatggcatacatgttcgggttcttctttggccgtactcctctgattaaactgtcacctaaaaaaacctgggagggcttcattgggggattttttgctactgtggtgttcggtttgttgctatcctacgttatgtccggctaccggtgttttgtgtgtcctgtcgaatacaacaacgacactaatagtttcactgtcgactgcgagccctccgacttgtttcgcctgcaggagtataacatccccggcgtgattcagtctgtgattggatggaagacagtgcgtatgtatccattccagattcactcaattgccctttccacttttgccagccttattggcccctttgggggatttttcgcgagtggatttaagagagcatttaagatcaaagacttcgccaatactatccctggacacggaggcatcatggacaggttcgattgccagtacctgatggctacattcgtcaatgtgtacatcgcgagttttatcagaggacctaacccatccaaactcattcagcaattcttaacactgagacccgatcagcagcttcacattttcaacacgctcagatcacatcttatcgacaagggcatgttgacctctactaccgaggatgagtag

SEQ ID NO: 141057 - DNA, 1338 bp, Artificial Sequence
  derived and/or modified sequence
atgacggaactgagacaacgggtcgcacacgagcctgtagctcccccagaggataaggagagtgagtctgaagctaaggtggatggggagaccgcgtcagatagcgaatctcgggctgaatcggctccactccccgtgtctgcagatgacacacctgaagtgctgaatagggcactcagcaatctttctagccggtggaaaaactggtgggtccgaggaattttgactctggctatgatcgcattctttttcattatcatttatctgggacctatggtgctgatgattatcgttatgtgcgtccaaataaagtgtttccacgagattataaccatagggtacaacgtgtaccacagttacgatctgccctggttccgaacactgagttggtactttctgctctgtgtcaactacttcttctacggagaaaccgttaccgattatttcttcaccctcgtgcaacgtgaagaacctttgcgaatcctgtctaagtaccaccgctttatttctttcacactatacttaatcggcttctgtatgtttgtcctctccctggtgaagaaacattaccgcctgcagttttacatgttcgggtggacccacgtcactctccttatcgtcgtcacccagagccatcttgtaattcacaatctgtttgaggggatgatctggttcatcgtaccaattagctgcgtcatttgcaacgatattatggcttatatgttcggattttttttcgggaggacacccttgattaaactgtctcccaagaagacctgggaaggtttcatcggaggcttctttgctaccgtggtgttcggtctcctgctttcctacgtgatgtccggctaccggtgcttcgtgtgccctgtggagtataacaatgataccaatagcttcaccgtggactgcgagccttcggatctgttccgactccaggagtataacatccccggtgtgattcagtccgtgatagggtggaagacagtgcggatgtacccattccaaattcactctatcgccctctccacattcgcaagcctaattggcccattcgggggattctttgccagcggcttcaaacgagcattcaagatcaaggatttcgctaataccattcctggacacggtggcatcatggataggttcgattgccagtaccttatggccacatttgtcaatgtgtatatcgcatcgtttatccgcggacctaacccctctaaattgattcagcagtttctcacgctgaggcccgaccagcagctgcacattttcaataccctgcgctctcatctcatagataagggcatgctgaccagcacaacagaggatgagtag

SEQ ID NO: 141058 - DNA, 9298 bp, Artificial Sequence
  derived and/or modified sequence
gaccgtgatggtggcgctgcgcgtgcgcactcgctccgagccctgctcccgggagagggagctctcgggtcggggctagggaaggctgaccccgctcggcccgggtgaaagggcggtgacggcactgggtggggccgagctccagggctggctgctgggctgctaagggaactgtgagccgctcagagccgcgcgcctcccgggcggggcggggccggccgtgggagtccgcgcgtgcccgcgccgagctgcctgctccggcggcttcgctgctagctcgcggcgacgtcgggccgattttcccaggatgacagagctgaggcagagggtggcccatgagccggttgcgccacccgaggacaaggagtcagagtcagaagcaaaggtagatggagagactgcatcggacagtgagagccgggcagaatccgcacccctgccagtctctgcagatgataccccggaggtcctcaatagggccctttccaacttgtcttcaagatggaagaactggtgggtgagaggcatcctgactttggccatgattgcatttttcttcatcatcatttacctgggaccaatggttttgatgataatcgtgatgtgcgttcagattaagtgtttccatgagataatcactattggctacaacgtctaccactcatatgatctgccctggttcaggacgctcagctggtactttctcctgtgtgtaaactatttcttctatggtgagacagtgacggattacttcttcaccctggtccagagagaagagcctttgcggattctcagtaaataccaccggttcatttcctttactctctatctaataggattctgcatgtttgtactgagtctggtcaagaagcattatcgactgcagttctacatgtttggctggacccatgtgacattgctgattgttgtaacacagtcacatcttgttatccacaacctatttgaaggaatgatctggttcattgtccccatatcttgtgtgatctgtaatgacatcatggcctatatgtttggctttttctttggtcggaccccactcatcaagctgtccccgaagaagacctgggaaggcttcattgggggcttctttgctactgtggtgtttggccttctgctgtcctatgtgatgtccgggtacagatgctttgtctgccctgtggagtacaacaatgacaccaacagcttcactgtggactgtgagccctcggacctgtttcgcctgcaggagtacaacattcctggggtgatccagtcagtcattggctggaaaacggtccggatgtaccccttccagattcacagcatcgctctctccacctttgcctcgctcattggcccctttggaggattcttcgcaagtggattcaaacgagcctttaaaatcaaagactttgccaataccattcctggccatggaggcatcatggatcgctttgactgccagtatctgatggccacctttgtcaatgtatacatcgccagttttatcagaggccctaacccaagcaaactgattcagcagttcctgactttacggccagatcagcagctccacatcttcaacacgctgcggtctcatctgatcgacaaagggatgctgacatccaccacagaggacgagtaggggccacccagggccaggagaacaggaacagaactgagcaggggcaggtctccaaggcaagcccagctggtgtgacttagacaatgacgaggcttcaactcactgtcttttttttttttttttggagggtattttttatttgtgggttcaaaaaatctgtatatacagtctatgtgtttagaatttgtgttgtaagtaaactacagctttgagttggaaagaagtcacgggttgtaaaaccatttggatttttttaaaacaaaagtattaataatctggaagacagtgttgcccaggtcaggagtgttttcttggtggttccagcccccatcaattgaactgtttctgggctcagtcagacacagacattcatctgtgtctgaccaaatcaggggacttccccacctgtggtgggaggcacagcttagatgttttgtacacctggtcttttctagaaatccctgcttggagctgcagaagggttgccttctgtaggtcggaggaatggaggcttactaaccaggtaagccttctatgcatccacaccaaaatcctgcagaatgtaagtaagctctgctttataagatgggttcaccttcatcgcagactgaaagtttcagtttttatttttttcagaaagcacgaaaaattatttataatagtctggagaaaaaacacactgtaatatttcaagtgtatgcagtagaatgtactgtaactgagccctttcccacatgtctaggctccaatgtctcctgtaggtccacctaactgtgtgttttcagggacaatgccatccatgtttgtgctgtagacttgctgctgctgaatcctttctggggactttctcatcgggcagggagcagagggcttctcgttcatgcaccctttgcctgaacacccatgtagctgctgtgttgtgtatatattactcttaagaggagtgtgtgtgtctgtgtttgttttaaaagtcacttatttcttacagtgatttcaattgcaccatgacttcttcactaaaaccacaaagtcctgcttaaaactatggaaaacctaacctgattagagccttgactattttgaagattaaatgcacactttttatataatgtgaccagtttaaatgtagtttgtattgtactgggggacctttcgttgttgttgtttgcttaaactgtgattttttttcccctccctaatttcaggggtgagattgactttgggaagacagattagttctttgtcaggccaacaagtgatggagtgcgggagagagaacttggcacccaaatatatcaaactattccgtgccgtggatgttttcattgccaacgagggtgtaatgatttgcttctgcaccttggtctagtgctggtttgtggtgtttttgtttgtaaattagcctcactgcctccctgaaagtgcacagtcagcccaggtctctagagtgtccagcagaggatggagccctcgggatgtttcagctcacacatccttgagtgacttcccatatgtgtgtggggctgaagcggcttctttccgctgaacttttatttccatttcagcctcgtggcttctcttattcaggtccaaggccccttaaaaacaaaacatattatcgcaagggctttcatttcagtattggctgtgtcactggcaggatgcatcactctccagggcctctttttcggagctactcccaattccactcttctgtgattctggctgagcaagttcatgccggtagaggctcattaagtgaggtcctgggcaccccccaaacaggaagtgttttcaggcccttacatgcttatccttaaggtgagtaggtatctcagcagcacacccgaacagtaaaggtgatcaataacgaaactgtagttttcagattgaagaatgaacctggatcaccaaactagataccgaaagggctcctcatttgtctcttttgtcccattgtgggcatatggtgggctccttgagaggagggagtctcagctggggcctggctgcagagacctgctcttgaatagggctgcctttgggatcagggagccgagcatactgggcaaggctcatcatgttcctttgtggaagtggttacttggtgggggtggggtggggaaggggggtctaggaagccgaagctgagtgcgcactagagctgctagcaggcaggccagagggtcagcttgtgttttattttctgatttctcctgcatgctttctggagatgaggattttttgtcaggtagctaggagagcactgccaccttgtgtccatatagcacaatgtttctctttcctattcacagacaagattcaagaaaccatttttacgtgtgtacattcaaatcttcatgaatggcatcacttgctttagacccattttttttttattggtcagaaataaaatgtgactgcaactgtgtgccctcccttgtcgtgaattccctgtttatcacttccatgcatggttttatgcttctcatttgtttatgtattcatgaatactgcatagtcctgattcagagacttttgctttgctttccaacttgtatccctacattctcacaacagccttcttacctcgggtgagagtcatgagcaccttaccaggcagggagcttccccaggatagtgtggtggagtcaggactcactccatcctgcactttacccacaggacacctggagggtcccccagccctgcttgcttttgtgaacgtcgtgtgagtacaccgaggtgttgcagctttccttccctctagctcaggaggcctggcctgagccaggttggagcttaaattgctgttggctcctgcctggtggaacaagggggtcatagaaaccagggctgatgggcaccccccagcccctgggagctctgctcatgaccgctcacagggtaccgagtctttgccttttgtgtgtgcgcatgctgccctcttaactgcttttagtattcagaaaggttccatttatgttttactcctgaaagtgaaaccctcttaggcaacttgtttcatattctgggcattttagtagctacagtattttgcatttaaaatgtaattactcttagtattgtacagccctataatgtatgagaactagtttcacatcctttgaaactaatctctttcattggggaggatacaacttttgactttacacaggtggactttgaatccatttttatagaatttttttccactgtaacttgacctatattatgcaagaaaatcccaaaaatatgttttaagggagactacacagaccttgtgatttggtctgagctagttgctgagttgactggagccttatttgaatggatctttgagttgagatcttcacactgtcagtgagcccttggctcagcccttgtcacctgtttgtatggggaccatgtttcccaaagctcaggttcatctccactattgacagagtcgggtagtgggagagtataagtgacttgagacagagtgtccttgctcagaaaactgtgaagcaggggtcttgttagttacaaagccagtcctagttgcatgtccaagggggtagattttcatcaccctactaaatgtggtatgtcactgctgaagccttttcctgttttagtaatatcttaggcactattgtcttttgtcttccagagtaacatatctgggcccacctttcttgcacactgtgattatgtgctaagaaaagggtggagttgggaggacaatttcacttgaacaggtttctgttcttctgaggtcagggtggggaggatgtccaggtgacttttatggacacattgcaagacagtaagccgcggatggactctcacttgtgctttggaacactggactccaaagagcaggtggaacaaactctggcctgaagatgatggctaatactcaggcagagccccgtattcttccctgacttggtcaaaacaaacttccttttcccttgatcaccctgcacgcagctgcccagcttccagtttttaaagagatgaacagctctcacttcctgactcagtttctcttgttgggtgggggccttgtgccacaacctgcatggggtgctagggtttaaaccaagtggtcacgaaggattcttatctcagggctctgcctggcccaccttctcttgggcctggactctccttatccacatccctgcagaaggtgggccctattctcagaagagtcctggctgctgttgccatctgaatgcgcccttccctttcaggttgaccagcagtggccttacctggcctctcaggtggatggaggctgttctcatctggggctgtctcttgattaaggctgtcacctgtttgtatagggaccatgtttcccaacgcactttgagtgcagtttaggaggtatcctttggatgctgaagtgttgggattttgaggacatgcggatgatttatgagaatagaggggcagagtttgtgaagtctagggttttttgtccagtgggtttcaaatttgttggctgtttaaagaccctgtctcctcccccaccctccccttccttttcccatcaaatgcctacctactgaggcgccttctctttttattcttgagccaatgagatatcagtgtgtttattaataaggattgcaatagtatagtgcttaatatgtgccaggcatagtgctaagggtttacatacgttatcccttttaatccagaaaacagcctttgattaggtattgttgtctccattttatagatgaggaaactgaggcagtatgactgaggccgagagcagtggttaagacagactttgggatcaaatcaccctaggtgcgggcaggtttctaggctgctctaagcttctaccttgaaggcagttgggtctgataatagtaccttcttcctggggtggttgtgaggatataacgaggtaatgcatgtaagcatttagtaccatgcctggcacatagtaagcactcaataaatggtagttacttttgttgagctcagctggtagtttgacctccgttggtgcaatgccagagatgggattgtcagccaccacactgccaccaccctgcacacagtctgggtccctccgagagaagcacgccaaccttaacatcccctacagcatcttggtgcttcacacaccatttaggaggccaccctaacgaggcaagaggacatgggggtgtgcagaagttctgttcttagtgagaatggctggcctgagaatccagctcacctcctctgcccacagtctggactgcttgtgggaaggccatctcctcctgtctggtggtacctccactctgggcagggagggcctgtctgtgactcgctctggaccccacttcccgctctggccaagggctgtcttctgtgcacatagctcaggagcctgcagcagttccctgtatgggtggatgtcctcaggggccaagaagagaagaatggggacaacagaaacctgctttgtaggggattatgtagactaaaagcctagaagttctgcccacatccttatgacgcagccaatctggagcttcatgtttccttctaaaagtagtaaccgggtagaagtgggtgacccattgaggacacatgatgtgaggtatttctgccggattctaggttagcaaagactcaaatgggtgactcatgaatgaagggagaacaggcacaggacttaatgaaaagagtttcttgaacttagttttctgaatgggggtggggagttggggcacgtgtgtgtaaggggaggctgcctcactttgaaggaatggtgttggctaacaggatccatgaaattcctaggtcagttgaataataactgaactactggtttgactgtggattatttcctgggtattagtgggacccaacagcacattgctattaatagtatggaaataatggtccctctgtttcattgaattgctgaagtaatgataatgccatgaaccaggagaagatggttgtgggggtttctaggaagcagctgctgtgacaggccaatcccaggcttgcccccgagccctcctgtccttctgggtttgtgtttgccttgcctggtgcttcctccctcattgtgttgttgaatagacctaggcagccttgtatccatagaaagcctccactgctgggccggggagggggttgtggtaagggccctctggaaatcaagcagagaatgcctttgcagtggtctcccgggcattgggcagggcctagccttttgcagcccccagaggaccttgcctgcataaagcactcagaagggttagccacctggtgattttgtctctagtgaaactgtgtttgccgataatcatccacatagccacctctgtcctcgcagtttggatgcctttttttgacacctgcgctaggttcttgtatgctggcttttcttaaaggaacagcagagtagaaaagaggttgagaatgttttctagcaggcagaatgtgcatacatgttttcatgagtgtcctttgggtgctgtttcttttaaatcctctgtgcacagggctctggcctttagtaaactgtttttctgtcttacgtcatgctgactgggtgctaggggctgattacaaaggggaagagttgaacagacatcaggggccgatgaaaccaaaggactaggagtcaggagaacaagtcagggattaggagacagcggtttggtttattgttatccagctggaggactcctaggggcagcagcaggaggaataccagggccacggaggggccaggagtctcacagtggagggcagactctaacagatgccagctgaacgctcgctggccctggatgtcatacgagttggggaccagaaatctgggctcagagaacccgtccagggagatttgaagccatgggttatcttctagagttgatactgataatatattttaatttttattgatgtttaataccttctgaaacaggagggtaagatcagatgggaagcccctctgttgaaggatcttgggaaccttggtggttttttttttttttttggttttttttttttgatcgagctgtggacatccttcttaattcgattctgaggatttgtttaactaaaaagttcccaaacacagaaagggcctccccacctgctttggggagctgtctgtgctgggagtgccaggcatcccatgggacccatcactgccagtgtctgtgcctcccagaggtcagccgtgtctgccctggctctgtctcctctgtgacagggcagagcatttctggtcagtttctccatggtgcctcccacccctttgtaaagtggatggacatgatggaattcagttgtctcaccctgatagcctgggtgttgatattcactttacccgcactcagacacaggcgaccttgaagcagttctcggtgtgtagagtccacgtgacagtccccacagcctccccagatagctgtgtgcctgtgcgctactgctgtgccattttcccaacttggcgtttcactaaatgcagctgatctctctctctgtgcactcgtgatccatgttgaacaatacatgtaggttctttttccacgcaatgtaagaacatgatatactgtacgttggaaagcatttaccttatttatatacctgaatgttcctactacacaaataaacatatattaaattcta

SEQ ID NO: 141059 - DNA, 1338 bp, Artificial Sequence
  derived and/or modified sequence
atgaccgagctgagacagagagtggcccacgagcccgtggccccccccgaggacaaggagagcgagagcgaggccaaggtggacggcgagaccgccagcgacagcgagagcagagccgagagcgcccccctgcccgtgagcgccgacgacacccccgaggtgctgaacagagccctgagcaacctgagcagcagatggaagaactggtgggtgagaggcatcctgaccctggccatgatcgccttcttcttcatcatcatctacctgggccccatggtgctgatgatcatcgtgatgtgcgtgcagatcaagtgcttccacgagatcatcaccatcggctacaacgtgtaccacagctacgacctgccctggttcagaaccctgagctggtacttcctgctgtgcgtgaactacttcttctacggcgagaccgtgaccgactacttcttcaccctggtgcagagagaggagcccctgagaatcctgagcaagtaccacagattcatcagcttcaccctgtacctgatcggcttctgcatgttcgtgctgagcctggtgaagaagcactacagactgcagttctacatgttcggctggacccacgtgaccctgctgatcgtggtgacccagagccacctggtgatccacaacctgttcgagggcatgatctggttcatcgtgcccatcagctgcgtgatctgcaacgacatcatggcctacatgttcggcttcttcttcggcagaacccccctgatcaagctgagccccaagaagacctgggagggcttcatcggcggcttcttcgccaccgtggtgttcggcctgctgctgagctacgtgatgagcggctacagatgcttcgtgtgccccgtggagtacaacaacgacaccaacagcttcaccgtggactgcgagcccagcgacctgttcagactgcaggagtacaacatccccggcgtgatccagagcgtgatcggctggaagaccgtgagaatgtaccccttccagatccacagcatcgccctgagcaccttcgccagcctgatcggccccttcggcggcttcttcgccagcggcttcaagagagccttcaagatcaaggacttcgccaacaccatccccggccacggcggcatcatggacagattcgactgccagtacctgatggccaccttcgtgaacgtgtacatcgccagcttcatcagaggccccaaccccagcaagctgatccagcagttcctgaccctgagacccgaccagcagctgcacatcttcaacaccctgagaagccacctgatcgacaagggcatgctgaccagcaccaccgaggacgagtag

SEQ ID NO: 141060 - protein, 540 aa, Artificial Sequence
  derived and/or modified sequence
MNGEAICSALPTIPYHKLADLRYLSRGASGTVSSARHADWRVQVAVKHLHIHTPLLDSERKDVLREAEILHKARFSYILPILGICNEPEFLGIVTEYMPNGSLNELLHRKTEYPDVAWPLRFRILHEIALGVNYLHNMTPPLLHHDLKTQNILLDNEFHVKIADFGLSKWRMMSLSQSRSSKSAPEGGTIIYMPPENYEPGQKSRASIKHDIYSYAVITWEVLSRKQPFEDVTNPLQIMYSVSQGHRPVINEESLPYDIPHRARMISLIESGWAQNPDERPSFLKCLIELEPVLRTFEEITFLEAVIQLKKTKLQSVSSAIHLCDKKKMELSLNIPVNHGPQEESCGSSQLHENSGSPETSRSLPAPQDNDFLSRKAQDCYFMKLHHCPGNHSWDSTISGSQRAAFCDHKTTPCSSAIINPLSTAGNSERLQPGIAQQWIQSKREDIVNQMTEACLNQSLDALLSRDLIMKEDYELVSTKPTRTSKVRQLLDTTDIQGEEFAKVIVQKLKDNKQMGLQPYPEILVVSRSPSLNLLQNKSM

SEQ ID NO: 141061 - DNA, 2584 bp, Artificial Sequence
  derived and/or modified sequence
gagctcgggcggccggagctggtcgctgcgcgcgccggggggagggccggggctgcgagagaggaagctctttcgcggcgctacggcgttggcaccagtctctagaaaagaagtcagctctggttcggagaagcagcggctggcgtgggccatccggggaatgggcgccctcgtgacctagtgttgcggggcaaaaagggtcttgccggcctcgctcgtgcaggggcgtatctgggcgcctgagcgcggcgtgggagccttgggagccgccgcagcagggggcacacccggaaccggcctgagcgcccgggaccatgaacggggaggccatctgcagcgccctgcccaccattccctaccacaaactcgccgacctgcgctacctgagccgcggcgcctctggcactgtgtcgtccgcccgccacgcagactggcgcgtccaggtggccgtgaagcacctgcacatccacactccgctgctcgacagtgaaagaaaggatgtcttaagagaagctgaaattttacacaaagctagatttagttacattcttccaattttgggaatttgcaatgagcctgaatttttgggaatagttactgaatacatgccaaatggatcattaaatgaactcctacataggaaaactgaatatcctgatgttgcttggccattgagatttcgcatcctgcatgaaattgcccttggtgtaaattacctgcacaatatgactcctcctttacttcatcatgacttgaagactcagaatatcttattggacaatgaatttcatgttaagattgcagattttggtttatcaaagtggcgcatgatgtccctctcacagtcacgaagtagcaaatctgcaccagaaggagggacaattatctatatgccacctgaaaactatgaacctggacaaaaatcaagggccagtatcaagcacgatatatatagctatgcagttatcacatgggaagtgttatccagaaaacagccttttgaagatgtcaccaatcctttgcagataatgtatagtgtgtcacaaggacatcgacctgttattaatgaagaaagtttgccatatgatatacctcaccgagcacgtatgatctctctaatagaaagtggatgggcacaaaatccagatgaaagaccatctttcttaaaatgtttaatagaacttgaaccagttttgagaacatttgaagagataacttttcttgaagctgttattcagctaaagaaaacaaagttacagagtgtttcaagtgccattcacctatgtgacaagaagaaaatggaattatctctgaacatacctgtaaatcatggtccacaagaggaatcatgtggatcctctcagctccatgaaaatagtggttctcctgaaacttcaaggtccctgccagctcctcaagacaatgattttttatctagaaaagctcaagactgttattttatgaagctgcatcactgtcctggaaatcacagttgggatagcaccatttctggatctcaaagggctgcattctgtgatcacaagaccactccatgctcttcagcaataataaatccactctcaactgcaggaaactcagaacgtctgcagcctggtatagcccagcagtggatccagagcaaaagggaagacattgtgaaccaaatgacagaagcctgccttaaccagtcgctagatgcccttctgtccagggacttgatcatgaaagaggactatgaacttgttagtaccaagcctacaaggacctcaaaagtcagacaattactagacactactgacatccaaggagaagaatttgccaaagttatagtacaaaaattgaaagataacaaacaaatgggtcttcagccttacccggaaatacttgtggtttctagatcaccatctttaaatttacttcaaaataaaagcatgtaagtgactgtttttcaagaagaaatgtgtttcataaaaggatatttatatctctgttgctttgactttttttatataaaatccgtgagtattaaagctttattgaaggttctttgggtaaatattagtctccctccatgacactgcagtattttttttaattaatacaagtaaaaagtttgaattttgctacatagttcaatttttatgtctcttttgttaacagaaaccacttttaaaggatagtaattattcttgtttataacagtgccttaaggtatgatgtatttctgatggaagccattttcacattcatgttcttcatggattatttgttacttgtctaagatgcaatttgattttatgaagtatataccctttacccaccagagacagtacagaatccctgccctaaaatcccaggcttaattgccctacaaagggttattaatttaaaactccattattaggattacattttaaagttttatttatgaattccctttaaaaatgatatttcaaaggtaaaacaatacaatataaagaaaaaaataaatatattaataccggcttcctgtccccatttttaacctcagccttccctactgtcaccaacaaccaagctaaataaagtcaacagcctgatgtgt

SEQ ID NO: 141062 - DNA, 1740 bp, Artificial Sequence
  derived and/or modified sequence
gttggcaccagtctctagaaaagaagtcagctctggttcggagaagcagcggctggcgtgggccatccggggaatgggcgccctcgtgacctagtgttgcggggcaaaaagggtcttgccggcctcgctcgtgcaggggcgtatctgggcgcctgagcgcggcgtgggagccttgggagccgccgcagcagggggcacacccggaaccggcctgagcgcccgggaccatgaacggggaggccatctgcagcgccctgcccaccattccctaccacaaactcgccgacctgcgctacctgagccgcggcgcctctggcactgtgtcgtccgcccgccacgcagactggcgcgtccaggtggccgtgaagcacctgcacatccacactccgctgctcgacagaaaactgaatatcctgatgttgcttggccattgagatttcgcatcctgcatgaaattgcccttggtgtaaattacctgcacaatatgactcctcctttacttcatcatgacttgaagactcagaatatcttattggacaatgaatttcatgttaagattgcagattttggtttatcaaagtggcgcatgatgtccctctcacagtcacgaagtagcaaatctgcaccagaaggagggacaattatctatatgccacctgaaaactatgaacctggacaaaaatcaagggccagtatcaagcacgatatatatagctatgcagttatcacatgggaagtgttatccagaaaacagccttttgaagatgtcaccaatcctttgcagataatgtatagtgtgtcacaaggacatcgacctgttattaatgaagaaagtttgccatatgatatacctcaccgagcacgtatgatctctctaatagaaagtggatgggcacaaaatccagatgaaagaccatctttcttaaaatgtttaatagaacttgaaccagttttgagaacatttgaagagataacttttcttgaagctgttattcagctaaagaaaacaaagttacagagtgtttcaagtgccattcacctatgtgacaagaagaaaatggaattatctctgaacatacctgtaaatcatggtccacaagaggaatcatgtggatcctctcagctccatgaaaatagtggttctcctgaaacttcaaggtccctgccagctcctcaagacaatgattttttatctagaaaagctcaagactgttattttatgaagctgcatcactgtcctggaaatcacagttgggatagcaccatttctggatctcaaagggctgcattctgtgatcacaagaccactccatgctcttcagcaataataaatccactctcaactgcaggaaactcagaacgtctgcagcctggtatagcccagcagtggatccagagcaaaagggaagacattgtgaaccaaatgacagaagcctgccttaaccagtcgctagatgcccttctgtccagggacttgatcatgaaagaggactatgaacttgttagtaccaagcctacaaggacctcaaaagtcagacaattactagacactactgacatccaaggagaagaatttgccaaagttatagtacaaaaattgaaagataacaaacaaatgggtcttcagccttacccggaaatacttgtggtttctagatcaccatctttaaatttacttcaaaataaaagcatgtaagtgactgtttttcaagaagaaatgtgtttcataaaaggatattt

SEQ ID NO: 141063 - DNA, 1623 bp, Artificial Sequence
  derived and/or modified sequence
atgaacggggaggccatctgctctgccctccccactataccatatcataaactcgcagatttgcgctatttgtccaggggtgcctcgggaactgtatcttctgcccgtcatgcagactggcgtgtccaggttgcagtaaagcatctgcacattcacacacctctgctcgattctgagcgcaaggatgtgctgcgggaggccgagattctgcacaaagcaaggttctcatatatcctgcccatcttgggtatatgtaatgaacctgagttcttaggcatcgttactgaatacatgcctaacggctcgctgaacgagctccttcaccgaaaaaccgaatatcctgacgtggcttggccactgaggttccgcatcctccacgaaattgccttaggcgtgaactacctgcataatatgaccccccctcttttgcaccacgacctgaagacacagaatatactgctggataatgagtttcacgtgaagatcgctgatttcggattatcgaagtggaggatgatgtctcttagccagtctagatcatcgaagagcgccccagagggtggtacgatcatctacatgcctccagagaactatgagcccggacaaaagagcagagcctccatcaagcatgacatttatagctacgccgtaataacctgggaggtgctgtccaggaagcaaccgtttgaggacgttactaatcctctgcagattatgtatagtgtatctcaaggacaccggcctgtaatcaacgaggagtcactgccttacgacatccctcaccgggctaggatgatcagccttatagagagcggttgggcacagaatccggatgaacgtcccagcttcctgaaatgcctcattgaactggaacctgttctgagaactttcgaggagattacctttctcgaagctgtaattcagttaaagaagactaagctgcagtccgtttcttcagcgatccacctgtgcgacaagaaaaagatggagctgtcacttaatatacccgtgaaccacgggccacaggaggagtcatgcggatcttcccagctgcatgaaaactcggggagccccgagaccagtcgctccctccctgcccctcaggacaatgactttctgtcaaggaaagcacaggattgttattttatgaaactgcatcactgcccaggtaaccactcatgggatagcacaatttcaggttcccagcgcgcagccttctgcgatcataaaactacaccctgttcctccgcaatcatcaacccactgagcactgccggtaacagcgaacgcttgcagcccggtatcgcccagcagtggatacagagcaaaagggaggacattgtaaatcagatgactgaggcttgcctcaatcaaagcctagacgctctgctgtctcgggatctcataatgaaggaggactacgagctcgtgtccaccaagccaaccaggacaagtaaggtgcggcaattattagatacaaccgacatacaaggcgaggagtttgcaaaggtcatagtccagaagctaaaagacaacaaacaaatgggtctgcagccatacccggaaattctggtcgtgtctcgaagtcctagcctcaacctgttacagaacaaatctatgtag

SEQ ID NO: 141064 - DNA, 1623 bp, Artificial Sequence
  derived and/or modified sequence
atgaacggcgaggccatctgcagcgccctgcccaccatcccctaccacaagctggccgacctgagatacctgagcagaggcgccagcggcaccgtgagcagcgccagacacgccgactggagagtgcaggtggccgtgaagcacctgcacatccacacccccctgctggacagcgagagaaaggacgtgctgagagaggccgagatcctgcacaaggccagattcagctacatcctgcccatcctgggcatctgcaacgagcccgagttcctgggcatcgtgaccgagtacatgcccaacggcagcctgaacgagctgctgcacagaaagaccgagtaccccgacgtggcctggcccctgagattcagaatcctgcacgagatcgccctgggcgtgaactacctgcacaacatgaccccccccctgctgcaccacgacctgaagacccagaacatcctgctggacaacgagttccacgtgaagatcgccgacttcggcctgagcaagtggagaatgatgagcctgagccagagcagaagcagcaagagcgcccccgagggcggcaccatcatctacatgccccccgagaactacgagcccggccagaagagcagagccagcatcaagcacgacatctacagctacgccgtgatcacctgggaggtgctgagcagaaagcagcccttcgaggacgtgaccaaccccctgcagatcatgtacagcgtgagccagggccacagacccgtgatcaacgaggagagcctgccctacgacatcccccacagagccagaatgatcagcctgatcgagagcggctgggcccagaaccccgacgagagacccagcttcctgaagtgcctgatcgagctggagcccgtgctgagaaccttcgaggagatcaccttcctggaggccgtgatccagctgaagaagaccaagctgcagagcgtgagcagcgccatccacctgtgcgacaagaagaagatggagctgagcctgaacatccccgtgaaccacggcccccaggaggagagctgcggcagcagccagctgcacgagaacagcggcagccccgagaccagcagaagcctgcccgccccccaggacaacgacttcctgagcagaaaggcccaggactgctacttcatgaagctgcaccactgccccggcaaccacagctgggacagcaccatcagcggcagccagagagccgccttctgcgaccacaagaccaccccctgcagcagcgccatcatcaaccccctgagcaccgccggcaacagcgagagactgcagcccggcatcgcccagcagtggatccagagcaagagagaggacatcgtgaaccagatgaccgaggcctgcctgaaccagagcctggacgccctgctgagcagagacctgatcatgaaggaggactacgagctggtgagcaccaagcccaccagaaccagcaaggtgagacagctgctggacaccaccgacatccagggcgaggagttcgccaaggtgatcgtgcagaagctgaaggacaacaagcagatgggcctgcagccctaccccgagatcctggtggtgagcagaagccccagcctgaacctgctgcagaacaagagcatgtag

SEQ ID NO: 141065 - DNA, 1623 bp, Artificial Sequence
  derived and/or modified sequence
atgaatggggaggctatttgtagtgcacttcccacaatcccgtaccacaagctggccgatctgcggtatctctcgaggggagcgtctggcactgtctcctccgcccggcacgccgattggcgggtgcaggtggccgttaagcacctacatattcacaccccattgctggatagcgagagaaaggatgtcctgagagaagctgagatcttacataaagcaagatttagctatattctgcccatcctgggaatatgtaacgagccagaattcctcggaattgtgacggagtacatgccaaatggttcactgaacgagctgttgcaccggaaaacagagtacccggatgtcgcgtggcccctgcgcttcaggatcctgcatgagatcgccctgggcgtgaattacctccataacatgacccctcccctcctgcaccatgatctcaaaacccagaatatcttattagataacgagttccacgtcaaaatcgccgactttggcctctctaaatggcgaatgatgagtttgtcccagagcaggagcagtaaaagcgcacccgaaggtggtacaatcatctacatgccgcctgaaaactacgagccaggacaaaagtctcgcgcatcaattaagcatgacatctatagttatgccgttataacctgggaggtgctttctcggaagcagccttttgaggacgtgacgaatccgctgcagatcatgtattcagtgagccagggacaccgacctgtgatcaatgaagagagcctgccatatgatattccgcatcgcgcgcgcatgatcagcctcatcgagtcagggtgggcccaaaatcccgacgaaagaccctcattcctaaagtgtcttatcgagttagaacctgtcttgcgaacgttcgaagagatcacatttctagaggcagttattcagctaaaaaaaacaaagctacagtctgtttcgtccgccatacacctgtgtgataagaagaagatggagttaagtctgaatatacctgtaaaccacggccctcaagaggaatcctgtggtagttctcagctgcacgaaaactcaggcagtcccgagacctctaggtccctccccgcccctcaggacaacgactttctcagccggaaagcgcaggattgttactttatgaagctgcatcattgcccaggcaatcattcctgggattccacaataagtgggagtcagagggcggccttttgcgaccataaaacgactccctgctcctcagccatcatcaatccactttcaaccgcggggaatagcgagcggctgcagccaggcattgctcaacaatggattcagtctaagagggaggacattgttaatcagatgactgaagcatgtttgaatcaatcattggacgcactgctctctcgcgacttgataatgaaagaggattatgagctagtatccacaaagccgacccgtacaagcaaggtgaggcagctgttagatacaacagacattcagggcgaagaatttgcaaaagttatcgtccagaaacttaaggacaacaagcagatggggttgcagccctatcccgagatattagtagtgtccaggagcccatcactgaacctcctgcagaacaaatcaatgtag

SEQ ID NO: 141066 - DNA, 1623 bp, Artificial Sequence
  derived and/or modified sequence
atgaatggagaggccatctgcagcgccctgcccaccatcccctaccacaagctggccgacctgcgctacctgagcagaggagccagcggcaccgtgagcagcgcccggcatgctgactggagggtgcaggtggccgtgaagcacctgcacatccacacccccctgctggacagcgagaggaaggatgtgctgcgggaggccgagatcctgcacaaggcccgcttctcctacatcctgcccatcctgggcatctgcaatgaacctgagttcctgggcatcgtgacagagtacatgcccaacggcagcctgaatgagctgctgcacaggaagacagagtacccagatgtggcctggcccctgcgcttccgcatcctgcacgagatcgccctgggcgtgaactacctgcacaacatgaccccacccctgctgcaccacgacctgaagacccagaacatcctgctggacaatgagttccacgtgaagattgctgactttggcctgagcaagtggaggatgatgagcctgagccagagccgcagcagcaagagcgcccctgagggcggcaccatcatctacatgcctcctgagaactatgagcccggccagaagagccgggccagcatcaagcatgacatctacagctatgctgtgatcacctgggaggtgctgagcaggaagcagccctttgaagatgtgaccaaccccctgcagatcatgtacagcgtgtcccagggccacaggcctgtgatcaatgaggagagcctgccctatgacatcccccaccgggccaggatgatcagcctgattgaaagtggctgggcccagaacccagatgagcggcccagcttcctgaagtgcctgattgagctggagcctgtgctgcggacctttgaggagatcaccttcctggaggccgtcatccagctgaagaagaccaagctgcagagcgtgtcctctgccatccacctgtgtgacaagaagaagatggagctgagcctgaacatccctgtgaaccacggcccccaggaggagagctgtggcagcagccagctgcatgaaaattctggcagccctgagaccagccgcagcctgcctgccccccaggacaatgacttcctgagcaggaaggcccaggactgctacttcatgaagctgcaccactgccccggcaaccacagctgggacagcaccatcagcggcagccagagagctgccttctgtgaccacaagaccaccccctgcagcagcgccatcatcaaccccctgagcacagctggcaacagcgagcggctgcagcccggcatcgcccagcagtggatccagagcaagagagaagatattgtgaaccagatgacagaggcctgcctgaaccagagcctggatgccctgctgagccgggacctgatcatgaaggaggactatgagctggtgtccaccaagcccaccaggaccagcaaggtgcggcagctgctggacaccacagacatccagggcgaggagtttgccaaggtgattgtgcagaagctgaaggacaacaagcagatgggcctgcagccctacccagagatcctggtggtgagccgcagccccagcctgaacctgctgcagaacaagtccatgtag

SEQ ID NO: 141067 - DNA, 1623 bp, Artificial Sequence
  derived and/or modified sequence
atgaacggcgaggccatctgcagcgccctgcccaccatcccctaccataagttggccgatttacgctatctgagcagaggcgcgtccggaaccgtgtcttcagctcgccacgccgactggagagtgcaggtggcggtgaagcacctacacatacacacaccactgcttgatagcgagaggaaggacgtccttagggaggctgagattctgcacaaggcacgatttagctatatcctgcctatcttgggtatctgcaatgagcctgagttcctcggtatagtgacagagtatatgcccaacgggagtcttaatgagctgctgcatcggaagacggagtatccagatgtcgcttggcctctcagatttcggattctgcacgaaatcgcactgggagtgaactatcttcataatatgaccccgcccctgttacaccacgacctgaaaacacagaacattcttcttgacaatgaatttcacgtgaagatcgccgattttggcctgagcaaatggagaatgatgtcattgtcccagtcgaggtcttcaaagagcgcacccgagggaggaacaattatctatatgcctcccgaaaattatgagcctggccagaagtccagagccagtattaaacatgatatatattcctatgccgtcattacctgggaggtcctctccagaaagcaaccattcgaagacgtgacaaaccccctccagatcatgtactcagtctcacaagggcatcggcctgtgattaatgaagagtcacttccgtatgacatcccccatagggccaggatgatctcactcatcgagtcaggctgggcccagaaccccgatgaacgacccagtttcctgaagtgtttgatcgagctggagccagttctgagaacctttgaagagattaccttcctcgaagctgtgatccagttaaagaaaacaaagctgcagtctgtctcaagcgcgatccatctgtgcgataagaagaaaatggagctgagcctgaatataccggttaaccacgggcctcaggaggaaagttgtgggtcaagtcagctgcacgagaattccggtagccccgagacttctcgctctttgccagctcctcaggacaatgacttcctgagccgcaaggcccaggattgctacttcatgaagcttcaccactgtccaggtaatcattcatgggactccacaattagcggcagccaaagggcggcattttgtgaccacaaaactactccctgtagctccgctattatcaacccattatctaccgccggcaactcggagcggttacagcctgggatcgctcaacagtggatccagagcaagagagaagacattgttaatcagatgacagaggcctgtctgaatcagagcctcgatgctctgctctctcgtgacctcataatgaaggaggattacgagctggtaagcactaaacctacacgtaccagtaaagtccgccaactgcttgacacaactgatatccagggggaggagtttgctaaagtaatcgtgcagaagctaaaggacaacaaacagatgggactccagccatatcccgagatccttgtcgtctcccgcagcccatctcttaatctgttacaaaacaagagcatgtag

SEQ ID NO: 141068 - protein, 323 aa, Artificial Sequence
  derived and/or modified sequence
DLEELCPVCGDKVSGYHYGLLTCESCKGFFKRTVQNNKRYTCIENQNCQIDKTQRKRCPYCRFQKCLSVGMKLEAVRADRMRGGRNKFGPMYKRDRALKQQKKALIRANGLKLEAMSQVIQAMPSDLTISSAIQNIHSASKGLPLNHAALPPTDYDRSPFVTSPISMTMPPHGSLQGYQTYGHFPSRAIKSEYPDPYTSSPESIMGYSYMDSYQTSSPASIPHLILELLKCEPDEPQVQAKIMAYLQQEQANRSKHEKLSTFGLMCKMADQTLFSIVEWARSSIFFRELKGLTLSPSLECSGSWLMATSTSCIQVIRLPQPPE

SEQ ID NO: 141069 - protein, 495 aa, Artificial Sequence
  derived and/or modified sequence
MSSNSDTGDLQESLKHGLTPIVSQFKMVNYSYDEDLEELCPVCGDKVSGYHYGLLTCESCKGFFKRTVQNNKRYTCIENQNCQIDKTQRKRCPYCRFQKCLSVGMKLEAVRADRMRGGRNKFGPMYKRDRALKQQKKALIRANGLKLEAMSQVIQAMPSDLTISSAIQNIHSASKGLPLNHAALPPTDYDRSPFVTSPISMTMPPHGSLQGYQTYGHFPSRAIKSEYPDPYTSSPESIMGYSYMDSYQTSSPASIPHLILELLKCEPDEPQVQAKIMAYLQQEQANRSKHEKLSTFGLMCKMADQTLFSIVEWARSSIFFRELKVDDQMKLLQNCWSELLILDHIYRQVVHGKEGSIFLVTGQQVDYSIIASQAGATLNNLMSHAQELVAKLRSLQFDQREFVCLKFLVLFSLDVKNLENFQLVEGVQEQVNAALLDYTMCNYPQQTEKFGQLLLRLPEIRAISMQAEEYLYYKHLNGDVPYNNLLIEMLHAKRA

SEQ ID NO: 141070 - protein, 21 aa, Artificial Sequence
  derived and/or modified sequence
MSSNSDTGDLQESLKHGLTPI

SEQ ID NO: 141071 - protein, 469 aa, Artificial Sequence
  derived and/or modified sequence
MVNYSYDEDLEELCPVCGDKVSGYHYGLLTCESCKGFFKRTVQNNKRYTCIENQNCQIDKTQRKRCPYCRFQKCLSVGMKLEAVRADRMRGGRNKFGPMYKRDRALKQQKKALIRANGLKLEAMSQVIQAMPSDLTISSAIQNIHSASKGLPLNHAALPPTDYDRSPFVTSPISMTMPPHGSLQGYQTYGHFPSRAIKSEYPDPYTSSPESIMGYSYMDSYQTSSPASIPHLILELLKCEPDEPQVQAKIMAYLQQEQANRSKHEKLSTFGLMCKMADQTLFSIVEWARSSIFFRELKVDDQMKLLQNCWSELLILDHIYRQVVHGKEGSIFLVTGQQVDYSIIASQAGATLNNLMSHAQELVAKLRSLQFDQREFVCLKFLVLFSLDVKNLENFQLVEGVQEQVNAALLDYTMCNYPQQTEKFGQLLLRLPEIRAISMQAEEYLYYKHLNGDVPYNNLLIEMLHAKRA

SEQ ID NO: 141072 - DNA, 4916 bp, Artificial Sequence
  derived and/or modified sequence
aaaaagtacagagtccagggaaagacttgcttgtaactttatgaattctggatttttttttttcctttgctttttcttaactttcactaagggttactgtagtctgatgtgtccttcccaaggccacgaaatttgacaagctgcacttttcttttgctcaatgatttctgctttaagccaaagaactgcctataatttcactaagaatgtcttctaattcagatactggggatttacaagagtctttaaagcacggacttacacctattgtgtctcaatttaaaatggtgaattactcctatgatgaagatctggaagagctttgtcccgtgtgtggagataaagtgtctgggtaccattatgggctcctcacctgtgaaagctgcaagggattttttaagcgaacagtccaaaataataaaaggtacacatgtatagaaaaccagaactgccaaattgacaaaacacagagaaagcgttgtccttactgtcgttttcaaaaatgtctaagtgttggaatgaagctagaagctgtaagggccgaccgaatgcgtggaggaaggaataagtttgggccaatgtacaagagagacagggccctgaagcaacagaaaaaagccctcatccgagccaatggacttaagctagaagccatgtctcaggtgatccaagctatgccctctgacctgaccatttcctctgcaattcaaaacatccactctgcctccaaaggcctacctctgaaccatgctgccttgcctcctacagactatgacagaagtccctttgtaacatcccccattagcatgacaatgccccctcacggcagcctgcaaggttaccaaacatatggccactttcctagccgggccatcaagtctgagtacccagacccctataccagctcacccgagtccataatgggctattcatatatggatagttaccagacgagctctccagcaagcatcccacatctgatactggaacttttgaagtgtgagccagatgagcctcaagtccaggctaaaatcatggcctatttgcagcaagagcaggctaaccgaagcaagcacgaaaagctgagcacctttgggcttatgtgcaaaatggcagatcaaactctcttctccattgtcgagtgggccaggagtagtatcttcttcagagaacttaaggttgatgaccaaatgaagctgcttcagaactgctggagtgagctcttaatcctcgaccacatttaccgacaagtggtacatggaaaggaaggatccatcttcctggttactgggcaacaagtggactattccataatagcatcacaagccggagccaccctcaacaacctcatgagtcatgcacaggagttagtggcaaaacttcgttctctccagtttgatcaacgagagttcgtatgtctgaaattcttggtgctctttagtttagatgtcaaaaaccttgaaaacttccagctggtagaaggtgtccaggaacaagtcaatgccgccctgctggactacacaatgtgtaactacccgcagcagacagagaaatttggacagctacttcttcgactacccgaaatccgggccatcagtatgcaggctgaagaatacctctactacaagcacctgaacggggatgtgccctataataaccttctcattgaaatgttgcatgccaaaagagcataagttacaacccctaggagctctgctttcaaaacaaaaagagattgggggagtggggagggggaagaagaacaggaagaaaaaaagtactctgaactgctccaagtaacgctaattaaaaacttgctttaaagatattgaatttaaaaaggcataataatcaaatacttaatagcaaataaatgatgtatcagggtatttgtattgcaaactgtgaatcaaaggcttcacagccccagaggattccatataaaagacattgtaatggagtggattgaactcacagatggataccaacacggtcagaagaaaaacggacagaacggttcttgtatatttaaactgatctccactatgaagaaatttaggaactaatcttattaattaggcttatacagcgggggatttgagcttacaggattcctccatggtaaagctgaactgaaacaattctcaagaatgcatcagctgtacctacaatagcccctccctcttcctttgaaggccccagcacctctgccctgtggtcaccgaatctgtactaaggacctgtgttcagccacacccagtggtagctccaccaaatcatgaacagcctaattttgagtgtctgtgtcttagacctgcaaacagctaataggaaattctattaatatgttagcttgccattttaaatatgttctgagggttgttttgtctcgtgttcatgatgttaagaaaatgcaggcagtatccctcatcttatgtaagtgtgaattaatattaagggaaatgactacaaactttcaaagcaaatgctccatagctaaagcaacttagaccttatttctgctactgttgctgaaatgtggctttggcattgttggatttcataaaaaatttctggcaggaagtcttgttagtatacatcagtctttttcatcatccaagtttgtagttcatttaaaaatacaacattaaacacattttgctaggatgtcaaatagtcacagttctaagtagttggaaacaaaattgacgcatgttaatctatgcaaagagaaaggaaaggatgaggtgatgtattgactcaaggttcattcttgctgcaattgaacatcctcaagagttgggatggaaatggtgatttttacatgtgtcctggaaagatattaaagtaattcaaatcttccccaaaggggaaaggaagagagtgatactgacctttttaagtcatagaccaaagtctgctgtagaacaaatatgggaggacaaagaatcgcaaattcttcaaatgactattatcagtattattaacatgcgatgccacaggtatgaaagtcttgccttatttcacaattttaaaaggtagctgtgcagatgtggatcaacatttgtttaaaataaagtattaatactttaaagtcaaataagatatagtgtttacattctttaggtcctgaggggcagggggatctgtgatataacaaaatagcaaaagcggtaatttccttaatgttatttttctgattggtaattatttttaacagtacttaattattctatgtcgtgagacactaaaatcaaaaacgggaatctcatttagactttaatttttttgagattatcggcggcacaatcactttgtagaaactgtaaaaaataaaagtatctcctagtcccttaattttttcataaatatttctggcttttgagtagtgtatttatattgtatatcatactttcaactgtagacaattatgatgctaatttattgtttcttggtttcacctttgtataagatatagccaagactgaagaaaccaaatatatgtgtttactgtagcatgtcttcaaattagtggaacttagttcagggacatagaagagtcttaatgaattaaaatcattcacttgattaaatgtctgtaaatcttcatcattcctactgtagtttatttaatatctattgtaaattatgtgacttgtagcttcctctggttttcaagtaaactcaacaaggtggagtcttacctggttttcctttccaagcattgtaaattgtataccaaagatattagttattacttctgtgtgtacaaagaggattattttattatgtttattaatcacctctaatactcatccacatgaagggtacacattaggtaagctgggcgttgactcatgcgcagtctcagtcacccgtgttatcttcgtggctcaaaggacaatgcaaaatcgccgatcagagctcatacccaaagcattacagagaacagcagcatcattgccctccccagctgaaaaacaagttggctagaagatacatggagaggaatggtgtggtcaacagttaatgaaacggttctatcatgcatgtgtaatgtggatggagacaattataagatttgactataactatttggagggtctttaacattgccaaaaaaacaaatatgttgatttttattttattttattttttattttaagaggcgggatcttgatctcacatgttgcccaggctggccttgaactcctgggctcaagcattcctcctgcctcagcctcccccatagctgggactaggggtgcatgccagcatacctggctacgttgactcttaaaatctatgttctcttattttaaagatacagtgctccccactgaaaattaaacctaaaaaatgtcacatattggtatgttgttaacctggtagattaaatcatgagaatgattagaaagacgggcaacacagcgggttacatccacactgctgatcacaccaacgacaggagctgataagcaagaaagcgtcacagccagcgtctgttcacccaaggttgacaagtgaagtttctctaatgttgattgttagccgatttgtaacctggcatttacttagcaactgccttatcaattacaggatttgccggtaaaagcagactcaaatataaaggtttttggcttaacttggtttattatagttgctctatgtttgtaaacagacaatctctaatgtctgattatttgtatcacagatctgcagctgccttggacttgaatccatgcaatgtttagagtgtgaagtcagttacttgttgatgttttcttactgtatcaatgaaatacatattgtcatgtcagttcttgccaggaacttctcaacaaaatggaattttttttttcagtatttcaataaatattgatatgcccagcctgataatttttaaaaaaaaaaaa

SEQ ID NO: 141073 - DNA, 1488 bp, Artificial Sequence
  derived and/or modified sequence
atgtcatcaaattccgatactggcgatctgcaggaaagcctcaagcatggtttaactccgatcgtctcccagtttaaaatggtaaactactcctatgacgaagacctggaagaattatgccctgtttgcggagataaggtgagcggataccattatgggctgcttacatgcgagagttgtaaaggattcttcaaaaggacagtgcagaataacaagagatatacgtgtattgagaatcaaaactgccaaatcgataaaacacagagaaaacgctgcccatattgtcgctttcagaagtgtttgagcgttgggatgaagctggaggcagtgagagccgataggatgcgtggaggaaggaacaagtttgggccaatgtataagcgcgaccgcgcattaaagcagcagaaaaaagcactgatccgcgcaaacgggctgaagctcgaggcaatgagtcaggtcatacaagccatgccttctgatctgaccatctcctccgccatacagaatatccatagcgcttctaagggcttgcccctcaatcacgccgcactccctcccacggactacgatcggagtcccttcgtgacttccccaatctctatgactatgccaccccacgggtcattgcagggataccagacctacggacattttccatcaagggctattaaaagtgagtaccccgacccatacacgagttcacctgagtccattatgggttattcctacatggactcctaccaaacttcctcaccagcttctattcctcacttgattttggagttgctcaaatgcgagcccgatgaaccacaggtacaggctaagatcatggcatacttacagcaagaacaggccaatcggtccaaacacgagaaactctcgactttcggcctgatgtgtaagatggccgaccagaccctattctccatcgtagagtgggcccgcagttcgatctttttccgggaactcaaagtggacgatcagatgaaactcctccagaactgttggagcgagcttctgatccttgaccacatctataggcaagtggtgcatgggaaggagggatctatattcctggtgactggccaacaggttgactactctatcatcgcctctcaggcaggcgccactctgaataatttgatgagccacgcacaggagctcgtggcaaagctgagatcccttcagttcgatcagcgggagtttgtgtgtttaaagttcttggtgcttttcagcctggacgttaagaacctagagaattttcaactggtcgagggcgtgcaagagcaagtgaatgccgccctgttggattatacaatgtgcaactatccacagcagacggagaagtttgggcagctgctcctaagactcccagagatcagagcaatatcaatgcaggcagaggaatacctgtactacaaacatctgaatggcgatgtgccttataacaatctcctgatagaaatgcttcacgctaagcgtgcttag

SEQ ID NO: 141074 - DNA, 1488 bp, Artificial Sequence
  derived and/or modified sequence
atgagcagcaacagcgacacaggagacctgcaggagagcctgaagcacggcctgacccccatcgtgtcccagttcaagatggtgaactacagctatgatgaggacctggaggagctgtgccctgtgtgtggggacaaggtgtctggctaccactacggcctgctgacctgtgagagctgcaagggcttcttcaagaggacagtgcagaacaacaagcgctacacctgcatcgagaaccagaactgccagattgacaagacccagaggaagcgctgcccctactgccgcttccagaagtgcctgtctgtgggcatgaagctggaggccgtgcgggctgacaggatgagaggaggaagaaacaagtttggccccatgtacaagagggaccgggccctgaagcagcagaagaaggccctgatccgggccaacggcctgaagctggaggccatgagccaggtgatccaggccatgcccagcgacctgaccatcagcagcgccatccagaacatccacagcgccagcaagggcctgcccctgaaccacgccgccctgcccccaacagattatgacaggagcccctttgtgaccagccccatctccatgaccatgccaccccacggcagcctgcagggctaccagacctacggccacttccccagccgggccatcaagtctgagtacccagacccctacaccagcagccctgagagcatcatgggctacagctacatggacagctaccagaccagcagccctgccagcatcccccacctgatcctggagctgctgaagtgtgagccagatgagccccaggtgcaggccaagatcatggcctacctgcagcaggagcaggccaacagaagcaagcatgagaagctgagcaccttcggcctgatgtgcaagatggctgaccagaccctcttcagcatcgtggagtgggcccggagcagcatcttcttccgggagctgaaggtggatgaccagatgaagctgctgcagaactgctggagcgagctgctgatcctggaccacatctaccggcaggtggtgcacggcaaggagggcagcatcttcctggtgacaggccagcaggtggactacagcatcatcgccagccaggccggggccaccctgaacaacctgatgagccacgcccaggagctggtggccaagctgcggagcctgcagtttgaccagcgggagtttgtgtgcctgaagttcctggtgctcttcagcctggatgtgaagaacctggagaacttccagctggtggagggcgtgcaggagcaggtgaatgctgccctgctggactacaccatgtgcaactacccccagcagacagagaagtttggccagctgctgctgcggctgcctgagatccgggccatctccatgcaggccgaggagtacctgtactacaagcacctgaatggagatgtgccctacaacaacctgctgattgagatgctgcacgccaagagggcctag

SEQ ID NO: 141075 - DNA, 1488 bp, Artificial Sequence
  derived and/or modified sequence
atgagcagcaacagcgacaccggcgacctgcaggagagcctgaagcatggcctgacccccatagtcagccagttcaagatggtaaactatagctacgatgaagacctggaggagctctgtcctgtctgcggggataaggtcagtggatatcactatggactgcttacgtgtgagtcttgcaagggattcttcaagcggacagttcaaaacaacaaacggtatacctgcatcgagaatcaaaactgccaaatagataagacacagcggaagagatgtccttactgcaggtttcagaaatgtctctccgtggggatgaaactcgaagctgtacgcgctgacagaatgcgagggggaaggaacaagtttggtccaatgtataaaagagacagagctctgaagcagcaaaaaaaagcactgattcgcgccaatggcctgaagcttgaagccatgtctcaggtgattcaagctatgcctagcgatttaacaatctcgagcgctatccagaatattcattcagcgtccaagggcctccctctgaaccacgccgcactccctcctacggattacgataggtccccgttcgtcacttctcccatctcaatgacaatgcctccgcacggctccttgcagggctatcagacctacggacacttccctagtagggccattaagtctgagtaccccgacccctatacttccagcccggagtcgattatgggatacagctacatggactcttaccagacaagttcacctgccagtattccccatctcatattagaacttctaaaatgtgaaccggacgagcctcaagttcaggctaaaattatggcatatctgcagcaggaacaagcgaacaggtcaaagcacgagaagctcagtacctttgggcttatgtgcaagatggctgatcaaactcttttctccatcgtggagtgggccagatcaagcatttttttcagggaattgaaggtggatgatcagatgaaactcctgcagaattgctggagcgagctactgatcttggatcatatttatcgccaagtcgtgcatggaaaagagggcagtatatttttggtcacaggacaacaggtcgactacagcataatagccagtcaggctggcgctacactcaataatttgatgagtcacgcccaagagctggttgccaaactgcgctctctccagttcgaccagagagaatttgtgtgcttaaagtttctggtgctctttagtctggatgtcaaaaatctcgagaattttcagctcgtcgaaggcgtccaagaacaggtgaacgcggcccttctcgattacaccatgtgcaactatccccagcagaccgagaagttcggacagctcctgctccgcctccctgaaatccgtgctatttccatgcaggccgaggaatacctgtattacaagcacctgaatggtgacgtgccctacaacaatctactgattgaaatgctgcacgctaagagagcctag

SEQ ID NO: 141076 - DNA, 3115 bp, Artificial Sequence
  derived and/or modified sequence
atggtttacagcaggtcactaatgttggaaaaagtacagagtccagggaaagacttgcttgtaactttatgaattctggatttttttttttcctttgctttttcttaactttcactaagggttactgtagtctgatgtgtccttcccaaggccacgaaatttgacaagctgcacttttcttttgctcaatgatttctgctttaagccaaagaactgcctataatttcactaagaatgtcttctaattcagatactggggatttacaagagtctttaaagcacggacttacacctattgtgtctcaatttaaaatggtgaattactcctatgatgaagatctggaagagctttgtcccgtgtgtggagataaagtgtctgggtaccattatgggctcctcacctgtgaaagctgcaagggattttttaagcgaacagtccaaaataataaaaggtacacatgtatagaaaaccagaactgccaaattgacaaaacacagagaaagcgttgtccttactgtcgttttcaaaaatgtctaagtgttggaatgaagctagaagctgtaagggccgaccgaatgcgtggaggaaggaataagtttgggccaatgtacaagagagacagggccctgaagcaacagaaaaaagccctcatccgagccaatggacttaagctagaagccatgtctcaggtgatccaagctatgccctctgacctgaccatttcctctgcaattcaaaacatccactctgcctccaaaggcctacctctgaaccatgctgccttgcctcctacagactatgacagaagtccctttgtaacatcccccattagcatgacaatgccccctcacggcagcctgcaaggttaccaaacatatggccactttcctagccgggccatcaagtctgagtacccagacccctataccagctcacccgagtccataatgggctattcatatatggatagttaccagacgagctctccagcaagcatcccacatctgatactggaacttttgaagtgtgagccagatgagcctcaagtccaggctaaaatcatggcctatttgcagcaagagcaggctaaccgaagcaagcacgaaaagctgagcacctttgggcttatgtgcaaaatggcagatcaaactctcttctccattgtcgagtgggccaggagtagtatcttcttcagagaacttaaggttgatgaccaaatgaagctgcttcagaactgctggagtgagctcttaatcctcgaccacatttaccgacaagtggtacatggaaaggaaggatccatcttcctggttactgggcaacaagtggactattccataatagcatcacaagccggagccaccctcaacaacctcatgagtcatgcacaggagttagtggcaaaacttcgttctctccagtttgatcaacgagagttcgtatgtctgaaattcttggtgctctttagtttagatgtcaaaaaccttgaaaacttccagctggtagaaggtgtccaggaacaagtcaatgccgccctgctggactacacaatgtgtaactacccgcagcagacagagaaatttggacagctacttcttcgactacccgaaatccgggccatcagtatgcaggctgaagaatacctctactacaagcacctgaacggggatgtgccctataataaccttctcattgaaatgttgcatgccaaaagagcataagttacaacccctaggagctctgctttcaaaacaaaaagagattgggggagtggggagggggaagaagaacaggaagaaaaaaagtactctgaactgctccaagtaacgctaattaaaaacttgctttaaagatattgaatttaaaaaggcataataatcaaatacttaatagcaaataaatgatgtatcagggtatttgtattgcaaactgtgaatcaaaggcttcacagccccagaggattccatataaaagacattgtaatggagtggattgaactcacagatggataccaacacggtcagaagaaaaacggacagaacggttcttgtatatttaaactgatctccactatgaagaaatttaggaactaatcttattaattaggcttatacagcgggggatttgagcttacaggattcctccatggtaaagctgaactgaaacaattctcaagaatgcatcagctgtacctacaatagcccctccctcttcctttgaaggccccagcacctctgccctgtggtcaccgaatctgtactaaggacctgtgttcagccacacccagtggtagctccaccaaatcatgaacagcctaattttgagtgtctgtgtcttagacctgcaaacagctaataggaaattctattaatatgttagcttgccattttaaatatgttctgagggttgttttgtctcgtgttcatgatgttaagaaaatgcaggcagtatccctcatcttatgtaagtgttaattaatattaagggaaatgactacaaactttcaaagcaaatgctccatagctaaagcaacttagaccttatttctgctactgttgctgaaatgtggctttggcattgttggatttcataaaaaatttctggcaggaagtcttgttagtatacatcagtctttttcatcatccaagtttgtagttcatttaaaaatacaacattaaacacattttgctaggatgtcaaatagtcacagttctaagtagttggaaacaaaattgacgcatgttaatctatgcaaagagaaaggaaaggatgaggtgatgtattgactcaaggttcattcttgctgcaattgaacatcctcaagagttgggatggaaatggtgatttttacatgtgtcctggaaagatattaaagtaattcaaatcttccccaaaggggaaaggaagagagtgatactgacctttttaagtcatagaccaaagtctgctgtagaacaaatatgggaggacaaagaatcgcaaattcttcaaatgactattatcagtattattaacatgcgatgccacaggtatgaaagtcttgccttatttcacaattttaaaaggtagctgtgcagatgtggatcaacatttgtttaaaataaagtattaata

SEQ ID NO: 141077 - DNA, 574 bp, Artificial Sequence
  derived and/or modified sequence
actaatgttggaaaaagtacagagtccagggaaagacttgcttgtaactttatgaattctggatttttttttttcctttgctttttcttaactttcactaagggttactgtagtctgatgtgtccttcccaaggccacgaaatttgacaagctgcacttttcttttgctcaatgatttctgctttaagccaaagaactgcctataatttcactaagaatgtcttctaattcagatactggggatttacaagagtctttaaagcacggacttacacctattgataacacagaaaatacaggcacaagaaagatgagagagcagcacacaaccatttcgcatctttttcgtcgggcagaaccgccgcggtgcgcaggcaaggagtccttcccggcagctccgcgcagctccggttccgcgtccggggccgcagctagagcgcgctcgggccggagacgcggactgcgcgcgcacgggggacgcgcgctcgggggctcgcgcccgcgcgggcggtcttgggctcctgctgcgcgcagccccagctggccgctgccaaaatagagttgagctgggtcg

SEQ ID NO: 141078 - DNA, 1488 bp, Artificial Sequence
  derived and/or modified sequence
atgagcagcaactccgatacaggcgatctgcaggagtcgctgaagcacggcttaacacccattgtgagccagttcaagatggtgaattattcatacgacgaagatctcgaggaattgtgccctgtttgtggcgacaaggtgtctggataccattatgggcttttaacatgtgaaagctgcaaaggtttttttaaaaggacagtccaaaataacaagcggtacacgtgcatcgagaatcaaaattgccagatcgacaagacccaacgcaaaagatgtccctactgtcgctttcagaaatgcctgagcgtgggtatgaaattagaagccgttcgtgctgacaggatgcggggagggaggaacaaattcggacccatgtacaaaagggatagggccctgaaacagcagaaaaaggcccttataagggctaatgggctgaagctcgaggccatgagccaggtgattcaggctatgcccagcgaccttacaatatcatccgctattcaaaatatccattcagccagcaaaggcctgccgctgaaccatgcagccttgcccccaacggactacgacaggtccccatttgtgacgagcccgatttcaatgactatgccaccacacggctctctgcaaggctaccagacttacggacacttccccagcagagccattaagtccgagtatcccgatccttatacctcatccccagagtcgatcatgggctattcctatatggactcataccagacttctagccctgctagtatcccacatctcattctcgagctgctgaagtgcgagccagacgagccacaggtccaagcaaaaatcatggcatatctgcagcaggaacaagcgaaccgttctaagcacgaaaagctaagcacatttggcctgatgtgcaaaatggctgatcagaccctgttttccattgttgagtgggcacggtccagcatctttttccgggaactgaaagtcgacgaccaaatgaaactactgcagaactgttggtccgaacttctgattctggatcatatctaccgccaggtggtacatggaaaagagggttcaatctttcttgtcaccgggcaacaggtggactactctatcatcgcctcacaggccggagccaccctcaataatctcatgtctcatgctcaggaactggtcgccaagttgcgatccctacaatttgaccaaagggagttcgtgtgtctgaaattcctggttctgtttagcctagatgttaagaacctggaaaacttccagctggtggagggcgttcaggagcaggttaatgctgcgctcctcgactacactatgtgcaactatccccagcagaccgaaaagttcggacaactgttgctccgcctgccagaaatcagggctatatctatgcaagcagaagagtacctgtattataaacatctgaacggcgacgtgccctacaacaatcttttgatcgagatgctgcacgcaaagcgtgcctag

SEQ ID NO: 141079 - DNA, 1488 bp, Artificial Sequence
  derived and/or modified sequence
atgagcagcaacagcgacaccggcgacctgcaggagagcctgaagcacggcctgacccccatcgtgagccagttcaagatggtgaactacagctacgacgaggacctggaggagctgtgccccgtgtgcggcgacaaggtgagcggctaccactacggcctgctgacctgcgagagctgcaagggcttcttcaagagaaccgtgcagaacaacaagagatacacctgcatcgagaaccagaactgccagatcgacaagacccagagaaagagatgcccctactgcagattccagaagtgcctgagcgtgggcatgaagctggaggccgtgagagccgacagaatgagaggcggcagaaacaagttcggccccatgtacaagagagacagagccctgaagcagcagaagaaggccctgatcagagccaacggcctgaagctggaggccatgagccaggtgatccaggccatgcccagcgacctgaccatcagcagcgccatccagaacatccacagcgccagcaagggcctgcccctgaaccacgccgccctgccccccaccgactacgacagaagccccttcgtgaccagccccatcagcatgaccatgcccccccacggcagcctgcagggctaccagacctacggccacttccccagcagagccatcaagagcgagtaccccgacccctacaccagcagccccgagagcatcatgggctacagctacatggacagctaccagaccagcagccccgccagcatcccccacctgatcctggagctgctgaagtgcgagcccgacgagccccaggtgcaggccaagatcatggcctacctgcagcaggagcaggccaacagaagcaagcacgagaagctgagcaccttcggcctgatgtgcaagatggccgaccagaccctgttcagcatcgtggagtgggccagaagcagcatcttcttcagagagctgaaggtggacgaccagatgaagctgctgcagaactgctggagcgagctgctgatcctggaccacatctacagacaggtggtgcacggcaaggagggcagcatcttcctggtgaccggccagcaggtggactacagcatcatcgccagccaggccggcgccaccctgaacaacctgatgagccacgcccaggagctggtggccaagctgagaagcctgcagttcgaccagagagagttcgtgtgcctgaagttcctggtgctgttcagcctggacgtgaagaacctggagaacttccagctggtggagggcgtgcaggagcaggtgaacgccgccctgctggactacaccatgtgcaactacccccagcagaccgagaagttcggccagctgctgctgagactgcccgagatcagagccatcagcatgcaggccgaggagtacctgtactacaagcacctgaacggcgacgtgccctacaacaacctgctgatcgagatgctgcacgccaagagagcctag

SEQ ID NO: 141080 - protein, 140 aa, Artificial Sequence
  derived and/or modified sequence
MRALEGPGLSLLCLVLALPALLPVPAVRGVAETPTYPWRDAETGERLVCAQCPPGTFVQRPCRRDSPTTCGPCPPRHYTQFWNYLERCRYCNVLCGEREEEARACHATHNRACCGCCRRCAWPGCPGWSGASVSASSLCT

SEQ ID NO: 141081 - protein, 300 aa, Artificial Sequence
  derived and/or modified sequence
MRALEGPGLSLLCLVLALPALLPVPAVRGVAETPTYPWRDAETGERLVCAQCPPGTFVQRPCRRDSPTTCGPCPPRHYTQFWNYLERCRYCNVLCGEREEEARACHATHNRACRCRTGFFAHAGFCLEHASCPPGAGVIAPGTPSQNTQCQPCPPGTFSASSSSSEQCQPHRNCTALGLALNVPGSSSHDTLCTSCTGFPLSTRVPGAEECERAVIDFVAFQDISIKRLQRLLQALEAPEGWGPTPRAGRAALQLKLRRRLTELLGAQDGALLVRLLQALRVARMPGLERSVRERFLPVH

SEQ ID NO: 141082 - DNA, 423 bp, Artificial Sequence
  derived and/or modified sequence
atgagagccctggagggccccggcctgagcctgctgtgcctggtgctggccctgcccgccctgctgcccgtgcccgccgtgagaggcgtggccgagacccccacctacccctggagagacgccgagaccggcgagagactggtgtgcgcccagtgcccccccggcaccttcgtgcagagaccctgcagaagagacagccccaccacctgcggcccctgcccccccagacactacacccagttctggaactacctggagagatgcagatactgcaacgtgctgtgcggcgagagagaggaggaggccagagcctgccacgccacccacaacagagcctgctgcggctgctgcagaagatgcgcctggcccggctgccccggctggagcggcgccagcgtgagcgccagcagcctgtgcacctag

SEQ ID NO: 141083 - DNA, 903 bp, Artificial Sequence
  derived and/or modified sequence
atgagagccctggagggccccggcctgagcctgctgtgcctggtgctggccctgcccgccctgctgcccgtgcccgccgtgagaggcgtggccgagacccccacctacccctggagagacgccgagaccggcgagagactggtgtgcgcccagtgcccccccggcaccttcgtgcagagaccctgcagaagagacagccccaccacctgcggcccctgcccccccagacactacacccagttctggaactacctggagagatgcagatactgcaacgtgctgtgcggcgagagagaggaggaggccagagcctgccacgccacccacaacagagcctgcagatgcagaaccggcttcttcgcccacgccggcttctgcctggagcacgccagctgcccccccggcgccggcgtgatcgcccccggcacccccagccagaacacccagtgccagccctgcccccccggcaccttcagcgccagcagcagcagcagcgagcagtgccagccccacagaaactgcaccgccctgggcctggccctgaacgtgcccggcagcagcagccacgacaccctgtgcaccagctgcaccggcttccccctgagcaccagagtgcccggcgccgaggagtgcgagagagccgtgatcgacttcgtggccttccaggacatcagcatcaagagactgcagagactgctgcaggccctggaggcccccgagggctggggccccacccccagagccggcagagccgccctgcagctgaagctgagaagaagactgaccgagctgctgggcgcccaggacggcgccctgctggtgagactgctgcaggccctgagagtggccagaatgcccggcctggagagaagcgtgagagagagattcctgcccgtgcactag

SEQ ID NO: 141084 - DNA, 423 bp, Artificial Sequence
  derived and/or modified sequence
atgagggccctcgaggggcccgggctgagtcttctgtgcctcgttctagccctgcctgcccttctgccggtacctgccgtgcggggcgtggctgagactccgacttatccttggagggacgctgaaaccggggagaggctggtctgcgcacagtgcccccctggtactttcgtccagcgtccctgccgcagagactcaccaaccacctgtggcccctgccctccacgccattacacacagttctggaattacctggagagatgtagatactgcaacgtcctatgcggcgagcgcgaggaggaagctagagcgtgccacgccacccataatcgcgcctgctgcgggtgctgtagacgctgtgcgtggccaggatgcccgggttggagtggggcctctgtgagtgcctcaagcctctgcacttag

SEQ ID NO: 141085 - DNA, 903 bp, Artificial Sequence
  derived and/or modified sequence
atgagggcccttgaagggcctggattgtcattactgtgtctggttctggctctgcctgccctcctgcccgtaccagctgtccggggagtggccgaaaccccgacctacccctggcgtgacgcagaaaccggggagagactggtgtgtgcccagtgccctcccggtaccttcgtgcagcggccttgccggagagacagcccaacaacgtgcgggccctgtccaccaagacattacacgcaattctggaactatttggagagatgccggtattgtaatgtgttgtgtggagaaagggaagaagaagcacgagcctgccatgccacccacaatcgcgcctgcaggtgcagaacaggttttttcgcccatgcaggattctgcttggaacatgcatcttgtcctcccggcgcaggcgtgatagcgccgggcacccccagccagaatacacagtgtcaaccttgccctcccggcacttttagtgccagcagctcctccagtgaacagtgtcagccacataggaattgcaccgcccttggcctggccctgaacgtgccgggaagcagctctcacgacacgctttgcaccagctgtacaggatttcctctctcaacgcgcgttcccggggctgaggagtgtgagcgcgccgttattgatttcgtggccttccaagacattagcatcaaacggctgcagagactcctccaggcactggaagctccagaaggttggggccctaccccacgtgccggcagagccgctctgcaactaaaactgcgcaggcgcctcaccgagctgctaggggctcaggatggcgctctactggttagattactacaggccctgcgggtggctagaatgcccgggctggaaaggagcgtcagagagcgctttctccccgtgcactag

SEQ ID NO: 141086 - DNA, 903 bp, Artificial Sequence
  derived and/or modified sequence
atgagggcccttgaggggccaggcctctcgctgctctgtctggtacttgccctccctgccctgctgccagtgccagcagttcggggcgttgcagagacccccacttatccttggcgggacgccgagactggcgaacgactcgtctgcgcacaatgccctccgggcaccttcgtgcagcggccatgtagacgcgactcaccgacaacttgcggtccctgtcctccacgccattatactcagttttggaactatctggagcggtgccgctactgcaatgttctttgtggcgagcgcgaggaggaagccagggcctgtcatgccacacacaatcgagcatgcagatgcaggaccggattctttgcgcacgccggcttttgtctcgagcacgcctcgtgtcccccaggcgctggcgtgatagctccaggcactccaagccagaacacgcagtgtcagccctgccctccaggtactttctctgcctctagctcaagcagcgaacagtgccagccacatagaaattgcaccgctttaggactggctcttaatgtcccaggtagctcatctcacgacaccctgtgcacctcatgtaccggctttcctctatcaacacgagtgccaggcgccgaggaatgcgaacgagccgtaattgattttgtggctttccaggacatctccatcaagcggttgcagcggttgctgcaggctctcgaagctcccgagggatggggccccacccccagggccgggagagctgccctgcagctgaaactgcgtcggcggctgacggagcttttgggagcacaggacggcgccctgctggttcggcttctacaagctctcagagttgcaaggatgcctgggctcgaacgatcggtgcgggaacggttcctgcctgtgcattag

SEQ ID NO: 141087 - DNA, 423 bp, Artificial Sequence
  derived and/or modified sequence
atgagggccctggagggccctggcctgagcctgctgtgcctggtgctggccctgcctgccctgctgcctgtgcctgctgtgcggggcgtggccgagacccccacctacccctggagagatgctgagactggagagcggctggtgtgtgcccagtgccccccaggcacctttgtgcagaggccctgcagaagagacagccccaccacctgtggcccctgcccccccaggcactacacccagttctggaactacctggagcgctgccgctactgcaatgtgctgtgtggggagcgggaggaggaggcccgggcctgccacgccacccacaacagagcctgctgcggctgctgccgccgctgtgcctggccaggctgccccggctggagcggggcctctgtgtctgccagcagcctgtgcacctag

SEQ ID NO: 141088 - DNA, 903 bp, Artificial Sequence
  derived and/or modified sequence
atgagggccctggagggccctggcctgagcctgctgtgcctggtgctggccctgcctgccctgctgcctgtgcctgctgtgcggggcgtggccgagacccccacctacccctggagagatgctgagactggagagcggctggtgtgtgcccagtgccccccaggcacctttgtgcagaggccctgcagaagagacagccccaccacctgtggcccctgcccccccaggcactacacccagttctggaactacctggagcgctgccgctactgcaatgtgctgtgtggggagcgggaggaggaggcccgggcctgccacgccacccacaacagagcctgccgctgcaggacaggcttctttgcccatgctggcttctgcctggagcacgccagctgccccccaggggccggcgtgattgcccctggcacccccagccagaacacccagtgccagccctgccccccaggcaccttcagcgccagcagcagcagcagcgagcagtgccagccccacaggaactgcacagccctgggcctggccctgaatgtgcccggcagcagcagccatgacaccctgtgcaccagctgcaccggcttccccctgagcaccagggtgcctggagctgaggagtgtgagcgggccgtcatcgactttgtggccttccaggacatcagcatcaagaggctgcagaggctgctgcaggccctggaggcccctgagggctggggccccaccccccgggccggccgggccgccctgcagctgaagctgcggcggcggctgacagagctgctgggcgcccaggatggagccctgctggtgcggctgctgcaggccctgcgggtggccaggatgcctggcctggagaggtctgtgcgggagcgcttcctgcctgtgcactag

SEQ ID NO: 141089 - DNA, 423 bp, Artificial Sequence
  derived and/or modified sequence
atgcgggccctggagggccccggcctgagcctgctgtgcctggtgttagccctaccagccctgctgccggtaccggcagttagaggcgtcgcagagactccaacctacccatggagggatgccgaaacaggagagcgcctagtgtgtgcgcagtgcccgcccggaactttcgtgcagcggccctgtaggcgcgattcacctacgacatgtggaccttgccctccaagacactacacacaattttggaattatctcgaaaggtgccgttattgtaacgtgctgtgcggcgagcgtgaggaggaggcccgggcctgtcacgccacccacaaccgggcctgctgtggctgttgcaggcggtgcgcctggccagggtgccctggatggagcggcgccagtgtctccgcctccagtttgtgtacttag

SEQ ID NO: 141090 - DNA, 903 bp, Artificial Sequence
  derived and/or modified sequence
atgcgggccctggagggccccggcctgagcctgctgtgcctggtgctcgcactgccagccctattacccgtgccagctgtgcgtggagtcgcagagactcccacctatccttggcgagacgccgagactggagagaggctggtctgcgcccagtgcccacccggaacatttgttcagagaccatgcagaagagactcacctacgacatgcgggccgtgtcctccacgccactatacccagttttggaactatctcgagcgttgccgctactgcaatgtgctgtgcggcgaacgtgaagaagaagcacgagcttgccacgcgacccacaatcgagcctgccgttgtagaactgggtttttcgcacacgccggcttttgtcttgagcatgctagctgtccgcctggcgccggcgtgattgcccccggcaccccatctcagaacacccagtgtcagccctgcccacccggcacattctcagctagcagctccagcagcgaacagtgccagcctcatcgcaattgtacggctcttgggctagcattgaacgtaccaggttcttctagtcatgacactctctgcactagctgtactgggttccctctgagcacgcgagtgccgggagccgaagaatgcgagagagccgtgatcgatttcgtggcatttcaggatattagcattaagaggctccaaagactgttgcaggctctggaagcccctgagggctggggacccacgccaagggctggcagagcggccctgcaattgaagctccgcaggcgactcacagaattgcttggcgcacaggatggcgccttgcttgtgagacttcttcaggccctgagggtggctcgtatgccaggtcttgaacgctctgttagggagcgttttctcccggttcactag

SEQ ID NO: 141091 - DNA, 903 bp, Artificial Sequence
  derived and/or modified sequence
atgcgggccctggagggccccggcctgagcctgctgtgcctggtgttagctttgcccgctctgctccccgttccagctgtccgcggggtcgccgaaaccccgacctacccatggcgagatgcggagacgggagagaggttggtgtgtgcacagtgtccgcccggcactttcgtgcagagaccctgtagacgtgattcaccaactacttgtggaccatgtccccctcgccattatacacagttttggaactacttggagagatgcaggtactgtaatgttctctgcggtgaaagagaggaggaagctcgggcatgtcacgccacacacaatcgcgcatgtcgatgccggactggcttcttcgcccacgctggcttctgcctggagcatgcatcgtgccccccaggcgcaggggtgatagcaccagggacaccaagccagaatacacaatgccagccctgcccgcctggcaccttcagcgcatcatcgtcatccagtgagcaatgccagccgcaccggaactgcactgccctgggcctggccctgaatgtgcccggctctagctcccacgatactttatgcacttcctgtaccggtttccccctcagcaccagagtaccaggagcagaagagtgtgaacgggccgtgatcgatttcgtagcatttcaggacatcagcatcaagcggcttcagaggctcctccaggcactagaggcccccgaagggtgggggccgacccctagggccggtcgtgcagccctgcaacttaagctgagaaggagactgacagagctgctgggtgctcaggatggagccctgttggttagacttttgcaggctctgagagtagcccggatgcccgggttagagcgaagcgtcagggagcgctttctgcccgtccattag

SEQ ID NO: 141092 - DNA, 423 bp, Artificial Sequence
  derived and/or modified sequence
atgagagccctggaggggcctggcctgtctctcctgtgtctggtccttgctctcccagccctgctcccagtccccgctgtgcgcggagtggccgaaacgccaacctacccatggcgagacgccgaaacaggtgaacgcctggtatgtgcgcaatgccctcctgggacttttgtgcaacgcccttgtcgacgggacagccctactacgtgcggaccttgccctcccagacattacacccagttttggaactacctcgagcggtgtagatattgcaacgtcttatgtggtgagcgggaggaggaagcgcgtgcgtgccacgcaactcataaccgcgcttgctgtgggtgttgcagacggtgtgcctggccagggtgccccggatggtcaggggcttcggtctccgcaagctcgctgtgtacatag

SEQ ID NO: 141093 - DNA, 903 bp, Artificial Sequence
  derived and/or modified sequence
atgagagctcttgagggaccgggtctctctctactatgcctggtactggccttacccgctttgcttccagtacctgcggtgaggggagtggctgagaccccaacatatccttggagggacgcagagaccggggaacgcctggtctgtgctcagtgtccaccaggtacattcgttcagcggccttgccggagggattcgcctactacttgcggcccatgtcccccacgccattatacacaattctggaattacctggaacgatgccggtactgtaatgtgctctgcggggaaagagaagaggaagccagggcttgtcacgctacccacaaccgggcttgccgatgcaggaccggctttttcgctcatgctgggttttgtctggagcacgccagttgtccacctggtgccggagtgatagctcctggtacgcctagccaaaatactcaatgtcaaccctgtccaccagggacgtttagcgcttcttcatcctccagcgagcaatgtcaaccacaccgaaactgtacagctttaggtctggctttaaacgtgcccggaagttcaagccacgacaccttgtgcacatcatgcacgggtttcccactgtctactcgcgtgcccggtgccgaggaatgcgaacgagctgtgatcgattttgttgcctttcaggacattagcatcaaacggctgcagcggctcctgcaggcccttgaagcacccgagggttggggcccaactccacgtgccggtcgagcagccctccagttaaagctgcgtcgcaggttgactgagctgctgggggctcaggatggggcactgctggtaaggctactgcaggcactgcgcgtcgctcgtatgcctggcttggagcgaagcgtgagagagcgtttcctacccgttcattag

SEQ ID NO: 141094 - DNA, 903 bp, Artificial Sequence
  derived and/or modified sequence
atgcgcgcactcgaggggccaggattgtcattgctttgccttgtgctcgcgcttcccgctcttctacccgtacctgccgtccgcggagtcgccgagacgcctacctatccatggcgtgacgcagagaccggggaacgccttgtatgtgcccagtgcccaccaggcaccttcgtgcagcgcccatgtcgccgagacagcccgaccacttgcggaccatgtccccctagacactatactcaattctggaattacctggagcggtgtagatactgcaatgttctgtgtggcgagcgggaagaagaagccagagcttgccatgctactcataaccgagcatgcagatgccgtactggattcttcgctcacgccggtttttgcctggaacacgcttcctgcccccctggcgctggagtcattgcccctggaactccttctcagaacactcagtgtcagccctgccctccgggaaccttcagtgctagctcaagctcatctgaacaatgtcaaccgcaccgcaattgcacggcgctgggcctggccctcaatgtgcccggaagctccagtcacgatactctgtgcacgtcgtgcacgggctttcctctctcgactagggtgccaggcgctgaggagtgtgagagggccgtgatcgattttgtcgcgttccaggacatatccattaagcgtctgcaaagactgctacaggccctcgaggcacccgagggttggggaccaacccccagagctggacgcgcagcccttcagctcaaactccgtaggaggcttaccgaactgctgggcgctcaggacggtgccctcctcgtacggttgcttcaggctctccgagtggcacgcatgcccggactggaaaggagcgtccgagagcgatttcttcctgttcactag

SEQ ID NO: 141095 - DNA, 420 bp, Artificial Sequence
  derived and/or modified sequence
atgagggcgctggaggggccaggcctgtcgctgctgtgcctggtgttggcgctgcctgccctgctgccggtgccggctgtacgcggagtggcagaaacacccacctacccctggcgggacgcagagacaggggagcggctggtgtgcgcccagtgccccccaggcacctttgtgcagcggccgtgccgccgagacagccccacgacgtgtggcccgtgtccaccgcgccactacacgcagttctggaactacctagagcgctgccgctactgcaacgtcctctgcggggagcgtgaggaggaggcacgggcttgccacgccacccacaaccgtgcctgctgcggctgctgcaggcgctgcgcgtggccaggatgcccgggctggagcggagcgtccgtgagcgcttcctccctgtgcact

SEQ ID NO: 141096 - DNA, 1124 bp, Artificial Sequence
  derived and/or modified sequence
tccgcaggcggaccgggggcaaaggaggtggcatgtcggtcaggcacagcagggtcctgtgtccgcgctgagccgcgctctccctgctccagcaaggaccatgagggcgctggaggggccaggcctgtcgctgctgtgcctggtgttggcgctgcctgccctgctgccggtgccggctgtacgcggagtggcagaaacacccacctacccctggcgggacgcagagacaggggagcggctggtgtgcgcccagtgccccccaggcacctttgtgcagcggccgtgccgccgagacagccccacgacgtgtggcccgtgtccaccgcgccactacacgcagttctggaactacctagagcgctgccgctactgcaacgtcctctgcggggagcgtgaggaggaggcacgggcttgccacgccacccacaaccgtgcctgccgctgccgcaccggcttcttcgcgcacgctggtttctgcttggagcacgcatcgtgtccacctggtgccggcgtgattgccccgggcacccccagccagaacacgcagtgccagccgtgccccccaggcaccttctcagccagcagctccagctcagagcagtgccagccccaccgcaactgcacggccctgggcctggccctcaatgtgccaggctcttcctcccatgacaccctgtgcaccagctgcactggcttccccctcagcaccagggtaccaggagctgaggagtgtgagcgtgccgtcatcgactttgtggctttccaggacatctccatcaagaggctgcagcggctgctgcaggccctcgaggccccggagggctggggtccgacaccaagggcgggccgcgcggccttgcagctgaagctgcgtcggcggctcacggagctcctgggggcgcaggacggggcgctgctggtgcggctgctgcaggcgctgcgcgtggccaggatgcccgggctggagcggagcgtccgtgagcgcttcctccctgtgcactgatcctggccccctcttatttattctacatccttggcaccccacttgcactgaaagaggcttttttttaaatagaagaaatgaggtttcttaaagcttatttttataaagctttttcataaaa

SEQ ID NO: 141097 - protein, 208 aa, Artificial Sequence
  derived and/or modified sequence
MDPFLVLLHSVSSSLSSSELTELKFLCLGRVGKRKLERVQSGLDLFSMLLEQNDLEPGHTELLRELLASLRRHDLLRRVDDFEAGAAAGAAPGEEDLCAAFNVICDNVGKDWRRLARQLKVSDTKIDSIEDRYPRNLTERVRESLRIWKNTEKENATVAHLVGALRSCQMNLVADLVQEVQQARDLQNRSGAMSPMSWNSDASTSEAS

SEQ ID NO: 141098 - DNA, 627 bp, Artificial Sequence
  derived and/or modified sequence
atggaccccttcctggtgctgctgcacagcgtgagcagcagcctgagcagcagcgagctgaccgagctgaagttcctgtgcctgggcagagtgggcaagagaaagctggagagagtgcagagcggcctggacctgttcagcatgctgctggagcagaacgacctggagcccggccacaccgagctgctgagagagctgctggccagcctgagaagacacgacctgctgagaagagtggacgacttcgaggccggcgccgccgccggcgccgcccccggcgaggaggacctgtgcgccgccttcaacgtgatctgcgacaacgtgggcaaggactggagaagactggccagacagctgaaggtgagcgacaccaagatcgacagcatcgaggacagataccccagaaacctgaccgagagagtgagagagagcctgagaatctggaagaacaccgagaaggagaacgccaccgtggcccacctggtgggcgccctgagaagctgccagatgaacctggtggccgacctggtgcaggaggtgcagcaggccagagacctgcagaacagaagcggcgccatgagccccatgagctggaacagcgacgccagcaccagcgaggccagctag

SEQ ID NO: 141099 - DNA, 627 bp, Artificial Sequence
  derived and/or modified sequence
atggatccgtttctcgtgctgctgcactcagtatccagcagtttaagttcttccgaactgactgagctgaagttcctttgcctgggaagagtggggaagaggaagcttgagcgcgtgcagtccggtttggaccttttcagcatgctcttggagcagaacgacctggaacctggtcacacagaactgctgcgcgaactacttgcgagcctgagacgtcacgatctgctcagaagagtcgacgactttgaggcgggtgccgccgctggagccgctccaggagaagaggacctgtgcgccgctttcaacgtgatctgtgacaacgttgggaaggattggcgaagattagcgcggcagctgaaagtgagcgacacaaagattgactctatcgaagatcgctatcctcggaacctgacagaacgagtgagagagtccttgaggatctggaagaacacggaaaaggaaaatgctacggtagcccacctggtcggtgccctaaggagttgccagatgaatctggttgctgatctggtgcaggaggtgcagcaggctagagacctccagaaccggtctggcgccatgagtcccatgtcctggaactcggacgcgtccacctctgaggcttcttag

SEQ ID NO: 141100 - DNA, 1841 bp, Artificial Sequence
  derived and/or modified sequence
gacgatacgccgggcgcaggcgcagaagccgcgcccgtccgcggcgccgccagccagggcggaaacggctgcggcttcgctagggacgcatgcgcgggtcccttagttttcgcgagataacggtcgaaaacgcgctcttgtcgatttcctgtagtgaatcaggcaccggagtgcaggttcgggggtggaatccttgggccgctgggcaagcggcgagacctggccagggccagcgagccgaggacagagggcgcacggagggccgggccgcagccccggccgcttgcagaccccgccatggacccgttcctggtgctgctgcactcggtgtcgtccagcctgtcgagcagcgagctgaccgagctcaagttcctatgcctcgggcgcgtgggcaagcgcaagctggagcgcgtgcagagcggcctagacctcttctccatgctgctggagcagaacgacctggagcccgggcacaccgagctcctgcgcgagctgctcgcctccctgcggcgccacgacctgctgcggcgcgtcgacgacttcgaggcgggggcggcggccggggccgcgcctggggaagaagacctgtgtgcagcatttaacgtcatatgtgataatgtggggaaagattggagaaggctggctcgtcagctcaaagtctcagacaccaagatcgacagcatcgaggacagatacccccgcaacctgacagagcgtgtgcgggagtcactgagaatctggaagaacacagagaaggagaacgcaacagtggcccacctggtgggggctctcaggtcctgccagatgaacctggtggctgacctggtacaagaggttcagcaggcccgtgacctccagaacaggagtggggccatgtccccgatgtcatggaactcagacgcatctacctccgaagcgtcctgatgggccgctgctttgcgctggtggaccacaggcatctacacagcctggactttggttctctccaggaaggtagcccagcactgtgaagacccagcaggaagccaggctgagtgagccacagaccacctgcttctgaactcaagctgcgtttattaatgcctctcccgcaccaggccgggcttgggccctgcacagatatttccatttcttcctcactatgacactgagcaagatcttgtctccactaaatgagctcctgcgggagtagttggaaagttggaaccgtgtccagcacagaaggaatctgtgcagatgagcagtcacactgttactccacagcggaggagaccagctcagaggcccaggaatcggagcgaagcagagaggtggagaactgggatttgaacccccgccatccttcaccagagcccatgctcaaccactgtggcgttctgctgcccctgcagttggcagaaaggatgttttgtcccatttccttggaggccaccgggacagacctggacactagggtcaggcggggtgctgtggtggggagaggcatggctggggtgggggtggggagacctggttggccgtggtccagctcttggcccctgtgtgagttgagtctcctctctgagactgctaagtaggggcagtgatggttgccaggacgaattgagataatatctgtgaggtgctgatgagtgattgacacacagcactctctaaatcttccttgtgaggattatgggtcctgcaattctacagtttcttactgttttgtatcaaaatcactatctttctgataacagaattgccaaggcagcgggatctcgtatctttaaaaagcagtcctcttattcctaaggtaatcctattaaaacacagctttacaacttccatactacaaaaaa

SEQ ID NO: 141101 - DNA, 627 bp, Artificial Sequence
  derived and/or modified sequence
atggaccccttcctggtgctgctgcacagcgtgagcagcagcctgagcagcagcgagctgacagagctgaagttcctgtgcctgggccgggtgggcaagaggaagctggagcgggtgcagagcggcctggacctcttctccatgctgctggagcagaatgacctggagcccggccacacagagctgctgcgggagctgctggccagcctgcggagacatgacctgctgcggcgggtggatgactttgaggccggggctgctgctggggccgcccctggagaggaggacctgtgtgccgccttcaacgtcatctgtgacaacgtgggcaaggactggaggcggctggcccggcagctgaaggtgtctgacaccaagattgacagcattgaggaccgctaccccaggaacctgacagagcgggtgcgggagagcctgcgcatctggaagaacacagagaaggaaaatgccaccgtggcccacctggtgggcgccctgcggagctgccagatgaacctggtggccgacctggtgcaggaggtgcagcaggcccgggacctgcagaacagaagtggggccatgagccccatgtcctggaacagtgatgccagcaccagcgaggccagctag

SEQ ID NO: 141102 - DNA, 627 bp, Artificial Sequence
  derived and/or modified sequence
atggaccccttcctggtgctgctgcacagcgtgagcagcagcctgtcttcttccgaactgaccgaacttaagttcctttgcctaggaagggtggggaaacggaaactggagcgagtgcagtcagggctagaccttttctctatgctgctagagcagaacgacctggaacctgggcataccgaactgctaagagaactgctggcatctttgcgcaggcatgatcttctgagaagggttgacgacttcgaggctggcgccgcggccggggctgcgcccggtgaggaagacctctgcgctgcttttaacgtgatctgtgacaacgtcgggaaggactggaggcgtctggccagacagttgaaggtctccgatactaaaatcgacagcatagaggatcgttaccctagaaatctaacggagagagtgagggagagcctgcgaatctggaagaacaccgagaaagagaacgcaacagtggcgcacctcgtgggcgccttacgctcatgtcaaatgaatttagtggccgacctagtgcaggaggtccaacaagcacgcgacctgcagaatcggtctggagccatgagccccatgtcctggaattccgacgcctcaacaagtgaggccagctag

SEQ ID NO: 141103 - DNA, 627 bp, Artificial Sequence
  derived and/or modified sequence
atggacccatttctggtgttactccattccgtgagttcctctcttagctcaagcgagctcactgagctgaaatttctttgtctgggcagggtgggaaagagaaagcttgagcgggtgcagtccgggctggacctgttcagtatgctgctggaacagaatgatcttgagcccggtcacactgagttattgagggagcttctggcctctctccggagacatgacctgcttcggcgagtagatgacttcgaagctggtgctgctgctggcgcagccccaggggaagaagacttatgcgcagcctttaatgtgatttgtgacaacgtgggcaaagattggcgccgattggctaggcagctgaaagtctctgataccaagatcgacagtatcgaggaccgctaccccagaaatctcaccgaaagagtgagagaatcgctgagaatatggaaaaacacagagaaggaaaatgccaccgttgcacatctggtcggagccttaaggagctgtcagatgaatctcgtggccgacctggtgcaggaagttcaacaagcgagagatctacagaatcgcagtggagcaatgtcccccatgagctggaatagcgacgcctctacgtcagaggcgagttag

SEQ ID NO: 141104 - protein, 211 aa, Artificial Sequence
  derived and/or modified sequence
MDNLSSEEIQQRAHQITDESLESTRRILGLAIESQDAGIKTITMLDEQKEQLNRIEEGLDQINKDMRETEKTLTELNKCCGLCVCPCNRTKNFESGKAYKTTWGDGGENSPCNVVSKQPGPVTNGQLQQPTTGAASGGYIKRITNDAREDEMEENLTQVGSILGNLKDMALNIGNEIDAQNPQIKRITDKADTNRDRIDIANARAKKLIDS

SEQ ID NO: 141105 - DNA, 636 bp, Artificial Sequence
  derived and/or modified sequence
atggacaacctgagcagcgaggagatccagcagagagcccaccagatcaccgacgagagcctggagagcaccagaagaatcctgggcctggccatcgagagccaggacgccggcatcaagaccatcaccatgctggacgagcagaaggagcagctgaacagaatcgaggagggcctggaccagatcaacaaggacatgagagagaccgagaagaccctgaccgagctgaacaagtgctgcggcctgtgcgtgtgcccctgcaacagaaccaagaacttcgagagcggcaaggcctacaagaccacctggggcgacggcggcgagaacagcccctgcaacgtggtgagcaagcagcccggccccgtgaccaacggccagctgcagcagcccaccaccggcgccgccagcggcggctacatcaagagaatcaccaacgacgccagagaggacgagatggaggagaacctgacccaggtgggcagcatcctgggcaacctgaaggacatggccctgaacatcggcaacgagatcgacgcccagaacccccagatcaagagaatcaccgacaaggccgacaccaacagagacagaatcgacatcgccaacgccagagccaagaagctgatcgacagctag

SEQ ID NO: 141106 - DNA, 636 bp, Artificial Sequence
  derived and/or modified sequence
atggacaatttgagttctgaggaaattcaacaaagagcacaccagattacagatgaatccctcgaatccacaagacgcatcctcgggctggcaatcgagagccaggatgccggcatcaaaacaataacgatgttagatgagcagaaagagcagcttaatagaatcgaggaagggttggatcagatcaacaaagatatgcgcgagacggagaagacactgaccgagctcaacaagtgttgcggcctttgtgtgtgtccttgcaataggactaaaaattttgagtcgggtaaggcgtacaagactacttggggggatgggggagaaaactctccttgtaatgtcgtatcaaagcagcccgggcctgtgacgaatggccagcttcagcaacccactacaggggccgctagtggaggctacatcaaacggattactaacgatgccagggaagacgagatggaggagaacctaacacaagttggaagcattctcggcaacctgaaggatatggccttgaatataggcaatgagatcgacgcacaaaaccctcagattaaacgcattaccgataaggctgataccaatcgggaccgtattgatatcgctaacgcacgggctaaaaaactcatagactcttag

SEQ ID NO: 141107 - DNA, 636 bp, Artificial Sequence
  derived and/or modified sequence
atggacaacctgagcagcgaggagatccagcagagggcccaccagatcacagatgagagcctggagagcacccggcgcatcctgggcctggccatcgagagccaggatgctggcatcaagaccatcaccatgctggatgagcagaaggagcagctgaacagaattgaggagggcctggaccagatcaacaaggacatgagggagacagagaagaccctgacagagctgaacaagtgctgcggcctgtgtgtgtgcccctgcaacagaaccaagaactttgaaagtggcaaggcctacaagaccacctggggagatggaggagagaacagcccctgcaatgtggtgtccaagcagcccggccctgtgaccaacggccagctgcagcagcccaccaccggggccgccagcggcggctacatcaagaggatcaccaatgatgccagagaagatgagatggaggagaacctgacccaggtgggcagcatcctgggcaacctgaaggacatggccctgaacattggaaatgaaattgatgcccagaacccccagatcaagaggatcacagacaaggctgacaccaacagagacagaattgacatcgccaatgcccgggccaagaagctgattgacagctag

SEQ ID NO: 141108 - DNA, 636 bp, Artificial Sequence
  derived and/or modified sequence
atggacaacctgagcagcgaggagatccagcagcgggcccaccagattaccgacgagagcttagagtcgacgagacggattctgggactcgctatcgagtcccaagacgccggcatcaagaccatcaccatgttggacgagcagaaggaacagttaaaccgaatagaggaaggactggaccagatcaacaaggacatgagagagacagaaaagaccctgacagagcttaataaatgctgtggtttgtgcgtgtgcccctgtaaccggaccaagaactttgagtcaggcaaggcctacaagacgacatggggcgacggcggcgagaacagcccctgtaacgtcgtgtcaaaacagcccgggccagtgactaacggccagctacagcaacccactacaggagcagctagcggcggttatatcaagcggatcaccaacgatgccagagaggacgagatggaagaaaacctcactcaggtaggctctattctcggcaacctgaaagacatggcccttaacatcggaaatgagatcgatgcacagaatccccagatcaagcgcattaccgacaaggccgacaccaacagagatagaatcgatatcgccaacgctcgggctaagaagctgattgactcctag

SEQ ID NO: 141109 - DNA, 636 bp, Artificial Sequence
  derived and/or modified sequence
atggataacttgagctctgaagaaatccagcaaagggcacaccaaatcaccgatgaatcactggagagcaccaggagaatccttggccttgcaatagagtctcaagacgccggtataaaaaccataaccatgctggatgagcaaaaggagcagcttaaccgcatcgaggagggacttgatcagatcaacaaagacatgcgtgaaaccgagaaaacattgacagagttgaacaagtgttgcggtctgtgtgtgtgtccatgtaatcggactaagaattttgaatcagggaaggcctacaagactacctggggagacggaggcgagaatagcccatgtaatgtggtttccaagcagcccggtcccgtcactaatggccagcttcagcagcccacaacaggcgctgcatcagggggatatattaaaaggattacaaacgacgccagagaggacgagatggaagaaaacctaacacaggttggaagcattttaggtaatctcaaagacatggctctgaatatcggcaacgaaatagatgctcagaacccacagatcaaacgtattacggataaagccgatacaaatcgcgaccggatcgacatcgccaacgctcgcgctaaaaaactcattgatagttag

SEQ ID NO: 141110 - DNA, 2344 bp, Artificial Sequence
  derived and/or modified sequence
aagtgagcaggcgcgcgggctcggcgcgcgcaggcgcgactagggtgcagcgccaggtccggtgttggggtgtccgagttgccgccggagaggagtggcctcgcccgcttgagttttgattcatcatggataatctgtcatcagaagaaattcaacagagagctcaccagattactgatgagtctctggaaagtacgaggagaatcctgggtttagccattgagtctcaggatgcaggaatcaagaccatcactatgctggatgaacaaaaggaacaactaaaccgcatagaagaaggcttggaccaaataaataaggacatgagagagacagagaagactttaacagaactcaacaaatgctgtggcctttgtgtctgcccatgtaatagaacaaagaactttgagtctggcaaggcttataagacaacatggggagatggtggagaaaactcaccttgcaatgtagtatctaaacagccaggcccggtgacaaatggtcagcttcagcaaccaacaacgggagcagccagtggtggatacattaaacgcataactaatgatgccagagaagatgaaatggaagagaacctgactcaagtgggcagtatcctgggaaatctaaaagacatggccctgaacataggcaatgagattgatgctcaaaatccacaaataaaacgaatcacagacaaggctgacaccaacagagatcgtattgatattgccaatgccagagcaaagaaactcattgacagctaaagctactgctgttcttctttatcatttattcacttccgtagctcctccttgaaagttattaccttttcagagtttaagttttcggttccacgctcttctaattgggagataatatggaagaagggccagagcagttacagccctccttcttttttgttttctgttgagggccgactgctgctctgccttccttctagtattttctttctcaattcatacgcttagattggttttcatatgtcatgtttagtgttttcatcctcctcatatacttcagcaggttcttttgctttcaagatttggaagcattgccaaagacagccatgaagaaggaagctgtagaggtgttttttgttgttgtttatttttgcttttgtggttgagggaaggacaagagataagaggttgttacctcagtaaaaaccttcaggccacaaagcaaaaagttgcatagccacaacgaagatctagttggatatagtttttgatttaagttgcagttatagccaatttaggctaatgcttggttttggagcttttatacacaacgtttttgttaggcatcacagttttgcaacctctgctccaaagagaaaaatagaatgagttttctttcttttttttttttttggagtcagagtctcgctctcttgtccaggctggagtgcaatagcgcgatctgggctcactgcaacctccgcctccctggttcaagcaattctcctgccttgcctcctgagtagctgggattacaggcgtgtgtcaccacgctcggctaatttttgtatttttagtagagacagggtttcaccatgtcaagctggtcttggactcctgacgtcgtgatccacccgccttggcctcccaaagtactgggattacaggcgtgagccactgtgcctggctgagttttcttaaagtgagcttaatttctgaactcttagtgattcatatatgtacataaatctgtgatcccatttcttattgcaccattcaggaacactttatataaatgagtggctttttatttcatattattagtagtatcatggttccattacaggcctattaacatcatacattgtcattagtctttgaagaaaaaatatgtaaatatatatgtgtaacatgagaatttctctctaaagcagggcttaaaattttttggaaaagtttgacaaagcataccacatgaattcagatttacctcaatgctaagaattatgtttagttaggaaaaaggaaagtcattttgacctcaggtagaaaaatagattgctttgagttttatgtagctttagactttaaaaagttagaatttattctgtaactaaaaattatttgaaaaaattatgcctctggtttaattattggtgattacacactctttctcttacccttgtgtattgaactatgtccataatcaagttgatgtggatcctgaaaagtgttatgaacatctgattggtatttgtcacatttattttaaaattagcatctgaacacttcaaagctgtcagtgtgtattggtttcaccaataaccactgcttgatccttacaattaaattttttaactaactaa

SEQ ID NO: 141111 - protein, 312 aa, Artificial Sequence
  derived and/or modified sequence
MAAQKINEGLEHLAKAEKYLKTGFLKWKPDYDSAASEYGKAAVAFKNAKQFEQAKDACLREAVAHENNRALFHAAKAYEQAGMMLKEMQKLPEAVQLIEKASMMYLENGTPDTAAMALERAGKLIENVDPEKAVQLYQQTANVFENEERLRQAVELLGKASRLLVRGRRFDEAALSIQKEKNIYKEIENYPTCYKKTIAQVLVHLHRNDYVAAERCVRESYSIPGFNGSEDCAALEQLLEGYDQQDQDQVSDVCNSPLFKYMDNDYAKLGLSLVVPGGGIKKKSPATPQAKPDGVTATAADEEEDEYSGGLC

SEQ ID NO: 141112 - DNA, 939 bp, Artificial Sequence
  derived and/or modified sequence
atggccgcccagaagatcaacgagggcctggagcacctggccaaggccgagaagtacctgaagaccggcttcctgaagtggaagcccgactacgacagcgccgccagcgagtacggcaaggccgccgtggccttcaagaacgccaagcagttcgagcaggccaaggacgcctgcctgagagaggccgtggcccacgagaacaacagagccctgttccacgccgccaaggcctacgagcaggccggcatgatgctgaaggagatgcagaagctgcccgaggccgtgcagctgatcgagaaggccagcatgatgtacctggagaacggcacccccgacaccgccgccatggccctggagagagccggcaagctgatcgagaacgtggaccccgagaaggccgtgcagctgtaccagcagaccgccaacgtgttcgagaacgaggagagactgagacaggccgtggagctgctgggcaaggccagcagactgctggtgagaggcagaagattcgacgaggccgccctgagcatccagaaggagaagaacatctacaaggagatcgagaactaccccacctgctacaagaagaccatcgcccaggtgctggtgcacctgcacagaaacgactacgtggccgccgagagatgcgtgagagagagctacagcatccccggcttcaacggcagcgaggactgcgccgccctggagcagctgctggagggctacgaccagcaggaccaggaccaggtgagcgacgtgtgcaacagccccctgttcaagtacatggacaacgactacgccaagctgggcctgagcctggtggtgcccggcggcggcatcaagaagaagagccccgccaccccccaggccaagcccgacggcgtgaccgccaccgccgccgacgaggaggaggacgagtacagcggcggcctgtgctag

SEQ ID NO: 141113 - DNA, 939 bp, Artificial Sequence
  derived and/or modified sequence
atggccgcccaaaaaatcaatgagggactggaacacttagccaaagctgaaaaatacttgaagaccgggttcttgaaatggaagccagattacgattcagccgctagcgagtacggcaaagccgccgttgcgtttaagaatgcaaagcagttcgaacaggccaaggacgcgtgtctaagggaggccgtggcacatgagaataaccgagctctgtttcacgctgcgaaggcctatgaacaggccggcatgatgcttaaggagatgcagaaactgcccgaggcggtgcagctgatcgaaaaggcctcaatgatgtacttggagaatggcactcccgatacggccgccatggccctagaacgcgccggcaaacttatcgaaaatgtggaccctgagaaagccgtccagctgtaccagcaaacggccaacgttttcgagaacgaggagaggctaagacaggcggtcgagctgctgggcaaagcgtcgagattgttggtgcggggtcgtagatttgacgaggcggccctgtccatccagaaagaaaagaacatttataaagagatagaaaattaccctacgtgctataagaaaaccatcgcccaggtgttggtgcatctccaccgcaacgattacgtcgctgcggagagatgcgtaagagagtcctattccatcccaggctttaatggctccgaggactgtgccgctctcgaacagttgcttgaagggtatgaccagcaagaccaggatcaggtgagcgatgtgtgtaacagcccactctttaaatatatggataacgattatgctaagcttgggctgtcccttgtagtcccgggcggcggaataaaaaaaaagtccccagcgacaccacaggccaagcctgatggcgtaacagctacggctgctgatgaggaagaagacgagtactcaggcggcctgtgctag

SEQ ID NO: 141114 - DNA, 939 bp, Artificial Sequence
  derived and/or modified sequence
atggccgcccagaagatcaatgaaggcctggagcacctggccaaggccgagaagtacctgaagacaggcttcctgaagtggaagccagactatgattctgctgcctctgaatatggcaaggctgctgtggccttcaagaatgccaagcagtttgagcaggccaaggatgcctgcctgcgggaggccgtggcccacgagaacaacagagccctcttccacgccgccaaggcctatgagcaggccggcatgatgctgaaggagatgcagaagctgcctgaggccgtgcagctgattgagaaggcctccatgatgtacctggagaatggcaccccagacacagctgccatggccctggagagagctgggaagctgattgaaaatgtggaccctgagaaggctgtgcagctgtaccagcagacagccaacgtgtttgaaaatgaggagcggctgcggcaggccgtggagctgctgggcaaggccagccggctgctggtgcggggccgccgctttgatgaagctgccctgagcatccagaaggagaagaacatctacaaggagattgagaactaccccacctgctacaagaagaccatcgcccaggtgctggtgcacctgcacagaaatgactatgtggccgctgagcgctgtgtgcgggagagctacagcatccctggcttcaatggaagtgaggactgtgccgccctggagcagctgctggagggctatgaccagcaggaccaggaccaggtgtctgatgtgtgcaacagccccctcttcaagtacatggacaatgactatgccaagctgggcctgagcctggtggtgcctgggggcggcatcaagaagaagagccctgccaccccccaggccaagccagatggagtgacagccacagctgctgatgaggaggaggatgagtacagcggcggcctgtgctag

SEQ ID NO: 141115 - DNA, 3711 bp, Artificial Sequence
  derived and/or modified sequence
agccttgacgcgctgcgcctgcgcaatgtctctttgcggggcgcaccggcaggctcccagccccgcttcgtcgcagcggcttgggccctccggccctccgtagccgctcgactgtcgcgctgcaccagcttcctcctcggcgttcccacgcctatttgggcggattcttggcgccggaggaagaggcagggtcaccctctctccacgtcagagacctgactgtggagatggcggctcagaagataaacgaggggctggaacacctcgccaaagcagagaaatacctgaaaactggttttttaaaatggaagccagattatgacagtgccgcttctgaatatggaaaagcagctgttgcttttaaaaatgccaaacagtttgagcaagcaaaagatgcctgcctgagggaagctgttgcccatgaaaataatagggctctttttcatgctgccaaagcttatgagcaagctggaatgatgttgaaggagatgcagaaactaccagaggccgttcagctaattgagaaggccagcatgatgtatctagaaaacggcaccccagacacagcagccatggctttggagcgagctggaaagcttatagaaaatgttgatccagagaaggctgtacagttatatcaacagacagctaatgtgtttgaaaatgaagaacgcttacgacaggcagttgaattactaggaaaagcctccagactactagtacgaggacgtaggtttgatgaggcggcactctctattcagaaagaaaaaaatatttataaggaaattgagaattatccaacttgttataagaaaacaattgctcaagtcttagttcatctacacagaaatgactatgtagctgcagaaagatgtgtccgggagagctatagcatccctgggttcaatggcagtgaagactgtgctgccctggaacagcttcttgaaggttatgaccagcaagaccaagatcaggtgtcagatgtctgcaactcaccgcttttcaagtacatggacaatgattatgctaagctgggcctgagtttggtggttccaggagggggaatcaagaagaaatcacctgcaacaccacaggccaagcctgatggtgtcactgccacggctgctgatgaagaggaagatgaatactcaggaggactatgctagtattttgcttgctgaaaagaaaagggaaacaaaggtaaaatcctgacatgccatttcaaggacttgggaatagattagggatatccgtacttcattacagtcatgattttggatcctaataaagactagtttttagttaccatcttcccaaatcactcattgtatccattacctgtgaagcatatctttttctttccataagagcttttctaagacaccagcaggaattaacagaaaatgtactgtcatgttttaatacattgattaaaaaatttgcaagccaaattatacataaattatgttctaaacaaaaggggtaataagcataggtattctctcttggacacttgtaagttactgttagtgaattgttttttacgtttcatttaataattgctgctaaaggtgatgtttactgataaatcattttaaaatttttttgttttgaaaagtaaatttatcccccatgatgttagatacatttaaattattaagtcttttcagagatgagatggggacaggaagttattttgagccttacaatattatttagcccaataaaagatgcattgaagctcttatatattatgagtttgaaaaattttgaaggtagcatattgaagtgatctataaatatcttcagtcctctctgaagtgtgggtatttcttctatctaaaaaatacatacagtgactgtcttcaaatctacttggttcttgaccaaataggagctaatgggtaatgaatacctttttgtttgtttgtttgtttgttttgttttttgtttttttttttaagggtctcactcttttgcccaggctggagtgcagtggcacaatcacggctcccaggctaatgtttttatttttaatttgtaattttttttttattttttttgttgagatggagttgctccatgttgcacaggctgttctcaaactcctaagctcaagccatctgcctgccttggcctcccaaagtgctgggattgtagacataagccacctcacccagcctatgaatatctttctaacattgtaagaatgaggtaatgtttccatcagtctaatacagatatatttcttccctccaaaacagtttattttgattgtttattttattttgattgtaactccgtcataacttgacatggaaaatgctatatactatgaaaacttagctgaaagggaagaattgttttagaaagacaatatttaaaacaccgcactgccaatatattgatcctttatagttatttcctaaaatgctgttttcgaaacattcctttttcaccctgttgtgtggcttagacccatctcgtaatctgttaattggaaagaggctacagacaccagcagtgtgcgttctgcaggtacacgctgccaaagtaattcctgctcatccatgccctgtctctgtctcttttagagtcataccttatttgagtataggttgcttaattttgctagacttcctgaaaacactaaggtggagtatcagaagtgattttagtcacagttctgcgggagagcttagaataacatcctcctttgggaggtggtctcgggtgcgtggatgttggtatacagtctttattgtaagtctgatacaaaatgctaataaatttaatgtttttcttccttaatttattggcatagttcttcaggtagcacctcatttttattaatgatattgggattaactatgaacaagctatatgtagacatttgcatttaaggacattgcagtgtttcaaagatcccatcattgcagcttgtatcctttagatccaatcggaaacttctggagtcttacattaatgctcatttgagctaattagtaatctgtttaaacagatttggcaatactttaaagatactgtagactatttatgtatagatagatcatattacccattaaagtctgggggaaaaaattttttaattttactcttcttatgtactgaaaactttttttaaaaaaggtgatgatgaagtgcattctgtagcagcagcgcagctatgctttaaaccacacaaaaggctgtgtccaggtgcagcctccttcacccttcctgcccacggtgaggattgaataaccaggacttggggatattgtttgttgtcagggttattctgtgtggtaaggaatatttgtttcacatttatacattttctttttccactcacgtaagtttctatcttgagagcatagtccaaagtgcaaaacttggtgtttacaaggaaaattgtcttccagaactccactgtcatcactttcaccaaagtggaagtttgcatgaatatgctcagaatctaatattcaatgttctgttacattgtaagtgaagtccagctacaaaatagatttaatatattgaatttatttgtacatatgcagagtacggtatttctgtatggaatctgctttattcctatttttcccaactctgatgagtagaatattaaatgtgttgttatggaaatacagattattgcttctataggaagataattatgaaaataaaacctgaaactatataaat

SEQ ID NO: 141116 - DNA, 1245 bp, Artificial Sequence
  derived and/or modified sequence
atttgggcggattcttggcgccggaggaagaggcagggtcaccctctctccacgtcagagacctgactgtggagatggcggctcagaagataaacgaggggctggaacacctcgccaaagcagagaaatactgttgcttttaaaaatgccaaacagtttgagcaagcaaaagatgcctgcctgagggaagctgttgcccatgaaaataatagggctctttttcatgctgccaaagcttatgagcaagctggaatgatgttgaaggagatgcagaaactaccagaggccgttcagctaattgagaaggccagcatgatgtatctagaaaacggcaccccagacacagcagccatggctttggagcgagctggaaagcttatagaaaatgttgatccagagaaggctgtacagttatatcaacagacagctaatgtgtttgaaaatgaagaacgcttacgacaggcagttgaattactaggaaaagcctccagactactagtacgaggacgtaggtttgatgaggcggcactctctattcagaaagaaaaaaatatttataaggaaattgagaattatccaacttgttataagaaaacaattgctcaagtcttagttcatctacacagaaatgactatgtagctgcagaaagatgtgtccgggagagctatagcatccctgggttcaatggcagtgaagactgtgctgccctggaacagcttcttgaaggttatgaccagcaagaccaagatcaggtgtcagatgtctgcaactcaccgcttttcaagtacatggacaatgattatgctaagctgggcctgagtttggtggttccaggagggggaatcaagaagaaatcacctgcaacaccacaggccaagcctgatggtgtcactgccacggctgctgatgaagaggaagatgaatactcaggaggactatgctagtattttgcttgctgaaaagaaaagggaaacaaaggtaaaatcctgacatgccatttcaaggacttgggaatagattagggatatccgtacttcattacagtcatgattttggatcctaataaagactagtttttagttaccatcttcccaaatcactcattgtatccattacctgtgaagcatatctttttctttccataagagcttttctaagacaccagcaggaattaacagaaaatgtactgtcatgttttaatacattgattaaaaaatttgcaagccaaattatacataaattat

SEQ ID NO: 141117 - DNA, 939 bp, Artificial Sequence
  derived and/or modified sequence
atggccgcccagaagatcaacgagggcctggagcacctggccaaggccgagaaatacttgaagacaggctttctgaagtggaagccagactacgacagcgccgcaagcgaatacggcaaggctgcggtagcattcaagaatgcgaagcagtttgagcaggccaaggacgcttgcctgcgggaagctgttgctcacgagaacaatcgggcactgttccatgccgccaaagcctacgaacaggccggaatgatgttgaaggaaatgcagaaattgcctgaagccgtccaactgattgagaaggcttccatgatgtaccttgagaatggcactcccgataccgctgccatggcactcgaacgcgctggcaaattgattgagaatgtggaccccgaaaaggcggttcagttgtaccaacaaacggcaaatgtcttcgagaacgaagaacgcctgagacaggcagtcgaactccttggaaaggcatctcgactgctcgttcgcgggcgaaggttcgacgaagctgccttaagcattcagaaagagaaaaacatttataaagagatagagaactacccgacatgctacaagaagacaattgctcaggtcctcgttcatctccaccggaatgactatgtggcagctgagcgatgcgttcgggaaagctatagcatacccggatttaatggttctgaagattgcgctgccttggaacagctactcgaggggtacgatcagcaagaccaggatcaggttagtgatgtgtgcaacagccccttgttcaagtatatggataacgattacgcgaaattaggcctctccctcgtcgtgccaggaggaggaatcaagaaaaagtccccagcgaccccgcaggccaagcctgacggtgtgaccgccacagccgccgatgaagaggaggacgaatacagcggcggcttgtgttag

SEQ ID NO: 141118 - DNA, 939 bp, Artificial Sequence
  derived and/or modified sequence
atggccgctcaaaagattaacgagggtctcgaacacctggccaaagccgagaagtacctcaagacaggattcctgaagtggaaacctgattacgactcggctgccagcgagtacggcaaggccgcagtggcttttaagaatgccaagcaatttgagcaggcgaaagatgcctgcctgcgcgaagctgtcgcacacgaaaacaatagagccctgttccatgccgctaaagcatatgagcaggccggaatgatgttgaaggagatgcaaaaactgcctgaggccgtgcagctcatagagaaggcctccatgatgtatctggaaaacgggactcccgacaccgctgcaatggcgctggagcgagccggtaaactcatagaaaatgttgaccctgagaaagctgtccagctctaccagcaaacagctaacgttttcgaaaacgaggaacggttgcggcaagctgtggagctgttgggcaaagcctctcggctgcttgttcgtggacgaagatttgacgaggccgctcttagcattcagaaggagaagaatatttacaaagagatcgaaaactatcccacctgttacaagaagaccatcgcacaggtgctggtccatctgcatcgcaacgattacgtggccgcagagcgctgcgtgcgcgagtcttattccattccaggctttaatggtagcgaagattgtgctgcgctggagcagctgctcgagggatatgatcaacaggaccaggaccaggtgagcgatgtgtgtaactcccctctatttaagtacatggataatgattatgcaaaactagggttgtccctggtggtgcccggtgggggaatcaagaaaaaatcccccgctacgccccaagccaagcccgatggcgtgacggctacggctgccgatgaggaagaggacgaatactctggcggtctgtgctag

SEQ ID NO: 141119 - protein, 295 aa, Artificial Sequence
  derived and/or modified sequence
MDNSGKEAEAMALLAEAERKVKNSQSFFSGLFGGSSKIEEACEIYARAANMFKMAKNWSAAGNAFCQAAQLHLQLQSKHDAATCFVDAGNAFKKADPQEAINCLMRAIEIYTDMGRFTIAAKHHISIAEIYETELVDIEKAIAHYEQSADYYKGEESNSSANKCLLKVAGYAALLEQYQKAIDIYEQVGTNAMDSPLLKYSAKDYFFKAALCHFCIDMLNAKLAVQKYEELFPAFSDSRECKLMKKLLEAHEEQNVDSYTESVKEYDSISRLDQWLTTMLLRIKKTIQGDEEDLR

SEQ ID NO: 141120 - DNA, 888 bp, Artificial Sequence
  derived and/or modified sequence
atggacaattcaggaaaggaagctgaggccatggcactgttggccgaggctgagagaaaggtgaaaaattctcagagctttttcagtgggctgttcggagggagcagcaaaatagaggaagcttgcgagatatatgcccgggccgcgaacatgtttaaaatggccaagaattggagcgctgcaggtaacgcattctgccaggcagctcagttgcacctacaattacaatcaaaacacgacgctgccacctgtttcgtcgatgccggcaacgctttcaagaaagctgatccgcaggaggccatcaactgtctgatgcgggcaatcgagatctacactgacatgggacggttcaccatcgccgcaaaacaccacatatccattgccgaaatatacgaaacagagctggttgacattgagaaagccatcgcgcactacgaacagagtgcagattattacaagggcgaagagagcaattcatccgccaataagtgtctcctcaaggtcgccggctacgctgccctgctagagcagtaccagaaagcaattgatatctacgaacaggtgggtacgaacgcgatggactctccgctgttaaaatatagtgctaaggactatttctttaaggctgccctctgccacttctgtatcgatatgctcaacgctaagttggctgtccagaaatacgaagagctctttcctgcgttttctgatagtagggagtgtaaactgatgaaaaaacttctggaggcccacgaggagcagaatgtggacagttacacagagtcagtgaaggaatacgactccatatcccgcctagatcaatggttaaccacaatgctccttcgcatcaagaagaccatccagggagatgaggaagatctgagatag

SEQ ID NO: 141121 - DNA, 888 bp, Artificial Sequence
  derived and/or modified sequence
atggacaacagcggcaaggaggccgaggccatggccctgctggccgaggccgagaggaaggtgaagaacagccagagcttcttcagcggcctgtttggaggcagcagcaagattgaggaggcctgtgagatctatgcccgggccgccaacatgttcaagatggccaagaactggagcgctgctggaaatgccttctgccaggccgcccagctgcacctgcagctgcagagcaagcatgatgctgccacctgctttgtggatgctggaaatgccttcaagaaggctgacccccaggaggccatcaactgcctgatgagggccatcgagatctacacagacatgggccgcttcaccatcgccgccaagcaccacatcagcattgctgagatctatgaaacagagctggtggacatcgagaaggccatcgcccactatgagcagagcgctgactactacaagggggaggagagcaacagcagcgccaacaagtgcctgctgaaggtggccggctacgccgccctgctggagcagtaccagaaggccatcgacatctatgagcaggtgggcaccaatgccatggacagccccctgctgaagtacagcgccaaggactacttcttcaaggccgccctgtgccacttctgcatcgacatgctgaatgccaagctggccgtgcagaagtatgaggagctgtttcctgccttcagtgacagccgggagtgcaagctgatgaagaagctgctggaggcccacgaggagcagaatgtggacagctacacagagagcgtgaaggagtatgacagcatcagccggctggaccagtggctgaccaccatgctgctgcgcatcaagaagaccatccagggagatgaggaggacctgaggtag

SEQ ID NO: 141122 - DNA, 888 bp, Artificial Sequence
  derived and/or modified sequence
atggacaacagcggcaaggaggccgaggccatggccctgctggccgaagccgagcgtaaagttaagaacagtcagtcattctttagcggtctgttcggcggttcaagtaagatagaagaggcctgtgagatctacgccagggctgcgaacatgttcaagatggccaaaaactggtcagctgctggtaacgcattctgtcaagccgcccagctgcacttacaacttcagtccaagcatgatgctgccacttgcttcgttgacgctggtaacgctttcaagaaagccgacccccaagaagcaattaactgcttgatgagagctatcgaaatctacactgacatgggccggtttaccatcgctgctaaacaccacattagcatcgctgaaatctacgaaacagaactcgtcgatatcgagaaagctattgcccattatgaacagtctgctgattactacaagggagaggagtctaattcgtctgccaacaaatgcctccttaaggtcgccgggtacgccgcattgttggagcagtaccagaaagcaatcgatatctacgagcaagttggcaccaatgcgatggactcaccccttttgaaatactctgccaaggactacttctttaaggctgctttgtgccatttttgcatcgacatgctgaatgctaaattagctgtgcagaagtacgaagaattatttccagccttctcagactcccgcgaatgcaaattgatgaagaagcttctggaggcacatgaggagcagaatgttgatagttacaccgaatctgtcaaggaatatgacagtatcagccggctggaccagtggctgacgaccatgctgttgagaattaaaaaaaccatacagggagacgaggaagatctgcgctag

SEQ ID NO: 141123 - DNA, 1842 bp, Artificial Sequence
  derived and/or modified sequence
tggagcgccgttcgccggtatgtgcgcatgcgttgaggtctcttgacgccgattggggggtcacgagtcacgggcggcgtgcggcggctggtgggggcgtgtccggcggagcgggcgcggcgttacgaggccgctggttggccagcgctagtcacgtggttcctggccgcaagcgacgcgcgccggtgcgacgtcaacgcagccgggcgagttttaccgatctgtgttccgcggcccggccgcggctgagtcttcccagggtcagggtcaggcgctttgctgagtccctttgtggccgccatggacaattccgggaaggaagcggaggcgatggcgctgttggccgaggcggagcgcaaagtgaagaactcgcagtccttcttctctggcctctttggaggctcatccaaaatagaggaagcatgcgaaatctacgccagagcagcaaacatgttcaaaatggccaaaaactggagtgctgctggaaacgcgttctgccaggctgcacagctgcacctgcagctccagagcaagcacgacgcagccacctgctttgtggacgctggcaacgcattcaagaaagccgacccccaagaggccattaactgtttgatgcgagcaatcgagatctacacagacatgggccgattcacgattgcggccaagcaccacatctccattgctgagatctatgagacagagttggtggacatcgagaaggccattgcccactacgagcagtctgcagactactacaaaggcgaggagtccaacagctcagccaacaagtgtctgctgaaggtggctggttacgctgcgctgctggagcagtatcagaaggccattgacatctacgaacaggtggggaccaatgccatggacagccccctcctcaagtacagcgccaaagactacttcttcaaggcggccctctgccacttctgcatcgacatgctcaacgccaagctggctgtccaaaagtatgaggagctgttcccagctttctctgattcccgggaatgcaagttgatgaaaaaattgctagaggcccacgaggagcagaatgtggacagctacaccgagtcggtgaaggaatacgactccatctcccggctggaccagtggctcaccaccatgctgctgcgcatcaagaagaccatccagggcgatgaggaggacctgcgctaagccccacccagccccccagtgcccgtcttcctgtcccatctgctcagagagaggtggggccgagacttgctggagagcttccctcctttcccatctggggagtgccgcgggccacagtgggcaggtggcaccgggggtcagcatgcaggggcgccagaggcccaggctgctggccggacagtcaccctctgttctcgctacatcccttgccccctgtccatttatttaagcccccataggtgcccttcacccccaaaaccagctgtacagaatctttgatacagacctatttgctaggggtgctgccggggatttggggtcagcatctggccccctatctcctgaccagctgagtcatgaggccggtttctctctctctcccacttttgtcccccagccaagctctaaagcacatgtagccgctgagacctgctgtttctgctgggggcaggctcctcttcccccagccccgggagcctcccccagcttcctgcagccccgacctctcaggttagaccctgggccctggagcttaggggattctccccaccccagccccacacctgctccttccctaatgctttgaggttttcttggttggaagctgcagctggcccaagaaagaaaataaaaaacaacacttttgcatgagtc

SEQ ID NO: 141124 - DNA, 888 bp, Artificial Sequence
  derived and/or modified sequence
atggacaacagcgggaaagaggccgaagctatggcccttctggctgaagctgagcggaaggtgaaaaactcccagtcatttttctcgggactgtttggaggctcctcgaaaattgaggaggcttgcgaaatctacgccagagcagcgaacatgtttaaaatggcaaagaactggtctgccgctggcaatgcattttgtcaggccgctcagctccacctgcaactgcagagcaagcacgacgccgctacttgcttcgtggacgctggaaatgcatttaaaaaagccgatccacaggaggctattaattgtctgatgcgagcgatcgagatctataccgacatgggcaggttcactattgctgcgaaacaccacatttcaatcgccgagatttatgagaccgagctggtcgatatcgagaaggcaattgcacattacgaacagtcagcggactattacaagggtgaggaaagcaactcgtccgccaacaagtgtctcctgaaggtcgccggttatgctgcgctcctggagcagtatcagaaggccatcgacatctacgaacaggttggaactaatgccatggacagcccactgttgaaatactcggctaaagattacttttttaaggccgcactctgtcacttttgcattgatatgctcaatgccaagctggcagtgcagaaatatgaggaactttttccagccttctctgacagccgcgaatgtaagctgatgaagaaattgttggaagcacacgaggagcagaatgtcgactcatacaccgagtctgttaaggagtatgattccatctctcgcctcgatcagtggttgactacaatgcttctcaggataaaaaaaacaatccagggtgatgaggaggacttgcgctag

SEQ ID NO: 141125 - DNA, 888 bp, Artificial Sequence
  derived and/or modified sequence
atggacaacagcggcaaggaggccgaggccatggccctgctggccgaggccgagagaaaggtgaagaacagccagagcttcttcagcggcctgttcggcggcagcagcaagatcgaggaggcctgcgagatctacgccagagccgccaacatgttcaagatggccaagaactggagcgccgccggcaacgccttctgccaggccgcccagctgcacctgcagctgcagagcaagcacgacgccgccacctgcttcgtggacgccggcaacgccttcaagaaggccgacccccaggaggccatcaactgcctgatgagagccatcgagatctacaccgacatgggcagattcaccatcgccgccaagcaccacatcagcatcgccgagatctacgagaccgagctggtggacatcgagaaggccatcgcccactacgagcagagcgccgactactacaagggcgaggagagcaacagcagcgccaacaagtgcctgctgaaggtggccggctacgccgccctgctggagcagtaccagaaggccatcgacatctacgagcaggtgggcaccaacgccatggacagccccctgctgaagtacagcgccaaggactacttcttcaaggccgccctgtgccacttctgcatcgacatgctgaacgccaagctggccgtgcagaagtacgaggagctgttccccgccttcagcgacagcagagagtgcaagctgatgaagaagctgctggaggcccacgaggagcagaacgtggacagctacaccgagagcgtgaaggagtacgacagcatcagcagactggaccagtggctgaccaccatgctgctgagaatcaagaagaccatccagggcgacgaggaggacctgagatag

SEQ ID NO: 141126 - protein, 665 aa, Artificial Sequence
  derived and/or modified sequence
MDRPAAAAAAGCEGGGGPNPGPAGGRRPPRAAGGATAGSRQPSVETLDSPTGSHVEWCKQLIAATISSQISGSVTSENVSRDYKALRDGNKLAQMEEAPLFPGESIKAIVKDVMYICPFMGAVSGTLTVTDFKLYFKNVERDPHFILDVPLGVISRVEKIGAQSHGDNSCGIEIVCKDMRNLRLAYKQEEQSKLGIFENLNKHAFPLSNGQALFAFSYKEKFPINGWKVYDPVSEYKRQGLPNESWKISKINSNYEFCDTYPAIIVVPTSVKDDDLSKVAAFRAKGRVPVLSWIHPESQATITRCSQPLVGPNDKRCKEDEKYLQTIMDANAQSHKLIIFDARQNSVADTNKTKGGGYESESAYPNAELVFLEIHNIHVMRESLRKLKEIVYPSIDEARWLSNVDGTHWLEYIRMLLAGAVRIADKIESGKTSVVVHCSDGWDRTAQLTSLAMLMLDSYYRTIKGFETLVEKEWISFGHRFALRVGHGNDNHADADRSPIFLQFVDCVWQMTRQFPSAFEFNELFLITILDHLYSCLFGTFLCNCEQQRFKEDVYTKTISLWSYINSQLDEFSNPFFVNYENHVLYPVASLSHLELWVNYYVRWNPRMRPQMPIHQNLKELLAVRAELQKRVEGLQREVATRAVSSSSERGSSPSHSATSVHTSV

SEQ ID NO: 141127 - protein, 568 aa, Artificial Sequence
  derived and/or modified sequence
MDRPAAAAAAGCEGGGGPNPGPAGGRRPPRAAGGATAGSRQPSVETLDSPTGSHVEWCKQLIAATISSQISGSVTSENVSRDYKALRDGNKLAQMEEAPLFPGESIKAIVKDVMYICPFMGAVSGTLTVTDFKLYFKNVERDPHFILDVPLGVISRVEKIGAQSHGDNSCGIEIVCKDMRNLRLAYKQEEQSKLGIFENLNKHAFPLSNGQALFAFSYKEKFPINGWKVYDPVSEYKRQGLPNESWKISKINSNYEFCDTYPAIIVVPTSVKDDDLSKVAAFRAKGRVPVLSWIHPESQATITRCSQPLVGPNDKRCKEDEKYLQTIMDANAQSHKLIIFDARQNSVADTNKTKGGGYESESAYPNAELVFLEIHNIHVMRESLRKLKEIVYPSIDEARWLSNVDGTHWLEYIRMLLAGAVRIADKIESGKTSVVVHCSDGWDRTAQLTSLAMLMLDSYYRTIKGFETLVEKEWISFGHRFALRVGHGNDNHADADRSPIFLQFVDCVWQMTRQFPSAFEFNELFLITILDHLYSCLFGTFLCNCEQQRFKEAWGAGTQRARGSLRSR

SEQ ID NO: 141128 - protein, 571 aa, Artificial Sequence
  derived and/or modified sequence
MEEAPLFPGESIKAIVKDVMYICPFMGAVSGTLTVTDFKLYFKNVERDPHFILDVPLGVISRVEKIGAQSHGDNSCGIEIVCKDMRNLRLAYKQEEQSKLGIFENLNKHAFPLSNGQALFAFSYKEKFPINGWKVYDPVSEYKRQGLPNESWKISKINSNYEFCDTYPAIIVVPTSVKDDDLSKVAAFRAKGRVPVLSWIHPESQATITRCSQPLVGPNDKRCKEDEKYLQTIMDANAQSHKLIIFDARQNSVADTNKTKGGGYESESAYPNAELVFLEIHNIHVMRESLRKLKEIVYPSIDEARWLSNVDGTHWLEYIRMLLAGAVRIADKIESGKTSVVVHCSDGWDRTAQLTSLAMLMLDSYYRTIKGFETLVEKEWISFGHRFALRVGHGNDNHADADRSPIFLQFVDCVWQMTRQFPSAFEFNELFLITILDHLYSCLFGTFLCNCEQQRFKEDVYTKTISLWSYINSQLDEFSNPFFVNYENHVLYPVASLSHLELWVNYYVRWNPRMRPQMPIHQNLKELLAVRAELQKRVEGLQREVATRAVSSSSERGSSPSHSATSVHTSV

SEQ ID NO: 141129 - DNA, 1998 bp, Artificial Sequence
  derived and/or modified sequence
atggacagacccgccgccgccgccgccgccggctgcgagggcggcggcggccccaaccccggccccgccggcggcagaagaccccccagagccgccggcggcgccaccgccggcagcagacagcccagcgtggagaccctggacagccccaccggcagccacgtggagtggtgcaagcagctgatcgccgccaccatcagcagccagatcagcggcagcgtgaccagcgagaacgtgagcagagactacaaggccctgagagacggcaacaagctggcccagatggaggaggcccccctgttccccggcgagagcatcaaggccatcgtgaaggacgtgatgtacatctgccccttcatgggcgccgtgagcggcaccctgaccgtgaccgacttcaagctgtacttcaagaacgtggagagagacccccacttcatcctggacgtgcccctgggcgtgatcagcagagtggagaagatcggcgcccagagccacggcgacaacagctgcggcatcgagatcgtgtgcaaggacatgagaaacctgagactggcctacaagcaggaggagcagagcaagctgggcatcttcgagaacctgaacaagcacgccttccccctgagcaacggccaggccctgttcgccttcagctacaaggagaagttccccatcaacggctggaaggtgtacgaccccgtgagcgagtacaagagacagggcctgcccaacgagagctggaagatcagcaagatcaacagcaactacgagttctgcgacacctaccccgccatcatcgtggtgcccaccagcgtgaaggacgacgacctgagcaaggtggccgccttcagagccaagggcagagtgcccgtgctgagctggatccaccccgagagccaggccaccatcaccagatgcagccagcccctggtgggccccaacgacaagagatgcaaggaggacgagaagtacctgcagaccatcatggacgccaacgcccagagccacaagctgatcatcttcgacgccagacagaacagcgtggccgacaccaacaagaccaagggcggcggctacgagagcgagagcgcctaccccaacgccgagctggtgttcctggagatccacaacatccacgtgatgagagagagcctgagaaagctgaaggagatcgtgtaccccagcatcgacgaggccagatggctgagcaacgtggacggcacccactggctggagtacatcagaatgctgctggccggcgccgtgagaatcgccgacaagatcgagagcggcaagaccagcgtggtggtgcactgcagcgacggctgggacagaaccgcccagctgaccagcctggccatgctgatgctggacagctactacagaaccatcaagggcttcgagaccctggtggagaaggagtggatcagcttcggccacagattcgccctgagagtgggccacggcaacgacaaccacgccgacgccgacagaagccccatcttcctgcagttcgtggactgcgtgtggcagatgaccagacagttccccagcgccttcgagttcaacgagctgttcctgatcaccatcctggaccacctgtacagctgcctgttcggcaccttcctgtgcaactgcgagcagcagagattcaaggaggacgtgtacaccaagaccatcagcctgtggagctacatcaacagccagctggacgagttcagcaaccccttcttcgtgaactacgagaaccacgtgctgtaccccgtggccagcctgagccacctggagctgtgggtgaactactacgtgagatggaaccccagaatgagaccccagatgcccatccaccagaacctgaaggagctgctggccgtgagagccgagctgcagaagagagtggagggcctgcagagagaggtggccaccagagccgtgagcagcagcagcgagagaggcagcagccccagccacagcgccaccagcgtgcacaccagcgtgtag

SEQ ID NO: 141130 - DNA, 1998 bp, Artificial Sequence
  derived and/or modified sequence
atggacaggcccgctgccgccgcagctgccggatgtgaagggggaggaggaccgaaccccggcccggccggggggaggcgcccacctagagccgcgggcggcgccacagccggaagcaggcagccctctgtggaaactctggattctcccacaggatcccacgtcgagtggtgcaagcaactgatcgccgccacaatatcttctcaaatctccggatccgtcacctctgagaacgtatcgagggactataaggcactgcgcgacggaaataaactagcccagatggaggaggcaccattgttccccggggaatcaatcaaagctattgtgaaggatgttatgtatatttgtccgttcatgggagcagtgtcaggcactctcaccgtgactgacttcaaattgtattttaaaaacgtggaacgggatccacattttatactcgatgtcccgctaggggtgatatcgcgggtagagaaaattggcgcacaaagccatggcgacaatagttgcgggattgaaatagtctgcaaggatatgcgcaatctgcgactggcatacaaacaggaggagcaaagcaaactaggtattttcgaaaatctgaacaagcatgcatttcctctttctaatggccaggccctctttgcattttcctacaaggagaaattccctatcaatggctggaaagtgtacgaccccgtctctgaatataagcgtcaggggctgcctaatgagtcatggaagatctctaagattaacagtaattacgagttctgcgacacctaccctgccatcattgtcgtgccgacttccgtcaaagacgacgatctatccaaggtcgctgcttttcgcgctaaaggcagagtcccagtccttagttggattcaccccgagtcacaagccaccattacacggtgcagccaaccactggttggccctaacgataaaaggtgtaaagaagacgagaaatacctgcagactatcatggatgccaatgcgcaatcccataagctaattatctttgatgctaggcagaattcggtcgcagacactaataagaccaaaggaggcggctacgaaagtgagagcgcatatcccaacgcagaacttgtgtttctcgagattcataatattcatgtgatgcgtgagtccttacgaaagctgaaagaaattgtgtatccctctatcgacgaggcccggtggctctccaacgtggacggcacacactggctcgagtacatcagaatgcttttagccggcgcagtccgcatagctgataagatcgagtctggtaagacgagcgtggtcgtccattgcagcgatgggtgggacagaacagcacagctcactagtctcgccatgctgatgctcgacagctactatcgaacgatcaaggggtttgaaaccctcgtggaaaaggaatggataagcttcgggcaccggttcgccctcagggtagggcacggcaacgacaatcatgccgatgccgatcgaagccccatttttctgcagttcgtagattgcgtttggcagatgacgcggcagttcccgtccgcattcgagttcaacgaactgttcctgatcacaatcctcgatcatctgtattcttgtttattcggcaccttcctctgtaactgcgagcagcagaggttcaaggaggacgtatacacaaaaaccataagcctttggtcatatatcaactctcagttggacgagttcagcaacccattctttgtgaattacgagaaccatgttctttatcccgtcgcatctttatcccacttggagctgtgggtgaactattatgtgcgatggaaccccagaatgcgcccgcagatgccaattcaccaaaatttgaaggaattgctggccgtgagggccgagctgcagaagagagtagagggactgcagagagaggtggctacaagggcagtgtccagttccagcgaaagaggctcttccccgtcacactcggccacgtcagtacatacttcggtctag

SEQ ID NO: 141131 - DNA, 1998 bp, Artificial Sequence
  derived and/or modified sequence
atggacaggcctgctgctgctgctgctgctggctgtgagggcggcggcggccccaaccctggccctgctgggggccggcggccccccagggctgctgggggcgccacagctggcagccggcagcccagcgtggagaccctggacagccccaccggcagccacgtggagtggtgcaagcagctgattgctgccaccatcagcagccagatcagcggctctgtgaccagtgaaaatgtgtcccgggactacaaggccctgagagatggcaacaagctggcccagatggaggaggcccccctcttccctggagagagcatcaaggccatcgtgaaggatgtgatgtacatctgccccttcatgggcgctgtgtctggcaccctgactgtgacagacttcaagctgtacttcaagaatgtggagcgggacccccacttcatcctggatgtgcccctgggcgtcatcagccgggtggagaagatcggggcccagagccatggagacaacagctgtggcatcgagatcgtgtgcaaggacatgaggaacctgcggctggcctacaagcaggaggagcagagcaagctgggcatctttgagaacctgaacaagcacgccttccccctgagcaatggccaggccctgtttgccttctcctacaaggagaagttccccatcaatggctggaaggtgtatgaccctgtgtctgagtacaagaggcagggcctgcccaatgaatcctggaagatcagcaagatcaacagcaactatgagttctgtgacacctacccagccatcatcgtggtgcccacctctgtgaaggatgatgacctgagcaaggtggccgccttccgggccaagggccgggtgcctgtgctgtcctggatccaccctgagagccaggccaccatcacccgctgcagccagcccctggtgggccccaatgacaagcgctgcaaggaggatgagaagtacctgcagaccatcatggatgccaatgcccagagccacaagctgatcatctttgatgcccggcagaacagcgtggccgacaccaacaagaccaagggcggcggctatgagagcgagagcgcctacccaaatgctgagctggtgttcctggagatccacaacatccacgtgatgagggagagcctgaggaagctgaaggagatcgtgtaccccagcattgatgaggcccgctggctgagcaatgtggatggcacccactggctggagtacatccgcatgctgctggccggggctgtgagaattgctgacaagattgaaagtggcaagacctctgtggtggtgcactgcagtgatggctgggacagaacagcccagctgaccagcctggccatgctgatgctggacagctactaccgcaccatcaagggctttgagaccctggtggagaaggagtggatcagctttggccacagatttgccctgcgggtgggccatggaaatgacaaccacgcagatgctgacaggagccccatcttcctgcagtttgtggactgtgtgtggcagatgacccggcagttccccagcgcctttgagttcaatgagctgttcctgatcaccatcctggaccacctgtacagctgcctgtttggcaccttcctgtgcaactgtgagcagcagcgcttcaaggaggatgtgtacaccaagaccatcagcctgtggagctacatcaacagccagctggatgagttcagcaaccccttctttgtgaactatgaaaatcatgtgctgtaccctgtggccagcctgagccacctggagctgtgggtgaactactacgtgcgctggaaccccaggatgaggccccagatgcccatccaccagaacctgaaggagctgctggccgtgcgggcagagctgcagaagagggtggagggcctgcagcgggaggtggccaccagggctgtgagcagcagcagcgagcggggcagcagccccagccacagcgccacctctgtgcacacctctgtgtag

SEQ ID NO: 141132 - DNA, 1998 bp, Artificial Sequence
  derived and/or modified sequence
atggaccggcccgccgccgccgccgccgccggctgcgagggcggcggtggtcctaaccctggtcccgcagggggtcgaaggcctccgcgagcggccggcggagccaccgccggcagcagacagccatctgtcgaaaccctggacagtccgaccggtagccatgtagaatggtgcaaacagctcattgccgcaacgatcagtagtcagatttccggtagcgtgacatccgagaatgtttcccgagattacaaggctcttcgcgacggaaacaagctcgctcagatggaagaagcacctctttttccaggagagagtatcaaggccatagtgaaagacgttatgtatatctgcccgttcatgggagccgtttccggtaccctaacagtgaccgacttcaaactatacttcaagaacgttgagagggaccctcacttcattttggacgtgccattaggagtcatttccagagtagaaaagatcggggcacagtcacatggtgataacagttgtggaattgagatcgtgtgcaaggacatgcgcaaccttcgcctggcctacaaacaggaggaacagagcaaactgggaatattcgagaatctaaacaaacacgctttccctctgagtaatgggcaggcactgttcgcgttctcctataaagaaaagttccccataaatggctggaaggtgtacgatccagttagtgaatacaaaagacagggactgccaaatgagtcgtggaaaatcagtaaaataaattcaaattacgaattctgcgatacctatccagccatcattgttgtgccgacgagcgtgaaggatgatgatctgagtaaggtggcggcttttagggccaagggacgagtgcccgttttaagttggatccatcccgagtcacaagctacaatcacccgttgttcacaacctcttgtaggacccaatgataaacgctgtaaagaagatgaaaaatacctgcaaaccatcatggacgcaaatgcgcagtcacacaaacttattattttcgacgcccgccagaattcagtcgccgacaccaacaagactaaaggtggtggctacgagagtgagtcagcttatccaaacgcagagttggtcttccttgagatccataacatccatgtgatgcgcgagtctctccgcaagctcaaagagatcgtgtacccctctatcgacgaagctcgctggctctctaatgtggatggcactcactggttggagtacatccggatgctcctcgctggagccgtgagaatcgcggacaaaatcgagagtgggaagacaagcgttgttgtccactgctctgacggctgggacaggactgcccagctgaccagcctggccatgttgatgctcgatagctattatcgaaccatcaagggctttgagaccctggtggaaaaggagtggatttcctttggacaccgcttcgccctacgcgtgggacatgggaatgataatcacgcagacgccgaccggtccccaatcttcctgcaatttgtggattgcgtttggcaaatgacgcgccaatttccgtccgcttttgagttcaatgagctctttttgattacaattctagatcacctgtactcctgtctttttggcacattcctctgtaactgcgagcagcaaagattcaaagaggacgtgtacacgaagaccatcagtctctggagctacattaacagccaactggacgagttttccaatccatttttcgtcaactatgagaaccatgtgctgtatccagtggcctctctgtcccaccttgaactgtgggtgaattattacgtgcgctggaatccaaggatgagaccacaaatgccgatccatcaaaatctgaaagagctcctggctgttcgggcagagttgcagaaaagggtcgagggactccagcgagaggtggcaacccgggcagtatcctcatcctctgaaagaggctccagtccaagtcacagcgccaccagcgttcatacatctgtgtag

SEQ ID NO: 141133 - DNA, 2755 bp, Artificial Sequence
  derived and/or modified sequence
gggtaacgcggggccgccaggtgacagctaatggcggcggccgcctgaggcgggcgggcggtatagagcgggcggcaggaggcaagcagcgaaaccttcccggccgccgctcccgtcccgacggcggcttccccaaggcggcaggactcggcgcgccatggacaggccggcggcggcggcggcggcgggctgcgagggcggcgggggcccgaacccggggccggcgggcggcaggaggcctcctcgggccgcggggggcgccaccgccggctcccggcagcccagcgtggagaccctggacagtcccacaggatcacatgttgaatggtgtaaacagcttatagctgctacaatttctagtcagatttcaggttcagtgacatcagaaaatgtgtccagagattacaaggctctaagggatggaaataagctggcacagatggaagaggctccacttttcccaggagaatcaattaaagccattgtgaaagatgtcatgtatatctgcccatttatgggagcagtgagtggaaccctgacagtgacggactttaagctgtacttcaaaaatgtcgagagggacccgcattttatccttgatgttccccttggagtgatcagcagagtggagaagattggagcacagagccatggagacaattcctgtggtatagagatagtgtgcaaggatatgaggaacttgcggcttgcttataaacaggaagaacagagtaaactagggatatttgaaaacctcaacaaacatgcatttcctctttctaacggacaggcactatttgcattcagctataaagaaaaatttccaattaatggctggaaagtttatgatccagtatctgaatataagagacagggcttgccaaatgagagttggaaaatatccaaaataaacagtaattatgagttctgtgacacctaccctgccatcattgttgtgccaactagtgtaaaagatgatgacctttcaaaagtggcagcttttcgagcaaaaggcagagtccctgtgttgtcatggattcatccggaaagtcaagcaacgattacccgttgcagccagccacttgtgggtcccaatgataagcgctgcaaagaggatgaaaaatacttgcaaacaataatggatgctaacgcacagtcacacaagcttatcatctttgatgctcgacaaaacagtgtcgctgataccaacaagacaaagggtggaggatatgaaagtgaaagtgcttacccaaatgcagaacttgtgttcttggagatccacaacattcatgtcatgcgagagtcactacgcaaattaaaagagattgtgtacccttcgatcgatgaggcgcggtggctctccaatgtggatgggacgcattggctggaatatataaggatgctgcttgctggggcagtaagaattgctgataaaatagaatctgggaaaacatctgtggtggtgcattgcagcgacggttgggaccgaacagcccagctcacatctctggctatgctaatgttggacagttactacaggaccattaaaggatttgaaactctcgtagaaaaggagtggataagctttggacacaggtttgcactgcgagtgggccatggtaatgacaaccatgcggatgctgaccgatctcccatatttctgcagtttgttgattgtgtttggcaaatgacaaggcagtttccttcagcattcgagtttaatgagctattcttgattacaattttggatcacctttatagctgtctttttgggacctttttgtgcaactgtgaacagcagcgattcaaagaggatgtatatacaaagacgatatctttatggtcgtatatcaatagccagctagacgagttttctaatcccttctttgtgaattatgaaaaccacgtgttatatcctgttgctagtctgagtcatttggaattgtgggtaaattattatgtacgatggaatccacggatgagacctcagatgcccattcaccagaatctcaaggagctgctggccgtcagggcggagctgcagaagcgtgtggagggcctacagcgggaggtggccacgcgcgccgtctcatcctcatctgagcggggctcctcgccctcccactccgccacctccgtccacacctcggtctgatgggcgagaaatatgtaatcccctggctgactaggactgttaaacatagtgtggactggatgatgccttcgacaaaccagagaagccaagttggggggagctggtgcctggagtgggccctgtgcacctcacctggcggaggctggggggggctctgtcagcaggaccctagaggagactctcattcgattttaaagaagcacaacgggtcattttcctttgtatgttcctagcgcagaactgtttctaaaacaacttgaagtatagttttgttatctaagcaatttttgttttaagtaagtaagtgtactagaatgcgaagccgttatggttcaggtttttaaaaactggtacagtattgtatttgtctcatctgttgcactgtatttcaatcatctgtaattaaaatgatcatatgtttgctccctggtcttttttaagtaagtaagtaagtatcttagtagatttttcctttgaggaaaatcggtaataaaataacatggattgaatgtttactgtgcgtcaagcacagttaatatatgatgatgtaaagtaactaactttatgtgatttaattcattcagtaaattgtaaatgtat

SEQ ID NO: 141134 - DNA, 1998 bp, Artificial Sequence
  derived and/or modified sequence
atggacagacctgccgctgcggctgctgctggctgcgaagggggaggaggacctaacccaggacctgctggcggacgcagacctccacgagccgcaggcggtgcaacagccggatcccgtcagccatctgttgaaacactcgattctcccactggatctcacgttgagtggtgtaagcagctgatagctgcaaccatcagctctcagatttctggctccgtcacttcagagaatgtgagccgggactacaaggcactccgggacggtaacaaacttgcacagatggaggaggcacctttgttcccaggggagagtattaaagccatagtaaaggatgttatgtatatctgccctttcatgggggcagtttccgggacgctgaccgttacagactttaaactgtattttaagaacgtggaacgcgaccctcatttcattttagatgtgccgctgggtgtcatctctagagtagaaaaaatcggggcacagtcgcatggcgacaatagctgcggtatagaaattgtgtgtaaggacatgaggaaccttaggctggcttataaacaagaagaacagagtaagttgggcatctttgagaatctgaacaagcacgcatttcctttgtccaacgggcaagccctatttgccttctcttataaggagaagtttccaataaatgggtggaaggtgtacgacccagtctctgagtataaacggcaaggcctccccaatgagagctggaagatcagcaagattaatagcaattacgagttctgcgacacttatcccgctataatcgtcgttccaacctcagtcaaagacgacgacctaagtaaggtggctgcgttccgggcaaagggcagagtccccgtgttgtcttggatccatcctgagagtcaagccaccataacccggtgttcacaaccgctggtgggacccaacgacaagaggtgcaaggaagacgagaaatacttacagacgatcatggacgcaaatgcacagtcccataagttgatcatatttgacgctcggcagaatagtgtagctgacaccaacaagaccaagggagggggatacgaaagtgaatctgcttatcctaatgctgagctagtctttctggaaatccataacattcatgtgatgcgggagtcgctgaggaaattaaaggagatcgtgtaccccagcattgatgaggctcgttggctgtctaacgtcgatggaacacattggctggagtacatccgaatgctcctggcgggagcggttcgcatcgcagataaaatcgagtcagggaagacgtcagtcgttgtccactgttctgatgggtgggatcgaactgcccagctgactagtttagccatgctgatgctcgattcctattataggacaatcaagggcttcgaaacgctcgtagaaaaagagtggattagttttgggcaccggtttgccttgcgggttggccacggtaacgataaccacgcggacgccgatcgtagtccgattttcttacagttcgtcgactgcgtctggcagatgacgcgacagtttccatccgcctttgagttcaatgagctgttcctgattactatcctagaccatctgtactcatgtctatttggcacgtttctgtgtaattgcgaacagcagagatttaaagaggatgtatatacgaaaactatttccctgtggtcatatattaatagccagctggatgaattctccaatccttttttcgtgaattatgagaaccacgttttataccccgtcgcttccttatcgcatcttgagttgtgggtcaattattatgtcaggtggaatcccagaatgaggcctcaaatgcccattcaccagaatttaaaggagctcctggctgtgcgcgcagagttgcagaaacgggtcgagggactccaacgggaagttgcaacccgtgccgtgtcttctagctcggaaaggggaagcagcccttcacattctgcgacctcagtgcacacaagtgtctag

SEQ ID NO: 141135 - DNA, 1998 bp, Artificial Sequence
  derived and/or modified sequence
atggatcgccctgctgccgcagccgccgcaggctgtgaaggggggggcgggccaaatcctggccctgccggggggcggagacctccccgcgcagctggaggtgctaccgccggttcaagacagccctccgtggagacattggactctcctacaggatcacatgtggaatggtgcaagcaattaatcgccgcgacgatttccagtcagatctctggctctgtcacctccgaaaacgtgtccagggactataaggctctacgggacggtaataagctggctcagatggaagaagctcctctctttccaggtgagagtatcaaggccattgtcaaggacgtaatgtatatctgtcctttcatgggcgccgtgtccggaacccttacggtgaccgattttaagctgtattttaaaaatgtggaaagggatccacatttcatcctggatgtgccgctgggcgttatttcccgggttgagaagatcggagcccagtcccatggcgacaattcctgcggcatagaaattgtatgtaaagacatgcgcaacctcaggctcgcgtataaacaagaagaacagagtaaactaggaattttcgagaacctcaacaaacacgcattccctctgagcaatgggcaggctctgtttgcattttcttataaggagaaattccccattaacggctggaaggtgtacgatccagtgagtgagtacaagcgtcagggcctgcccaacgaaagctggaaaatcagtaaaattaacagtaactacgaattttgcgatacctatcccgctataattgtggtgcctactagcgtgaaagatgacgacttgtccaaagtggccgctttccgcgctaaggggagagtccccgtgctgagttggatccaccctgaaagccaggccacaataacccgttgttctcagcctttggtcggacccaatgacaaacggtgtaaagaggacgagaaatacctgcaaaccattatggatgcaaatgcgcagagtcataagctgattattttcgatgccagacaaaattcagtcgccgatacaaacaaaacgaaaggcggcgggtacgagtcagagtcggcttaccccaacgctgaactcgtcttcctcgagatccacaacatacacgtgatgcgagagagtcttcgcaagcttaaggagatcgtctatccctcaatagatgaggctaggtggctgagtaatgtggacggcacacactggctggagtatatcaggatgcttctggccggggcggtaaggattgccgataagattgagagcgggaagaccagtgtcgtggttcattgttctgacggctgggaccggactgcacaattgacatccctggctatgttaatgctcgactcatactatagaactattaaggggtttgaaactttggtcgagaaagagtggatctctttcgggcaccgcttcgccttaagggtaggtcatggcaacgataaccatgcagatgctgaccgatcaccaatttttcttcagtttgtcgattgtgtgtggcagatgacacggcaattcccctccgccttcgagttcaatgagctctttctcataaccatcttagatcacctatattcgtgtctgtttggcactttcttgtgcaattgtgagcagcagagatttaaagaagacgtctataccaagactataagcctgtggagttatattaattcacaactagatgaatttagtaatccattcttcgtgaattatgaaaatcacgtcctatatccggttgcgtcacttagccacctggaactttgggtgaactactacgtgcgctggaacccccgaatgcggccgcaaatgccaattcatcagaatctcaaggaattactagctgtaagggctgagttacagaaacgtgtcgaggggctgcagagggaggtggccacccgtgcggtctccagcagttccgagagaggaagctccccatcccattccgctacttcagtgcatacaagcgtctag

SEQ ID NO: 141136 - DNA, 1707 bp, Artificial Sequence
  derived and/or modified sequence
atggacaggcccgccgccgccgctgccgccgggtgcgaggggggcgggggaccgaatcccggcccagccggggggcgccgacctccgcgcgctgctgggggagctacagccggatccagacagcccagcgtggaaaccctggacagtcccactggttctcatgtagagtggtgcaagcagctcatcgctgctactatctcatctcaaatcagcggatccgtgactagtgagaatgtcagtagagattataaagcgctccgcgacgggaacaaacttgctcagatggaagaagcacccctatttcccggcgagtctataaaggccatcgtgaaggatgtcatgtatatttgtcctttcatgggtgcagtgtccgggacactcactgtcacagatttcaaactgtatttcaaaaacgtggagcgtgaccctcatttcatccttgatgtaccactgggtgtcattagccgtgtggagaagattggagcccagtcacatggcgacaattcatgcggaatagaaatcgtgtgcaaggatatgagaaacctaaggttggcctacaagcaagaggaacagtccaagctggggatcttcgagaatctgaacaagcatgcattccccctgtcgaacggtcaagcattgtttgcatttagttataaggagaagtttccaataaatggctggaaagtgtacgaccctgtgtccgagtataagcggcagggacttcccaacgaatcatggaagatttctaagatcaactccaattatgaattctgcgatacttaccccgcaatcattgtcgttcctacgtctgtaaaggacgatgacttgtccaaagtggctgcttttagagcaaaaggcagggtcccggtgctgagctggatccatcccgaatcgcaggctacaattacacgatgtagccagcctttagttggccctaatgacaaacgatgcaaagaggatgaaaagtacctccagacaatcatggatgccaatgcccaaagccacaaactcatcatatttgatgcgcggcagaatagtgtggctgataccaataaaaccaaaggaggtgggtacgaaagtgagtctgcttaccccaatgctgagctggtgtttcttgagatacataacattcacgtcatgcgtgagtccctcagaaaactcaaggagattgtgtacccttccatcgacgaggcacggtggctgagcaatgtggatggcacccactggttagagtacattagaatgctcctggccggtgcggttcggatcgccgataaaattgagtcaggcaaaacaagcgtggtggtgcattgctcggatggatgggacaggactgcccagctaacctccttagctatgctgatgctggactcttactatcgaacgatcaaggggttcgaaacattggtagaaaaggagtggatatcgttcggtcacaggttcgcgctccgcgtgggacatggcaatgataaccatgcggacgccgacagatcgcccatatttctgcagttcgtagattgcgtctggcagatgacaagacaattccctagtgccttcgagtttaatgaactctttctgattactatccttgaccatctctactcctgccttttcggcacttttctgtgcaattgcgaacagcagcgctttaaggaggcatggggggccgggacccaacgggcccgtggtagtcttcggagtagatag

SEQ ID NO: 141137 - DNA, 1998 bp, Artificial Sequence
  derived and/or modified sequence
atggaccggcccgcagctgctgcagcggctggctgcgaggggggcggcggtcctaaccccgggccggctggtggcaggagaccccctcgggccgcaggcggcgctaccgccggtagtaggcagccaagcgttgagaccctggactcccctacggggtcacatgtagaatggtgcaaacagttgattgcagctacaataagcagccagatctcaggctctgttactagcgagaatgtgtcacgcgactataaggcacttcgggacggcaacaagctcgcacagatggaagaagcaccattgtttccaggggaatcaatcaaggctatcgtcaaagacgtgatgtatatctgtcctttcatgggagccgtgtccggtacactgacagtgacagattttaaactctacttcaagaacgttgagagggaccctcatttcatactcgacgtccctttgggcgtgattagccgggtcgagaagattggagctcagtctcatggagacaacagctgcggaatcgagattgtgtgcaaggacatgaggaaccttcggctagcttacaagcaagaggaacagtcaaaacttggcatcttcgagaatctgaacaagcatgcttttcctttaagtaatggtcaggccctctttgcgttctcctataaagaaaaattcccgatcaacggctggaaagtgtatgacccagtctccgagtacaaacgccaggggctgcctaacgaatcgtggaagattagtaagatcaattccaactatgagttctgtgatacataccccgccatcattgtagtgcccaccagcgttaaagatgatgatcttagcaaagttgctgccttccgcgcaaaagggagagtgcccgttctgtcttggatccacccagaatcacaggctaccatcacacgctgctcacagcccttggtcggacctaatgacaaacgatgcaaagaagatgaaaagtatctgcagactatcatggacgccaatgcccagtcccacaagctcattatcttcgatgccagacagaacagcgtggctgataccaacaagaccaagggcggagggtacgaatctgaatctgcctacccaaatgccgagctcgtgtttctggagatacataatattcatgttatgagagaaagtcttagaaaacttaaggagatcgtgtatccaagcatagatgaggccaggtggttgtccaatgtggatggaactcactggctcgagtatattagaatgctcctcgccggcgcggtgaggatagctgataagatcgaaagtggaaagactagtgtagtggtccactgctctgatggctgggacagaactgcacagcttacaagcctggctatgctgatgcttgactcgtactataggactattaagggatttgagacgttggtggagaaggagtggataagcttcggtcatcgctttgcactcagggtgggccatggcaatgataaccacgcagacgctgatcgttctccaattttcctccagtttgtagattgtgtctggcaaatgacacggcagttccctagcgcgtttgaattcaatgagctatttctgattactattctcgatcatctgtattcctgtctgtttggaacttttctctgcaactgtgagcagcagcgtttcaaagaggacgtttacacaaagacgataagcttgtggagttacatcaattcgcagctcgacgaattctcaaacccattcttcgttaactacgagaaccatgtactatatcccgtcgcctctctttctcatcttgagctgtgggtgaactactacgtgcgttggaatcctagaatgaggccacagatgccaattcatcagaaccttaaagagttactggctgtgagggccgaactgcagaagcgggtcgaaggactgcagcgggaggtggccacccgggcagtttcaagttcctcagaaagaggatctagcccgtcgcattcggctacttctgtgcataccagcgtgtag

SEQ ID NO: 141138 - DNA, 1707 bp, Artificial Sequence
  derived and/or modified sequence
atggacaggcctgctgctgctgctgctgctggctgtgagggcggcggcggccccaaccctggccctgctgggggccggcggccccccagggctgctgggggcgccacagctggcagccggcagcccagcgtggagaccctggacagccccaccggcagccacgtggagtggtgcaagcagctgattgctgccaccatcagcagccagatcagcggctctgtgaccagtgaaaatgtgtcccgggactacaaggccctgagagatggcaacaagctggcccagatggaggaggcccccctcttccctggagagagcatcaaggccatcgtgaaggatgtgatgtacatctgccccttcatgggcgctgtgtctggcaccctgactgtgacagacttcaagctgtacttcaagaatgtggagcgggacccccacttcatcctggatgtgcccctgggcgtcatcagccgggtggagaagatcggggcccagagccatggagacaacagctgtggcatcgagatcgtgtgcaaggacatgaggaacctgcggctggcctacaagcaggaggagcagagcaagctgggcatctttgagaacctgaacaagcacgccttccccctgagcaatggccaggccctgtttgccttctcctacaaggagaagttccccatcaatggctggaaggtgtatgaccctgtgtctgagtacaagaggcagggcctgcccaatgaatcctggaagatcagcaagatcaacagcaactatgagttctgtgacacctacccagccatcatcgtggtgcccacctctgtgaaggatgatgacctgagcaaggtggccgccttccgggccaagggccgggtgcctgtgctgtcctggatccaccctgagagccaggccaccatcacccgctgcagccagcccctggtgggccccaatgacaagcgctgcaaggaggatgagaagtacctgcagaccatcatggatgccaatgcccagagccacaagctgatcatctttgatgcccggcagaacagcgtggccgacaccaacaagaccaagggcggcggctatgagagcgagagcgcctacccaaatgctgagctggtgttcctggagatccacaacatccacgtgatgagggagagcctgaggaagctgaaggagatcgtgtaccccagcattgatgaggcccgctggctgagcaatgtggatggcacccactggctggagtacatccgcatgctgctggccggggctgtgagaattgctgacaagattgaaagtggcaagacctctgtggtggtgcactgcagtgatggctgggacagaacagcccagctgaccagcctggccatgctgatgctggacagctactaccgcaccatcaagggctttgagaccctggtggagaaggagtggatcagctttggccacagatttgccctgcgggtgggccatggaaatgacaaccacgcagatgctgacaggagccccatcttcctgcagtttgtggactgtgtgtggcagatgacccggcagttccccagcgcctttgagttcaatgagctgttcctgatcaccatcctggaccacctgtacagctgcctgtttggcaccttcctgtgcaactgtgagcagcagcgcttcaaggaggcctggggcgccggcacccagagggcccggggcagcctgcggagcaggtag

SEQ ID NO: 141139 - DNA, 1828 bp, Artificial Sequence
  derived and/or modified sequence
gcggccgcctgaggcgggcgggcggtatagagcgggcggcaggaggcaagcagcgaaaccttcccggccgccgctcccgtcccgacggcggcttccccaaggcggcaggactcggcgcgccatggacaggccggcggcggcggcggcggcgggctgcgagggcggcgggggcccgaacccggggccggcgggcggcaggaggcctcctcgggccgcggggggcgccaccgccggctcccggcagcccagcgtggagaccctggacagtcccacaggatcacatgttgaatggtgtaaacagcttatagctgctacaatttctagtcagatttcaggttcagtgacatcagaaaatgtgtccagagattacaaggctctaagggatggaaataagctggcacagatggaagaggctccacttttcccaggagaatcaattaaagccattgtgaaagatgtcatgtatatctgcccatttatgggagcagtgagtggaaccctgacagtgacggactttaagctgtacttcaaaaatgtcgagagggacccgcattttatccttgatgttccccttggagtgatcagcagagtggagaagattggagcacagagccatggagacaattcctgtggtatagagatagtgtgcaaggatatgaggaacttgcggcttgcttataaacaggaagaacagagtaaactagggatatttgaaaacctcaacaaacatgcatttcctctttctaacggacaggcactatttgcattcagctataaagaaaaatttccaattaatggctggaaagtttatgatccagtatctgaatataagagacagggcttgccaaatgagagttggaaaatatccaaaataaacagtaattatgagttctgtgacacctaccctgccatcattgttgtgccaactagtgtaaaagatgatgacctttcaaaagtggcagcttttcgagcaaaaggcagagtccctgtgttgtcatggattcatccggaaagtcaagcaacgattacccgttgcagccagccacttgtgggtcccaatgataagcgctgcaaagaggatgaaaaatacttgcaaacaataatggatgctaacgcacagtcacacaagcttatcatctttgatgctcgacaaaacagtgtcgctgataccaacaagacaaagggtggaggatatgaaagtgaaagtgcttacccaaatgcagaacttgtgttcttggagatccacaacattcatgtcatgcgagagtcactacgcaaattaaaagagattgtgtacccttcgatcgatgaggcgcggtggctctccaatgtggatgggacgcattggctggaatatataaggatgctgcttgctggggcagtaagaattgctgataaaatagaatctgggaaaacatctgtggtggtgcattgcagcgacggttgggaccgaacagcccagctcacatctctggctatgctaatgttggacagttactacaggaccattaaaggatttgaaactctcgtagaaaaggagtggataagctttggacacaggtttgcactgcgagtgggccatggtaatgacaaccatgcggatgctgaccgatctcccatatttctgcagtttgttgattgtgtttggcaaatgacaaggcagtttccttcagcattcgagtttaatgagctattcttgattacaattttggatcacctttatagctgtctttttgggacctttttgtgcaactgtgaacagcagcgattcaaagaggcatggggggctgggacccagcgagcccgtggctctctcaggagtagatga

SEQ ID NO: 141140 - DNA, 4314 bp, Artificial Sequence
  derived and/or modified sequence
gcggccgcctgaggcgggcgggcggtatagagcgggcggcaggaggcaagcagcgaaaccttcccggccgccgctcccgtcccgacggcggcttccccaaggcggcaggactcggcgcgccatggacaggccggcggcggcggcggcggcgggctgcgagggcggcgggggcccgaacccggggccggcgggcggcaggaggcctcctcgggccgcggggggcgccaccgccggctcccggcagcccagcgtggagaccctggacagtcccacaggatcacatgttgaatggtgtaaacagcttatagctgctacaatttctagtcagatttcaggttcagtgacatcagaaaatgtgtccagagattacaaggctctaagggatggaaataagctggcacagatggaagaggctccacttttcccaggagaatcaattaaagccattgtgaaagatgtcatgtatatctgcccatttatgggagcagtgagtggaaccctgacagtgacggactttaagctgtacttcaaaaatgtcgagagggacccgcattttatccttgatgttccccttggagtgatcagcagagtggagaagattggagcacagagccatggagacaattcctgtggtatagagatagtgtgcaaggatatgaggaacttgcggcttgcttataaacaggaagaacagagtaaactagggatatttgaaaacctcaacaaacatgcatttcctctttctaacggacaggcactatttgcattcagctataaagaaaaatttccaattaatggctggaaagtttatgatccagtatctgaatataagagacagggcttgccaaatgagagttggaaaatatccaaaataaacagtaattatgagttctgtgacacctaccctgccatcattgttgtgccaactagtgtaaaagatgatgacctttcaaaagtggcagcttttcgagcaaaaggcagagtccctgtgttgtcatggattcatccggaaagtcaagcaacgattacccgttgcagccagccacttgtgggtcccaatgataagcgctgcaaagaggatgaaaaatacttgcaaacaataatggatgctaacgcacagtcacacaagcttatcatctttgatgctcgacaaaacagtgtcgctgataccaacaagacaaagggtggaggatatgaaagtgaaagtgcttacccaaatgcagaacttgtgttcttggagatccacaacattcatgtcatgcgagagtcactacgcaaattaaaagagattgtgtacccttcgatcgatgaggcgcggtggctctccaatgtggatgggacgcattggctggaatatataaggatgctgcttgctggggcagtaagaattgctgataaaatagaatctgggaaaacatctgtggtggtgcattgcagcgacggttgggaccgaacagcccagctcacatctctggctatgctaatgttggacagttactacaggaccattaaaggatttgaaactctcgtagaaaaggagtggataagctttggacacaggtttgcactgcgagtgggccatggtaatgacaaccatgcggatgctgaccgatctcccatatttctgcagtttgttgattgtgtttggcaaatgacaaggcagtttccttcagcattcgagtttaatgagctattcttgattacaattttggatcacctttatagctgtctttttgggacctttttgtgcaactgtgaacagcagcgattcaaagaggatgtatatacaaagacgatatctttatggtcgtatatcaatagccagctagacgagttttctaatcccttctttgtgaattatgaaaaccacgtgttatatcctgttgctagtctgagtcatttggaattgtgggtaaattattatgtacgatggaatccacggatgagacctcagatgcccattcaccagaatctcaaggagctgctggccgtcagggcggagctgcagaagcgtgtggagggcctacagcgggaggtggccacgcgcgccgtctcatcctcatctgagcggggctcctcgccctcccactccgccacctccgtccacacctcggtctgatgggcgaggtcagcctgctgctccactgtctcccggtggctcaggaaagggacctggcgatcactgttatggctgtagcttgtgatcttgtcttttaggattaggcccagggaccatttgtgtggctaggtgacagctcccactgttggcaaccgttaccctcctgtcagcggtttcacaggggagccgtctgtcacgcccaccctgtgaagcaacttctggcattcaggcagcttgggagaaactaagtgaacggaatgcagtactgaggttcaagaaagctgtacgccatttctttccaacttaaatccttcagtaacaacaaacaccactcacttcaagatgcattgccagccccgtggcttccctcagctcttggccacaacttgaaaactgtcttgaatgaagtacttggggagaagacaggccactgccctctgttccacagttttcttcatgcacggggtcctcctgttaacaattactgttgtgtacatataaggtatttttagagaagagaaacaggcctttattttcctatgtccttttttacgtttagaatagtcacccgaggggggatcagctcaactgtactgtgggagaaattcttttccaacaaacctcatgctcgtttttctgtggtgcaatttcaagggcaacgtgttctgtcctcacctcactctggtactcgcctcttggggcggctcagcccattcatggggatggcaccaagcggccatgctcagtcttccagccccgctgagggtaaaccgaggcctctggcagctgtgcacaggtgctggcctctggctccttcaaggagcactgcctgtcactcgctcctgggctgtctagccatgtctcccacccccactttaccgcagccagctgctgggatcaaagcaagtctgttcttatgttatttgcctgtatgaaatcatttctcattttatcacaattccttcaactcagcttactcgcgtggctgcctgttcatatttgaaagcagccaccgtgctgtggctttggtttggaaaagcatagcacgcacttcccttggttttcccttcccagagccgaccgcagctggtcagccctctcttcccgctcctgaacctttacttactgactttgagctctgtgactccgtcggttctcgcaggaattaactaacttaccaattggttcaatccacttgagcgccatagctctgagctcctctgtgtgacatgccacagatgactattgcacacctgggtcctgccccagcaggccatgcccctcccatgtgccgtgcctgttgctgcagctgcccccccaccccgccactggctgcaggaattcagcctttagaggcagaggcagctgcagcggcccctgaggtcaaaccccagtgtgactgcatagcagtgttagctggttggtttcaaactactggattccaggcaaaggcctacagattgaccttattatttttgaaaatatgttaagggttttttcgtagagagagaaagaatggatttttttttaactgggaacctcctgattcttacggaaaattatccttctataagaagataccagagagatttattcaaggtaatttgataacctaaaatcaattctccattttttatcatatgtgggatttgttgctaagtcgtgttcaacaatagcttttatgttcctaacatatctgaaagcttatttatgaatggatatactggattattgatatactgattttttttttaatggggacatttgccattttcttcccagaaatatgtaatcccctggctgactaggactgttaaacatagtgtggactggatgatgccttcgacaaaccagagaagccaagttggggggagctggtgcctggagtgggccctgtgcacctcacctggcggaggctggggggggctctgtcagcaggaccctagaggagactctcattcgattttaaagaagcacaacgggtcattttcctttgtatgttcctagcgcagaactgtttctaaaacaacttgaagtatagttttgttatctaagcaatttttgttttaagtaagtaagtgtactagaatgcgaagccgttatggttcaggtttttaaaaactggtacagtattgtatttgtctcatctgttgcactgtatttcaatcatctgtaattaaaatgatcatatgttt

SEQ ID NO: 141141 - DNA, 1998 bp, Artificial Sequence
  derived and/or modified sequence
atggaccggcccgccgccgccgccgccgccggctgcgagggcggcggcggcccaaatccaggaccagccgggggaagacggccgcctagagccgcaggaggcgcaaccgctggatcacgtcagcctagtgttgaaacactggacagccccaccggcagccacgtggaatggtgtaagcagctcatcgccgcaaccatcagcagtcaaatttccggatctgtgaccagcgaaaatgtttcccgagactacaaagcacttcgggacgggaacaagttagcccagatggaggaagcccccctgtttcccggtgagtcaatcaaagctatcgtcaaagacgtgatgtatatctgcccgtttatgggagccgtgtcgggcacactgaccgttactgacttcaaactgtactttaagaacgtcgagagagaccctcacttcattctcgatgtccctcttggcgtgatctccagggttgaaaagatcggagcccagtctcacggcgataattcctgtggaatcgaaatcgtgtgcaaggacatgcgtaacttaagactggcgtacaaacaggaagaacaatccaagttaggcatcttcgagaatctgaataaacacgcctttccattgagcaacgggcaggcactgtttgcgttctcttacaaggaaaaatttcctattaacggatggaaagtttatgaccctgtatctgaatacaaacgccaagggcttcctaatgaaagctggaaaattagcaagattaactcaaattacgaattttgtgacacctatcccgcaataatcgtggtgcccactagcgtcaaagatgatgacctttctaaagtggccgccttccgcgcgaaaggaagagttccagtactgtcctggatccaccctgagtcgcaagctacaataacgaggtgttctcagcccttagtgggaccaaatgacaagcgctgcaaggaggatgagaaatatttacagacaatcatggatgccaatgctcagtcacataaactaatcatctttgatgcacgacaaaactctgtggctgacaccaataaaaccaagggagggggatacgagagtgagtcagcctatcctaatgctgaattagtttttctagagatccacaacatccacgtgatgagagagagcttaaggaagctgaaggaaatcgtctaccccagcatagacgaggctcggtggctgagcaatgtcgacggcactcactggctggaatatattaggatgctgctggccggagcggtccggatcgccgacaaaatcgaaagcggcaagacaagcgttgtggtgcactgctccgacggctgggatcgcaccgctcagctcacatcactggccatgctgatgttggattcctattaccggactatcaagggtttcgagaccctagtcgagaaggaatggatttcctttggacaccggttcgccctccgagtgggtcatgggaacgataatcacgctgacgctgataggtcaccaattttcctgcagttcgttgactgcgtttggcagatgacccgccagtttccctcggcttttgagttcaatgaactgttccttatcacaatcctggatcacctctattcatgcctgttcggcactttcctttgcaattgcgagcagcaaagattcaaagaggatgtttacacgaagaccatctctttatggtcctatattaacagtcaactggatgagttttccaatcctttttttgttaattacgaaaaccacgttctgtaccccgtggcgtccttgagtcacctggagctgtgggtgaattattacgtgagatggaatcctcgaatgcggccacagatgccaatacaccagaaccttaaggaactgttggccgttcgcgctgaactgcagaagagagtggagggcttgcagagggaggtggctactcgggccgtgtccagttcatctgagcgggggagcagcccaagccatagcgccacgtccgtgcatacgagtgtatag

SEQ ID NO: 141142 - DNA, 1707 bp, Artificial Sequence
  derived and/or modified sequence
atggaccggcccgccgccgccgccgccgccggctgcgagggcggcggcggccccaatcctgggccagcgggaggtaggagacctcccagagcagctggcggcgcgacagccggcagccggcagccgtccgtcgagacccttgattcccccacaggaagtcatgttgaatggtgtaaacagctgatcgctgccaccatcagcagtcagatctctgggtctgtcacctctgaaaatgtttcaagagattacaaagctttgcgagacggcaataaacttgctcagatggaagaggcccctctgtttccgggcgagtccatcaaggcgattgtgaaggatgtaatgtacatttgtccgttcatgggcgcagtctccggaacactgacggttactgacttcaagttatatttcaagaacgtagagagagaccctcacttcatcctcgatgttcccctgggggtgattagccgcgtggaaaagattggcgcccaatcccatggcgataactcatgtgggatcgaaatcgtgtgcaaggacatgcgcaacctgcggctggcgtacaagcaggaagagcaatcaaaactcggcatcttcgagaacctcaataaacacgccttccctttgtctaatgggcaggccctgttcgctttctcttacaaggagaagttcccaattaatggctggaaggtgtatgaccccgtctccgagtacaaaagacaggggctaccaaatgagagttggaagatctctaaaatcaactccaattacgaattttgcgacacctaccctgcaattattgtagtgcccactagtgtgaaagatgatgacctatccaaagtggcggcctttagggctaagggccgggtgccagtcctcagctggatccacccggaatcccaggcaaccataactagatgcagccagcccctggtgggacccaacgacaagaggtgcaaagaagacgagaaatacctgcagaccatcatggatgccaatgcccagtcacataagctgataatcttcgatgcgcggcagaatagtgtggcagatacaaacaagacaaagggagggggctacgaaagcgagtcagcttatcccaatgcagaactggtcttcctggagatccacaatatacacgtcatgagagaaagcctccggaagctaaaagaaatagtgtatccttcaatcgacgaggcacggtggctgtcgaatgtcgatgggacacactggctggaatacatcaggatgctgctggccggggcagtcagaatcgccgacaaaattgagtcaggcaagactagcgtcgtggtgcactgctccgatgggtgggatcgcactgcccagctgacttcactggccatgctgatgctcgattcctattatcgcacgattaagggctttgaaacgctggtagaaaaagagtggatttcatttggccacagattcgctttgagagtaggacacggaaatgataatcatgccgatgcagacaggagcccaattttcttgcagtttgtcgattgtgtgtggcaaatgacccggcagttcccaagcgccttcgagtttaatgagctgttcctcattaccattctggaccacctctattcctgtctattcggcaccttcctgtgtaactgtgaacagcagagattcaaagaggcctggggagctggcacacagcgagcacggggttccctgagatcaaggtag

SEQ ID NO: 141143 - DNA, 1998 bp, Artificial Sequence
  derived and/or modified sequence
atggaccggcccgccgccgccgccgccgccggctgcgagggcggcggcggtcccaaccccggtcctgcagggggacgccgcccaccgagagcggctgggggcgctaccgccgggagtaggcagccatcagtggaaacattggactcacccaccggtagccacgtcgagtggtgcaagcaactgattgcagccacaattagcagccagatcagcggctctgttacctctgagaacgtgtcccgagactacaaagccttgagagacggcaacaagctcgcacagatggaggaggcccccctctttccaggcgagtctattaaagcaatcgtcaaagatgtaatgtatatttgcccattcatgggcgctgtgtccgggactctaacagtcactgatttcaaattgtacttcaaaaatgtcgaaagagatccccatttcatcctggatgtgcctttgggagttatctccagagtggagaagatcggtgcccagtcacacggtgataacagctgcggaatagagattgtgtgcaaggacatgaggaatctacggctggcctataagcaggaggagcaaagtaagctgggcatctttgagaacttgaacaagcacgctttcccgctcagtaatggtcaggcgctgtttgcattttcctacaaggagaagttccctataaatggatggaaggtttatgatccagtatccgaatataagcgacagggtctgccaaatgagagctggaagattagcaagatcaatagtaattacgaattttgcgacacttaccccgccattattgtagtcccaacgtctgtcaaggacgacgacctgtctaaagtagcagccttcagggccaagggcagggtccccgtgctctcatggattcatcccgaaagtcaggccaccatcactcgctgttcgcagcctctcgtggggccaaatgacaagcgttgtaaagaagacgagaagtaccttcagacgattatggacgccaatgcccaaagtcataaacttatcatctttgacgcccgccaaaactccgtggccgacactaacaagaccaaaggggggggatacgaaagcgagtctgcataccctaacgcagaactagtcttcctcgagattcataatatccacgtaatgcgagagtccctgagaaagctcaaggagatagtttacccttccattgacgaggccaggtggttgtccaacgtggatggcacccattggctggaatacatccgaatgctgttggcaggagctgtgaggattgccgacaagattgagtcgggcaaaactagtgtcgtggtccattgttcagatggttgggatcgcactgctcagctaactagcctggccatgttaatgctggatagttactacaggaccataaaagggttcgaaacactggttgagaaagaatggattagctttggacaccgttttgccctcagggtgggacacggaaatgataaccacgccgacgctgacaggtcccccatctttctccaattcgtggattgcgtctggcagatgacaaggcaattcccatctgcctttgaattcaacgagctgttcctcatcaccatcttagaccacctgtacagttgcttatttggcacgttcttatgcaactgtgaacagcaacggttcaaggaggatgtatacactaagacgatcagcctgtggagctacatcaactcccagctcgacgaattctccaaccctttttttgttaactacgaaaatcacgttttgtatcctgtggccagcttatctcacttggagctctgggtgaactactatgtgcggtggaaccctaggatgagaccacagatgcctatccatcagaatcttaaggagctgttggctgtgcgcgccgaacttcagaaacgcgtggaggggctccagcgagaggtagcaacaagagctgtgtcctcatcctcagaaagagggagctcaccatcccattccgcaacctcagttcatacgtcggtgtag

SEQ ID NO: 141144 - DNA, 1998 bp, Artificial Sequence
  derived and/or modified sequence
atggatcgtcctgctgctgccgctgctgccggatgtgaggggggtggtggcccaaaccccggacccgctggcggtcgacggccaccacgcgcagcagggggtgctacagccggaagtaggcaaccctcagtagagacactggactctcccactggtagccacgtcgagtggtgcaagcagttaatagcggctactatcagttcgcagatttcggggagcgtgacgtccgagaatgtgtcccgggattataaggccctgcgcgacgggaacaagcttgcacagatggaagaggcccctttgttcccgggtgaatctattaaagccatcgtaaaggacgtcatgtatatctgccctttcatgggagccgtatccggcactctgactgtcaccgattttaagctgtacttcaagaatgttgagcgcgatccacacttcattctcgacgtcccactgggagtcatcagtcgcgtcgaaaaaatcggcgcacagtctcatggagacaactcttgtggcatcgagatcgtgtgcaaggatatgcgaaacctgagactggcttacaagcaggaagagcaaagcaaactgggaatcttcgaaaacttgaacaagcatgcgttcccactgagcaatgggcaggctctgttcgctttcagttacaaggagaagtttcccataaacggatggaaagtgtacgaccccgtgtccgagtataagagacagggactgcctaatgagtcatggaaaatctccaaaatcaatagtaattatgagttttgtgatacttatcccgcaattattgtagtgcctacttccgtgaaagatgatgacttatcaaaagttgctgcttttcgtgccaagggaagggtgccagttctctcttggatccaccctgagtctcaggcaactatcactcgttgtagtcagccactggtgggcccaaacgacaaaaggtgtaaggaggacgaaaagtatctgcagactatcatggacgcaaacgcccagagtcacaagctgatcattttcgacgccaggcagaactccgtggctgatactaataagacaaaagggggtgggtatgagtccgaatccgcgtatccgaacgcagaactggtgttcctggaaattcacaatatacacgttatgagggagagcctgagaaaactgaaagagatcgtgtacccgtctattgacgaggccagatggctatctaatgtggacggaacgcattggttggaatatattcggatgcttctggctggcgcagtgcgcatcgcggacaaaattgagagcggaaaaacttctgtcgtggtacattgtagcgacggttgggaccggacggcccagctcacgtccttggccatgttaatgctggatagctattaccggaccatcaaaggatttgagactctggtagagaaagaatggatcagctttggccatcgatttgccctcagggttggccatgggaatgataatcacgccgacgctgaccgcagtccaattttcctgcaatttgttgactgcgtgtggcagatgacccgtcaatttccatccgccttcgagttcaacgaattattcctcatcaccattctggaccatctgtatagttgcttgttcgggacatttctttgtaattgcgagcagcagcgcttcaaagaggatgtgtatactaagactatctcactttggagctatatcaactcccaactggatgaattctctaaccccttctttgtgaattatgagaaccacgttctctaccccgtcgcttctctgtcacacttggagctatgggttaactattatgtacggtggaatccacgaatgcggccacagatgccaatccaccagaaccttaaggaattactagcagttagggcagagctccagaagagagtagaagggttacagcgagaggtagcaaccagggcagtatcctcttcatctgagagaggaagtagcccctcccattcagcgacgtctgtgcatacatcagtatag

SEQ ID NO: 141145 - DNA, 1707 bp, Artificial Sequence
  derived and/or modified sequence
atggatagacccgcagctgccgcagcggctggctgcgagggaggaggtggccctaatcccggtcctgcaggagggaggagaccacctcgagccgcaggcggagctacagctggtagccgacagccttcagtggaaactctggacagtcccactggctcccacgtggagtggtgcaagcagctgattgccgctaccattagcagtcagatcagcgggtcagttactagtgagaacgtgtcaagggactacaaggccctcagggacggcaacaaactagctcaaatggaagaggctccactctttcctggagaatccattaaggccattgtaaaagacgttatgtacatttgtccttttatgggggctgtgtccgggaccctgacggtcactgatttcaagctctacttcaaaaatgtcgagagagacccacatttcattctagacgtgcccttaggcgtgatctcccgcgtagagaagatcggtgctcagtctcatggcgataacagctgcggaattgaaattgtgtgtaaagatatgcgcaacttaagattggcatacaagcaagaagagcagtcaaagctgggtatcttcgagaatcttaataagcacgctttccccctttccaacggtcaagcacttttcgcctttagctataaggagaagtttccaattaatggttggaaagtttatgaccctgtgtctgagtacaaacgacagggtcttccaaacgagagctggaaaatttcaaagatcaactcaaactacgaattttgcgacacttatccagccatcattgttgtgcccacgtccgtcaaagacgacgacctcagcaaggtggcagctttccgggcaaagggaagagtgcctgtgctgtcgtggatccacccggagagccaggccacaatcacccgttgcagccaacccctggtgggaccaaatgataaacggtgtaaagaggacgaaaaatacctgcaaacaatcatggacgccaacgctcagtcccataagctgatcattttcgatgccagacagaacagcgtggccgacacaaataaaactaagggcggtgggtacgagagtgagagcgcctatcccaatgcagaactcgtgtttctggaaatacacaatattcacgtgatgcgggagagtttaaggaaactcaaggagatagtatatccttctattgacgaggctagatggttgagcaacgtagacggcacacactggctggagtatatacggatgttactggctggcgcagtgcggatcgctgataaaattgagagtggcaaaacctccgtagtcgttcactgtagcgatgggtgggatcggacagcgcagctgacctccctcgcaatgttgatgctcgactcttactatagaaccattaaagggttcgagacgctggtggagaaggaatggatttccttcggtcaccggtttgccttaagagttggtcacggcaacgacaaccatgccgacgccgatcggtcacccatatttctgcagttcgttgattgtgtctggcagatgacccgccagttccctagtgcgttcgagttcaacgagctttttttaataactattcttgatcatctatactcttgtctgtttggcacctttctgtgcaattgcgaacagcaaaggttcaaagaggcttggggcgctggaactcaaagggcaagaggcagcttgcgatcacgctag

SEQ ID NO: 141146 - DNA, 1998 bp, Artificial Sequence
  derived and/or modified sequence
atggaccggccagcggcagctgccgcagccggatgcgaaggcggaggaggccctaacccaggaccagcaggaggacgccgtccaccaagggcggctggaggtgctacggcaggcagtcgccagcctagtgtggaaacgctggactctccaacgggctctcacgttgagtggtgtaagcaattgatcgcagctacgatttcatctcaaatctcgggctccgtgacttctgaaaatgtttctagagattacaaagctctgcgcgacggcaacaagcttgcacagatggaggaagctcctcttttccctggcgaatcgattaaggcaattgtgaaagacgtgatgtacatttgcccttttatgggcgcagtctcagggacgctcaccgtcactgatttcaaactctacttcaagaatgtcgagagagaccctcatttcatcctcgatgttcctttgggggtgatcagccgcgtggaaaaaatcggcgctcaaagtcatggcgataattcttgcggcattgaaattgtgtgcaaagacatgaggaacctccgcctggcatacaagcaggaagagcagtcaaaactggggatctttgaaaatctcaataaacacgctttccccctgagtaatggtcaggccctcttcgctttcagttacaaggaaaaatttccgattaatggttggaaagtgtatgatccggtcagcgagtataaaaggcagggccttccaaacgagtcctggaagatctcaaaaattaacagtaattacgagttctgcgatacgtatccagcgattatcgttgtgcctacgtccgtcaaggacgatgatctctcaaaagtcgccgctttccgcgctaaaggtcgagtacctgtgttatcctggatccatcccgaatcacaagcaactataactcggtgctcccagcccctcgtgggacctaacgataaacgatgcaaagaggacgagaagtatttacaaactatcatggacgccaatgcacaaagccacaagctgatcatttttgatgccagacagaattctgtggccgacaccaacaaaacaaaaggcggtggctatgaatccgaaagtgcttatccaaacgctgaacttgttttcctggaaattcataacatccacgttatgagggagtccctgagaaaacttaaggagatcgtatacccctccatagacgaagcccgttggttatccaatgtggacggcacccactggctcgaatatatcagaatgctactggctggcgcagtgagaatcgcagacaagattgagagtggcaaaacctctgtggtagtccattgctctgatggatgggaccggacagctcagctgacctctcttgcaatgcttatgctggacagttattaccgcacaattaagggcttcgagacgcttgtcgaaaaagagtggatcagctttggccatcgatttgcattgagagtggggcacggtaatgacaatcacgctgacgccgaccggtcccccattttcctccagtttgtcgattgcgtgtggcagatgacgaggcaattcccctcagcttttgaattcaatgaacttttcctcattacaatcctggatcacctgtacagttgtcttttcggtactttcttatgcaattgcgagcagcagcggttcaaggaagatgtttacaccaagacgattagtctctggtcttacattaactctcagctcgacgaattctctaaccccttttttgttaactacgagaaccatgttttgtaccccgttgccagtctttctcacctagagctttgggtcaattactatgtgcgttggaatccacggatgaggccccaaatgcctatccaccaaaaccttaaagagctgttagccgtaagggccgagctacagaagagagtggaaggcctccagagagaggtagcgactagggcggttagctcttcaagcgaaagaggttcttcaccctctcactcagctactagtgtgcacacatccgtttag

SEQ ID NO: 141147 - DNA, 1707 bp, Artificial Sequence
  derived and/or modified sequence
atggacagacccgccgccgccgccgccgccggctgcgagggcggcggcggccccaaccccggccccgccggcggcagaagaccccccagagccgccggcggcgccaccgccggcagcagacagcccagcgtggagaccctggacagccccaccggcagccacgtggagtggtgcaagcagctgatcgccgccaccatcagcagccagatcagcggcagcgtgaccagcgagaacgtgagcagagactacaaggccctgagagacggcaacaagctggcccagatggaggaggcccccctgttccccggcgagagcatcaaggccatcgtgaaggacgtgatgtacatctgccccttcatgggcgccgtgagcggcaccctgaccgtgaccgacttcaagctgtacttcaagaacgtggagagagacccccacttcatcctggacgtgcccctgggcgtgatcagcagagtggagaagatcggcgcccagagccacggcgacaacagctgcggcatcgagatcgtgtgcaaggacatgagaaacctgagactggcctacaagcaggaggagcagagcaagctgggcatcttcgagaacctgaacaagcacgccttccccctgagcaacggccaggccctgttcgccttcagctacaaggagaagttccccatcaacggctggaaggtgtacgaccccgtgagcgagtacaagagacagggcctgcccaacgagagctggaagatcagcaagatcaacagcaactacgagttctgcgacacctaccccgccatcatcgtggtgcccaccagcgtgaaggacgacgacctgagcaaggtggccgccttcagagccaagggcagagtgcccgtgctgagctggatccaccccgagagccaggccaccatcaccagatgcagccagcccctggtgggccccaacgacaagagatgcaaggaggacgagaagtacctgcagaccatcatggacgccaacgcccagagccacaagctgatcatcttcgacgccagacagaacagcgtggccgacaccaacaagaccaagggcggcggctacgagagcgagagcgcctaccccaacgccgagctggtgttcctggagatccacaacatccacgtgatgagagagagcctgagaaagctgaaggagatcgtgtaccccagcatcgacgaggccagatggctgagcaacgtggacggcacccactggctggagtacatcagaatgctgctggccggcgccgtgagaatcgccgacaagatcgagagcggcaagaccagcgtggtggtgcactgcagcgacggctgggacagaaccgcccagctgaccagcctggccatgctgatgctggacagctactacagaaccatcaagggcttcgagaccctggtggagaaggagtggatcagcttcggccacagattcgccctgagagtgggccacggcaacgacaaccacgccgacgccgacagaagccccatcttcctgcagttcgtggactgcgtgtggcagatgaccagacagttccccagcgccttcgagttcaacgagctgttcctgatcaccatcctggaccacctgtacagctgcctgttcggcaccttcctgtgcaactgcgagcagcagagattcaaggaggcctggggcgccggcacccagagagccagaggcagcctgagaagcagatag

SEQ ID NO: 141148 - protein, 2041 aa, Artificial Sequence
  derived and/or modified sequence
MLEAIDKNRALHAAERLQTKLRERGDVANEDKLSLLKSVLQSPLFSQILSLQTSVQQLKDQVNIATSATSNIEYAHVPHLSPAVIPTLQNESFLLSPNNGNLEALTGPGIPHINGKPACDEFDQLIKNMAQGRHVEVFELLKPPSGGLGFSVVGLRSENRGELGIFVQEIQEGSVAHRDGRLKETDQILAINGQALDQTITHQQAISILQKAKDTVQLVIARGSLPQLVSPIVSRSPSAASTISAHSNPVHWQHMETIELVNDGSGLGFGIIGGKATGVIVKTILPGGVADQHGRLCSGDHILKIGDTDLAGMSSEQVAQVLRQCGNRVKLMIARGAIEERTAPTALGITLSSSPTSTPELRVDASTQKGEESETFDVELTKNVQGLGITIAGYIGDKKLEPSGIFVKSITKSSAVEHDGRIQIGDQIIAVDGTNLQGFTNQQAVEVLRHTGQTVLLTLMRRGMKQEAELMSREDVTKDADLSPVNASIIKENYEKDEDFLSSTRNTNILPTEEEGYPLLSAEIEEIEDAQKQEAALLTKWQRIMGINYEIVVAHVSKFSENSGLGISLEATVGHHFIRSVLPEGPVGHSGKLFSGDELLEVNGITLLGENHQDVVNILKELPIEVTMVCCRRTVPPTTQSELDSLDLCDIELTEKPHVDLGEFIGSSETEDPVLAMTDAGQSTEEVQAPLAMWEAGIQHIELEKGSKGLGFSILDYQDPIDPASTVIIIRSLVPGGIAEKDGRLLPGDRLMFVNDVNLENSSLEEAVEALKGAPSGTVRIGVAKPLPLSPEEGYVSAKEDSFLYPPHSCEEAGLADKPLFRADLALVGTNDADLVDESTFESPYSPENDSIYSTQASILSLHGSSCGDGLNYGSSLPSSPPKDVIENSCDPVLDLHMSLEELYTQNLLQRQDENTPSVDISMGPASGFTINDYTPANAIEQQYECENTIVWTESHLPSEVISSAELPSVLPDSAGKGSEYLLEQSSLACNAECVMLQNVSKESFERTINIAKGNSSLGMTVSANKDGLGMIVRSIIHGGAISRDGRIAIGDCILSINEESTISVTNAQARAMLRRHSLIGPDIKITYVPAEHLEEFKISLGQQSGRVMALDIFSSYTGRDIPELPEREEGEGEESELQNTAYSNWNQPRRVELWREPSKSLGISIVGGRGMGSRLSNGEVMRGIFIKHVLEDSPAGKNGTLKPGDRIVEVDGMDLRDASHEQAVEAIRKAGNPVVFMVQSIINRPRKSPLPSLLHNLYPKYNFSSTNPFADSLQINADKAPSQSESEPEKAPLCSVPPPPPSAFAEMGSDHTQSSASKISQDVDKEDEFGYSWKNIRERYGTLTGELHMIELEKGHSGLGLSLAGNKDRSRMSVFIVGIDPNGAAGKDGRLQIADELLEINGQILYGRSHQNASSIIKCAPSKVKIIFIRNKDAVNQMAVCPGNAVEPLPSNSENLQNKETEPTVTTSDAAVDLSSFKNVQHLELPKDQGGLGIAISEEDTLSGVIIKSLTEHGVAATDGRLKVGDQILAVDDEIVVGYPIEKFISLLKTAKMTVKLTIHAENPDSQAVPSAAGAASGEKKNSSQSLMVPQSGSPEPESIRNTSRSSTPAIFASDPATCPIIPGCETTIEISKGRTGLGLSIVGGSDTLLGAIIIHEVYEEGAACKDGRLWAGDQILEVNGIDLRKATHDEAINVLRQTPQRVRLTLYRDEAPYKEEEVCDTLTIELQKKPGKGLGLSIVGKRNDTGVFVSDIVKGGIADADGRLMQGDQILMVNGEDVRNATQEAVAALLKVSEGSLSSFTFPLSGSSTSESLESSSKKNALASEIQGLRTVEMKKGPTDSLGISIAGGVGSPLGDVPIFIAMMHPTGVAAQTQKLRVGDRIVTICGTSTEGMTHTQAVNLLKNASGSIEMQVVAGGDVSVVTGHQQEPASSSLSFTGLTSSSIFQDDLGPPQCKSITLERGPDGLGFSIVGGYGSPHGDLPIYVKTVFAKGAASEDGRLKRGDQIIAVNGQSLEGVTHEEAVAILKRTKGTVTLMVLS

SEQ ID NO: 141149 - DNA, 6126 bp, Artificial Sequence
  derived and/or modified sequence
atgttggaggccatcgataagaacagagcactgcacgctgccgaacgccttcagacaaaactccgcgagaggggggacgtagccaacgaggataagctgagcctgctcaaatccgtgctgcagtcaccactcttttcccagatcctgagtctgcaaaccagcgtacagcagctcaaagaccaggtgaatattgccaccagcgcaacctcgaatattgaatacgcacacgtcccccacctcagccccgctgtaattcctaccctccaaaacgagagcttcctgctgagtccgaacaatgggaatttagaggcattgactggtcccggtattccccacatcaatggcaagcctgcgtgcgacgagttcgatcagcttatcaagaatatggcacagggcagacacgtggaagttttcgagctcctgaagcctccgagcggaggactgggcttcagtgtggttggactccgctcagaaaacaggggtgaattaggcatctttgtgcaagaaatccaagaggggtctgttgcacatcgcgacggtagattaaaagagactgaccagattctcgctattaacggccaagctctggatcaaacaatcactcatcagcaggctatttcaattcttcagaaagcaaaagatacagtgcagctggtaattgctcgaggctctctgccgcagttagtctcccccatcgtttcacgcagtcctagcgccgccagcaccataagtgcccactccaatcccgtccactggcaacatatggagactattgagcttgtgaatgatgggagcggactgggtttcggcatcatcggggggaaggccaccggggtgatcgtgaaaactatcctccccggcggagtggccgatcaacacggcaggctatgcagtggcgatcacatccttaagatcggcgacaccgacctggccggaatgagttctgaacaagtcgctcaggttctgagacaatgcgggaaccgtgtgaagctgatgatcgcacgaggagccatagaggagcgaactgcccccaccgcgttgggcatcactttgtcaagctctccgacttctacacccgagctgcgagtcgatgcttctactcagaagggcgaggaaagtgagacttttgatgtggaattaacgaagaatgtccagggattgggaatcaccatcgctgggtacatcggggataaaaagctagagcccagcggcatctttgtgaagagtattaccaagagttccgcagtcgaacacgacggtaggatccaaataggggaccagatcattgctgtcgatggaacaaatctccaggggttcaccaaccaacaggccgtggaggtgctgaggcatacaggccagaccgttcttctgacgctcatgcggagaggcatgaagcaagaggccgagctgatgtctagggaagacgtaaccaaggacgccgatctgagcccagttaatgctagcatcatcaaggagaattatgagaaagatgaagacttcctgagctctacaaggaacacaaatatcctcccaactgaggaggagggataccccctgttatctgcagagatcgaagaaatcgaggacgctcagaaacaggaagcagctctgctgacaaaatggcagcgcattatgggcattaattatgagatcgttgttgcacacgttagcaaattttccgagaactcaggtctcggcatctcgctagaagctactgtcggacatcacttcatcagatccgttttgccagaaggtcccgttggccactccggaaaattgttctctggggacgagctactggaagtgaacggtatcactctattgggagaaaaccatcaggacgtcgtgaacatcctgaaagaactccccatcgaggtgacaatggtgtgttgtagacggacagtcccccctacgacgcagagcgagctggattccctcgatctctgtgacatcgaactgactgagaagccccatgtcgatctgggggaattcattggaagcagtgagacagaggatccagtgcttgccatgactgacgccggtcagagtacagaagaggtgcaagccccccttgcaatgtgggaagccggtattcagcacattgaactggaaaaaggctcgaaggggttgggatttagtattctggactatcaggacccaatcgatccagcttccactgtaatcattatccggagtctcgtgcccggaggcatcgctgaaaaggatggacgcctgctacctggcgatcgcctcatgttcgtgaatgacgtgaatctggagaacagcagtctggaggaggcggtggaggcactgaaaggcgcaccctctggtacagtgagaataggtgttgctaagcccctgcccctctcacctgaagaggggtatgtgtccgctaaggaagacagttttctttatccccctcactcttgcgaagaggccgggctagcagataagccgctgttcagagctgatctggcactcgtcggcaccaacgatgcggatctcgtcgatgagagcacctttgagtctccttatagtcccgagaatgatagcatctattctactcaggccagcatcttgtccctgcacgggtcgtcatgtggagatggcttgaactacgggagcagcctgccatcttcccctcctaaggatgtgattgagaactcttgtgaccccgtgctggatttgcatatgtcactcgaagaactgtacacccagaacctgctgcagaggcaggacgagaatacaccaagcgtcgacatttcgatgggtcctgcttccggctttaccatcaacgattacacccctgctaatgccatcgaacaacagtatgagtgtgagaatacaatcgtttggactgaaagtcacctcccatccgaggtgatcagctccgcagagctgccctccgtcctaccggattcagcggggaaaggaagtgaataccttctagaacagagttccctcgcctgtaatgccgaatgcgtgatgctacagaacgtgagcaaggagtcctttgagcggactatcaatatcgccaaggggaacagctccctcggcatgactgtgtccgccaacaaagacggcctgggtatgattgtgaggagtatcatccatggcggagccatctctagggatggcaggattgccatcggagactgtattctatccatcaacgaggagagtaccatctccgtcaccaatgcacaggcaagggctatgctgcggagacactccctcattgggcccgacattaagataacatacgtgcctgccgagcacctagaggagtttaagatctccctcggccagcagagtggccgggtgatggcgttagacattttctcctcctacactggacgtgacatcccagagctgccggagcgcgaggagggcgagggggaagagtctgagctgcaaaacactgcctatagcaattggaaccagccaagaagggtggaactatggagagagccatccaagtccttgggaatttccatcgtcggtggacgagggatgggaagcagattgtccaacggtgaagtaatgagaggcatcttcattaagcacgtgctagaggattcacctgctgggaagaatggaaccttgaaaccaggtgatagaattgtggaagtcgatggcatggatctccgagatgcaagtcatgaacaggcagtcgaagccatcagaaaagcaggaaatccagtagtgttcatggtccagtctatcataaaccgccctcgaaaaagccctttacccagcctgctccacaatctgtaccctaaatataattttagctccaccaatcccttcgccgactctcttcaaattaatgccgacaaggcaccttctcagtcagaatctgagcccgaaaaagcccctctctgtagcgtgccccctcctcctccctccgcctttgccgaaatgggatccgaccacacccagtcttctgcttctaagatttctcaggacgtggacaaggaagatgagttcggctactcttggaagaacatccgagaacgatatggcactctaactggggagctacacatgatcgagctagaaaaaggccattcggggttaggcctctccttagcagggaacaaagatcgcagtagaatgagcgtgtttatcgtgggaatcgacccaaacggggccgccggcaaggacgggcgattgcagatagcagacgaactcttggaaataaacggacagatcctatacggtagaagccaccaaaatgcctcaagcatcatcaagtgtgctccatctaaggtaaaaattattttcataagaaataaggacgccgtaaaccagatggctgtgtgccccggaaatgctgtagaacccctcccaagcaatagcgaaaacctccagaacaaggaaacagagcctacggtgacaacctcagatgcagcggtggatctgtctagctttaagaacgtgcagcatctggagctgcctaaagatcaaggcggattagggatagcgatctcggaagaagacaccctctcaggcgtgattattaagagtctgactgagcatggggttgccgcaacagacggccgccttaaagtgggagaccagatcctggctgtggatgacgaaatcgtggtgggctacccgatcgaaaagttcatcagtttgctgaagaccgcgaaaatgaccgtgaaactcaccattcacgctgaaaatccggattctcaggcggtcccctccgcggctggtgcagctagtggagagaagaagaactccagtcagtcgttgatggttccccagtctggcagtcctgagccagaatccatcagaaacacatcacgttcaagtaccccagccattttcgcaagcgaccccgccacctgtccaatcatccccgggtgcgaaacaaccattgagattagtaaaggtcggaccggacttggcctctcgatagtgggaggatctgacacgctgctgggcgccatcatcatccacgaagtctatgaggaaggggctgcgtgcaaggacggccgcctctgggctggcgaccaaattttagaggtcaatggaattgacctgcgcaaagctacccatgatgaagctatcaacgtcctgcggcaaacgccccagagagtccgcctaacactttaccgggacgaagctccctacaaagaggaggaggtgtgtgacacgctcacaatcgaactccaaaaaaagcctggcaagggtcttggactttcaatcgttggtaagcgcaacgacaccggtgttttcgttagtgacatcgtcaaagggggcatcgcagatgccgacggtaggctgatgcagggcgatcagatcttgatggtcaacggcgaagatgtgaggaatgccactcaggaggccgtcgccgccttgcttaaagtttctgaagggtccctttcttcgtttacgttccccctgtcgggctcgtctactagcgagtctctcgaatcctctagcaagaaaaacgctctggctagcgagatccaagggctgcgcacagtggagatgaagaaaggtcccaccgactccctgggtatctcgatcgctgggggggtcggcagtcccctcggtgatgttcccatcttcatcgcaatgatgcatccgacgggagtagctgctcagacacaaaagctgagagtcggcgataggatcgttactatatgcggcacctctacagagggtatgactcatactcaagccgttaaccttctgaagaatgctagcggatcaattgaaatgcaggtcgtggcaggcggggatgtatcagtcgtgaccggccaccagcaagagcccgctagcagctccctatcttttactgggctgacaagcagctccatcttccaggatgatctgggccccccacaatgtaagtcaataacactggagagaggtcctgacgggctgggcttttccatcgttggcggatatggcagtccacacggtgacctgcccatatatgtgaagacagtgttcgctaagggagccgcctccgaggatgggcgactgaaacggggcgatcagatcatcgccgtgaacggtcagtccttggagggtgttactcacgaggaggctgtggctatcctcaagcgcaccaaaggtaccgtcactctcatggtgctctcctag

SEQ ID NO: 141150 - DNA, 6126 bp, Artificial Sequence
  derived and/or modified sequence
atgcttgaggcgatcgataaaaacagagctcttcacgccgccgagagattgcagacgaagctgcgcgagcgtggagacgtcgcaaatgaagataagctctctctcctcaaatctgtcctccagagtccactgttctcccagatcctgtccctgcaaacgtcagtgcagcagctgaaagaccaagtgaacattgctacttcagccaccagcaacatcgaatatgcccacgtgccccacttgagcccagccgttattccaactttacaaaacgagagcttcctgctgtcccctaataatggaaacttggaagccctgacaggccccgggattccgcatattaacggaaagcccgcgtgtgacgagttcgaccagctgatcaagaacatggcacaaggccggcacgttgaggtcttcgagctgttaaagcccccatccggaggccttgggttcagtgtagtaggacttcgaagtgagaacagaggggagctcgggatctttgttcaggagattcaggaaggctctgtagcacaccgagacggaaggctgaaggaaaccgatcagattctagcaatcaatggacaggctctggatcagactattacacaccagcaggctatctcaattctccagaaagcgaaggataccgtccagcttgtgatcgctcggggcagcctgccgcaactcgtgtctcccatcgtcagtaggtcaccatcggccgctagcaccatttccgcccatagtaacccggtacactggcagcacatggaaacaatcgaactggtgaacgacgggtctggcctcggatttggaataataggtgggaaagccacgggcgttatcgtcaagaccatcttgcctggaggggttgcagaccagcacggtagactgtgttcgggggaccacatcctgaaaataggagacaccgacctggcagggatgagttccgagcaagttgcacaggttcttcggcagtgtgggaaccgcgtgaagttgatgatagctcgaggcgcaatcgaggagcggaccgctccaacagctctaggcataaccttgagctcatcccctaccagtacgcctgaacttcgagtggatgcctcaacgcaaaagggagaagagagcgagacgtttgatgtagagctcaccaagaatgttcagggcctcggcattaccatagcagggtacatcggcgataagaaacttgaaccatcaggcatttttgttaaatcgatcactaaatcatccgcagtcgaacacgatggcaggatccagataggcgatcagatcatcgccgtggatggcaccaacctccaaggcttcacaaatcagcaagccgtagaggtgttgcgccataccggacagaccgtccttcttactctgatgcgaagaggtatgaagcaagaggcggagctgatgtcccgggaggacgtaaccaaagacgctgacctaagtcctgtcaacgctagcattatcaaagagaattatgaaaaggacgaagatttcttatcctctacaagaaatactaatattctgccaacggaggaagaagggtatcccctgctcagcgcagagatcgaagagattgaagacgctcagaagcaggaggctgccctactcaccaagtggcagcgtattatgggtataaattatgagatcgttgtggcacacgtgagtaagtttagtgaaaactccggcttaggaatctctctggaagctacggtgggacatcattttattagaagtgttttacccgaagggcctgtgggtcacagcggaaagcttttctcaggggacgagctcttagaggtgaacgggatcaccctgctgggggagaaccaccaggatgttgtgaacattctgaaagagctgcccatcgaagtgacaatggtgtgttgccggaggactgtgccacctactacgcaatccgagctggatagcctggatttatgcgacattgagctcaccgagaaaccccacgtggacctcggggaatttatcggttcctccgaaaccgaagaccctgtgctggctatgacagacgcaggtcagagcacagaggaagtgcaggcccccctggccatgtgggaagccggtattcagcatattgagctagaaaaaggttccaagggtctgggcttttccattttagactaccaggatcctattgacccagcatcaacggtcatcatcatcaggagtctagtgcccggcggaatcgctgagaaggacggtcgccttttaccgggtgataggctgatgttcgttaacgacgtgaacctggagaattcctcactcgaagaggccgtcgaagctctaaaaggcgctccatctggcacagtgagaatcggagtcgcgaagccacttccattatcacccgaggagggctatgtctcagccaaggaggactccttcctgtaccctccccattcatgtgaggaagcaggactggcagacaagcctctgttccgtgctgatctagctttggtgggaacaaacgatgcagaccttgtcgacgaaagcacctttgaatccccatattccccagagaatgattcgatttacagcacccaggcctcgattctgagtctgcatggatctagttgcggcgatgggctgaattatggttcaagtctgccatcatctcctcccaaagatgtcattgagaactcatgcgaccccgtgctagacttgcacatgagcctggaagagctttatacccaaaatctgctgcagaggcaggacgagaacacacccagcgtggacattagcatgggaccagcatccgggtttactattaatgactacacaccagcaaatgccatcgaacaacagtatgagtgcgaaaatacaatcgtgtggaccgagagccacctaccttcagaggtgatctccagcgctgagctcccatctgttctccccgattccgctggtaaaggttctgagtacctccttgaacagtcaagcttagcctgtaacgctgagtgcgtcatgctccagaacgtgagcaaggagtccttcgagagaaccataaatattgccaagggtaactcctcactgggcatgacggtttctgccaataaagatggtctgggtatgatcgtcagaagcatcatccacggcggagctatctcccgagacggtcgtattgctatcggggattgcatcctctcgatcaatgaggagagcacaatcagcgtgactaacgcccaggcccgcgccatgctgaggcggcacagtcttataggaccagatatcaaaattacttacgtgccggcagagcatcttgaagagttcaagatctcacttgggcagcagagcggccgagtcatggcactcgatatcttttcttcatacaccgggagagatattccggaactccctgagagagaggaaggtgagggcgaagaatccgaactgcaaaacacagcatattccaattggaaccagccacgccgggtggaactgtggagggagccgagtaaatcccttggcatatctatagtaggagggaggggaatgggtagccgtctgagtaacggcgaagtgatgaggggcatttttataaagcatgtgctggaggattctcctgcagggaaaaatggtaccctgaagcccggcgacagaatagtcgaagtggatggaatggacctgagagacgcatcccatgagcaggccgtggaggctatccgcaaagctggcaaccccgtggtcttcatggttcagtccattatcaatcgacccagaaaatctccactcccgtctcttctccataacctttacccaaagtataatttttcatccacaaatccttttgcggactccctgcaaatcaacgccgacaaggcaccaagtcagtcagaatcagagccagaaaaggcgcccctctgctctgtcccgcctccacctccatcagcatttgctgaaatgggatcagaccatacccagagcagcgcatctaaaatttcgcaagacgtggataaggaggatgagttcggttattcttggaaaaacatcagagaaagatacggcaccctgaccggcgaactgcacatgatagagctcgaaaagggacatagcggacttggcctcagtcttgctggcaataaggaccgttctagaatgtccgtgttcattgtgggaattgatccgaacggagccgcaggcaaggatgggcggctccagatagctgatgaactcctagagattaatggacagatcctttacggtcgaagccaccagaacgctagttccataattaagtgcgctccctctaaagtcaagatcatttttatacggaacaaggatgctgtgaatcagatggctgtgtgtccggggaacgcagttgagccactgccttccaacagcgagaacctccaaaacaaggagaccgagccaaccgtcacaacgtcggatgccgccgttgatctgagctcttttaagaatgtccagcacctggaattaccaaaagatcagggcggacttggtattgctatcagcgaagaagacaccctctccggggtgatcataaaatctttgaccgagcatggcgttgcagctacagacgggcgcttgaaggtaggggatcagatccttgccgttgacgatgagattgtcgtgggctacccaatcgaaaagtttatcagtttactcaagactgcaaagatgacagtgaaactgactatccatgccgagaacccggatagtcaggcggttccatccgcggcaggagccgcttcaggggagaagaagaactccagccagagcttaatggttcctcaaagtgggtctccagagcctgagtcgattcgcaatacctctcggagcagcacacccgcaatcttcgccagtgatccggccacatgccccatcatccccgggtgcgagacaaccatagaaataagcaaagggcggaccggactgggcctctcaattgttggcgggagtgatacattactgggcgctatcattattcacgaggtgtacgaagagggtgctgcgtgtaaagacgggcgtctttgggccggtgaccagatcttagaggtgaatggcatcgacctccggaaggcaacccacgacgaggctataaacgtgctgagacagaccccccagcgtgttcggttaacactgtaccgcgacgaggcgccatacaaggaggaagaagtctgcgatactttgacgatcgagctccagaagaagcccgggaaaggcctgggcttgtctatcgtaggtaagagaaacgataccggcgttttcgtgtcggacattgtcaagggcggaatcgcagatgcagatgggcggctgatgcagggcgaccagatccttatggtgaatggagaggacgttcggaatgcaacccaagaggccgtggctgcacttttaaaagtctccgaggggtcactcagttcctttacctttcccctgagcgggtcttccacctcagaatctctggaatctagcagcaagaagaatgccctggcttccgagatccagggcctccggacggtggagatgaagaagggaccgaccgactccctgggaatcagcattgcaggaggcgttggatctccactcggagatgttcccatctttattgcaatgatgcaccccactggggttgcagcacagacccagaaactcagagtaggcgaccggatcgtaacaatttgcggtacaagcactgaaggaatgacccatactcaggctgtgaacctgctgaagaacgcgtcggggtccatcgaaatgcaagtcgtggccggcggtgatgtgagcgtggtgacagggcatcaacaggagccagcaagctcttctctctctttcaccggcctgacgtcctcctctatcttccaggacgatctggggcccccccagtgcaaatcaattaccctggagagagggcccgatggcctaggcttctctatcgtgggcggctacggcagtccccatggcgatctacccatctatgtaaagaccgtttttgctaagggagccgcctcagaggatggccggttgaaaagaggagaccagatcattgcggtcaatgggcagtcccttgagggggttacccacgaagaggcagtggctattctgaagagaacgaaagggacagtgaccttaatggttcttagctag

SEQ ID NO: 141151 - DNA, 6126 bp, Artificial Sequence
  derived and/or modified sequence
atgctggaggccatcgacaagaacagagccctgcatgctgctgagcggctgcagaccaagctgcgggagagaggagatgtggccaatgaagacaagctgagcctgctgaagtctgtgctgcagagccccctcttcagccagatcctgagcctgcagacctctgtgcagcagctgaaggaccaggtgaacatcgccaccagcgccaccagcaacatcgagtatgcccacgtgccccacctgagccctgctgtgatccccaccctgcagaatgaaagcttcctgctgagccccaacaatggaaacctggaggccctgaccggccctggcatcccccacatcaacgggaagccagcctgtgatgaatttgaccagctgatcaagaacatggcccagggccgccacgtggaggtgtttgagctgctgaagcccccatctgggggcctgggcttctctgtggtgggcctgcggtctgagaacagaggagagctgggcatctttgtgcaggagatccaggagggctctgtggcccacagagatggccgcctgaaggagacagaccagatcctggccatcaatggccaggccctggaccagaccatcacccaccagcaggccatcagcatcctgcagaaggccaaggacacagtgcagctggtgattgcccggggcagcctgccccagctggtgagccccatcgtgagccgcagccccagcgctgccagcaccatcagcgcccacagcaaccctgtgcactggcagcacatggagaccatcgagctggtgaatgatggcagcggcctgggcttcggcatcatcggcggcaaggccactggagtcatcgtgaagaccatcctgcccggcggcgtggccgaccagcacggccgcctgtgcagcggggaccacatcctgaagattggagacacagacctggccggcatgagcagcgagcaggtggcccaggtgctgcggcagtgtggcaacagagtgaagctgatgattgcccggggggccatcgaggagaggacagcccccacagccctgggcatcaccctgagcagcagccccaccagcaccccagagctgcgggtggatgccagcacccagaagggggaggagagcgagacctttgatgtggagctgaccaagaatgtgcagggcctgggcatcaccatcgccggctacatcggggacaagaagctggagcccagcggcatctttgtgaagagcatcaccaagagcagcgctgtggagcatgatggccgcatccagatcggggaccagatcatcgctgtggatggcaccaacctgcagggcttcaccaaccagcaggccgtggaggtgctgcggcacacaggccagacagtgctgctgaccctgatgagaagaggcatgaagcaggaggccgagctgatgagccgggaggatgtgaccaaggatgctgacctgagccctgtgaatgccagcatcatcaaggagaactatgagaaggatgaggacttcctgagcagcaccaggaacaccaacatcctgcccacagaggaggagggctaccccctgctgtctgctgagattgaggagattgaagatgcccagaagcaggaggccgccctgctgaccaagtggcagaggatcatgggcatcaactatgaaattgtggtggcccacgtgtccaagttctctgaaaattctggcctgggcatcagcctggaggccaccgtgggccaccacttcatccgctctgtgctgcctgagggccctgtgggccacagcggcaagctgttctctggagatgagctgctggaggtgaatggcatcaccctgctgggggagaaccaccaggatgtggtgaacatcctgaaggagctgcccatcgaggtgaccatggtgtgctgcagaagaacagtgccccccaccacccagagcgagctggacagcctggacctgtgtgacatcgagctgacagagaagccccacgtggacctgggggagttcatcggcagcagcgagacagaagatcctgtgctggccatgacagatgctggccagagcacagaggaggtgcaggcccccctggccatgtgggaggccggcatccagcacatcgagctggagaagggcagcaagggcctgggcttcagcatcctggactaccaggaccccattgatcctgccagcaccgtcatcatcatccgcagcctggtgcctgggggcattgctgagaaggatggccgcctgctgcccggggaccggctgatgtttgtgaatgatgtgaacctggagaacagcagcctggaggaggccgtggaggccctgaagggggcccccagcggcaccgtgagaattggagtggccaagcccctgcccctgagccctgaggagggctacgtgtctgccaaggaggacagcttcctgtacccaccccacagctgtgaggaggccggcctggccgacaagcccctcttccgggctgacctggccctggtgggcaccaatgatgctgacctggtggatgagagcacctttgagagcccctacagcccagaaaatgacagcatctacagcacccaggccagcatcctgagcctgcacggcagcagctgtggagatggcctgaactacggcagcagcctgcccagcagcccccccaaggatgtgattgagaacagctgtgaccctgtgctggacctgcacatgagcctggaggagctgtacacccagaacctgctgcagaggcaggatgagaacacccccagcgtggacatctccatgggccctgccagcggcttcaccatcaatgactacaccccagccaatgccatcgagcagcagtatgaatgtgagaacaccatcgtgtggacagagagccacctgcccagcgaggtgatcagcagcgctgagctgcccagcgtgctgcctgacagcgctggaaaaggaagtgagtacctgctggagcagagcagcctggcctgcaatgcagaatgtgtgatgctgcagaatgtgtccaaggagagctttgagaggaccatcaacatcgccaagggcaacagcagcctgggcatgacagtgtctgccaacaaggatggcctgggcatgattgtgcgcagcatcatccacggcggggccatcagcagagatggccgcatcgccatcggggactgcatcctgagcatcaatgaggagagcaccatctctgtgaccaatgcccaggcccgggccatgctgcggcggcacagcctcatcggccctgacatcaagatcacctacgtgcctgctgagcacctggaggagttcaagatcagcctgggccagcagagcggccgggtgatggccctggacatcttcagcagctacacaggccgggacatccctgagctgcctgagcgggaggagggggagggggaggagagcgagctgcagaacacagcctacagcaactggaaccagccccggcgggtggagctgtggagggagcccagcaagagcctgggcatcagcatcgtgggcggccggggcatgggcagccggctgagcaatggagaggtgatgaggggcatcttcatcaagcacgtgctggaggacagccctgctgggaagaatggcaccctgaagccaggggaccgcatcgtggaggtggatggcatggacctgagagatgccagccatgagcaggccgtggaggccatcaggaaggccggcaaccctgtggtgttcatggtgcagagcatcatcaaccggcccaggaagagccccctgcccagcctgctgcacaacctgtaccccaagtacaacttcagcagcaccaacccctttgctgacagcctgcagatcaatgctgacaaggcccccagccagagcgagagcgagcctgagaaggcccccctgtgcagcgtgcccccacctcctccttctgcctttgctgagatgggcagtgaccacacccagagcagcgccagcaagatcagccaggatgtggacaaggaggatgaatttggctacagctggaagaacatccgggagagatatggcaccctgactggagagctgcacatgattgagctggagaagggccacagcggcctgggcctgagcctggccggcaacaaggacaggagcaggatgtctgtgttcatcgtgggcatcgaccccaatggagctgctgggaaggatggccgcctgcagattgctgatgagctgctggagatcaatggccagatcctgtatggccgcagccaccagaatgccagcagcatcatcaagtgtgcccccagcaaggtgaagatcatcttcatccggaacaaggatgctgtgaaccagatggctgtgtgccctggaaatgctgtggagcccctgcccagcaacagcgagaacctgcagaacaaggagacagagcccaccgtgaccaccagtgatgctgctgtggacctgagcagcttcaagaatgtgcagcacctggagctgcccaaggaccagggcggcctgggcatcgccatcagcgaggaggacaccctgagcggggtcatcatcaagagcctgacagagcacggcgtggccgccacagatggccgcctgaaggtgggggaccagatcctggccgtggatgatgagatcgtggtgggctaccccatcgagaagttcatcagcctgctgaagacagccaagatgacagtgaagctgaccatccacgcagaaaatccagacagccaggccgtgcccagcgctgctggggccgccagcggggagaagaagaacagcagccagagcctgatggtgccccagagcggcagccctgagcctgagagcatccggaacaccagccgcagcagcaccccagccatctttgccagtgaccctgccacctgccccatcatccctggctgtgagaccaccatcgagatcagcaagggccgcacaggcctgggcctgagcatcgtgggcggcagtgacaccctgctgggcgccatcatcatccacgaggtgtatgaggagggcgccgcctgcaaggatggccgcctgtgggccggggaccagatcctggaggtgaatggaattgacctgaggaaggccacccatgatgaggccatcaacgtgctgcggcagaccccccagagggtgcggctgaccctgtacagagatgaggccccctacaaggaggaggaggtgtgtgacaccctgaccatcgagctgcagaagaagccaggcaagggcctgggcctgagcatcgtgggcaagagaaatgacacaggagtgtttgtgtctgacatcgtgaagggcggcattgctgatgctgatggccgcctgatgcagggcgaccagatcctgatggtgaatggagaagatgtgagaaatgccacccaggaggccgtggccgccctgctgaaggtgtctgagggcagcctgagcagcttcaccttccccctgagcggcagcagcaccagcgagagcctggagagcagcagcaagaagaatgccctggccagcgagatccagggcctgaggacagtggagatgaagaagggccccacagacagcctgggcatcagcattgctggaggagtgggcagccccctgggagatgtgcccatcttcatcgccatgatgcaccccactggagtggccgcccagacccagaagctgcgggtgggggaccgcatcgtgaccatctgtggcaccagcacagagggcatgacccacacccaggccgtgaacctgctgaagaatgccagcggcagcattgagatgcaggtggtggccggaggagatgtgtctgtggtgacaggccaccagcaggagcccgccagcagcagcctgtccttcaccggcctgaccagcagcagcatcttccaggatgacctgggccccccccagtgcaagagcatcaccctggagcggggcccagatggcctgggcttcagcatcgtgggcggctacggcagcccccacggggacctgcccatctacgtgaagacagtgtttgccaagggagctgcctctgaagatggccgcctgaagagaggagaccagatcatcgctgtgaatggccagagcctggagggcgtgacccatgaggaggccgtggccatcctgaagaggaccaagggcaccgtgaccctgatggtgctgtcctag

SEQ ID NO: 141152 - DNA, 7430 bp, Artificial Sequence
  derived and/or modified sequence
attttaattgctgttaatcatttcagagaagaacactgaactttgaaaaaaatgttggaagccattgacaaaaatcgggccctgcatgcagcagagcgcttgcaaaccaagctgcgagaacgtggggatgtagcaaatgaagacaaactgagccttctgaagtcagtcctgcagagccctctcttcagtcagattctgagccttcagacttctgtacagcagctgaaagaccaggtaaatattgcaacttcagcaacttcaaatattgaatatgcccacgttcctcatctcagcccagctgtgattcctactctgcaaaatgaatcgtttttattatccccaaacaatgggaatctggaagcacttacaggacctggtattccacacattaatgggaaacctgcttgtgatgaatttgatcagcttatcaaaaatatggcccagggtcgccatgtagaagtttttgagctcctcaaacctccatctggaggccttgggtttagtgttgtgggactaagaagtgaaaacagaggagagctgggaatatttgttcaagagatacaagagggcagtgtggcccatagagatggaagattgaaagaaactgatcaaattcttgctatcaatggacaggctcttgatcagacaattacacatcagcaggctatcagcatcctgcagaaagccaaagatactgtccagctagttattgccagaggctcattgcctcagcttgtcagccccatagtttcccgttctccatctgcagccagcacaatttcagctcactctaatccggttcactggcaacacatggaaacgattgaattggtgaatgatggatctggtttgggatttggcatcataggaggaaaagcaactggtgtgatagtaaaaaccattctgcctggaggagtagctgatcagcatgggcgtttatgcagtggagaccacattctaaagattggtgacacagatctagcaggaatgagcagtgagcaagtagcacaagtccttaggcaatgtggaaatagagttaagttgatgattgcaagaggtgccatagaagaacgtacagcacccactgctttgggcatcaccctctcctcatccccaacttcaacaccagagttgcgggttgatgcttctactcagaaaggtgaagaaagtgagacatttgatgtagaactcactaaaaatgtccaaggattaggaattaccattgctggctacattggagataaaaaattggaaccttcaggaatctttgtaaagagcattacaaaaagcagtgccgttgagcatgatggaagaatccaaattggagaccaaattatagcagtagatggcacaaaccttcagggttttactaatcagcaagcagtagaggtattgcgacatacaggacaaactgtgctcctgacactaatgaggagaggaatgaagcaggaagccgagctcatgtcaagggaagacgtcacaaaagatgcagatttgtctcctgttaatgccagcataatcaaagaaaattatgaaaaagatgaagattttttatcttcgacgagaaacaccaacatattaccaactgaagaagaagggtatccattactgtcagctgagatagaagaaatagaagatgcacaaaaacaagaagctgctctgctgacaaaatggcaaaggattatgggaattaactatgaaatagtggtggcccatgtgagcaagtttagtgagaacagtggattggggataagcctggaagcgacagtgggacatcattttatccgatctgttctaccagagggtcctgttggacacagcgggaagctcttcagtggagacgagctattggaagtaaatggcataactttacttggggaaaatcaccaagatgtggtgaatatcttaaaagaactgcctatagaagtgacaatggtgtgctgtcgtcgaactgtgccacccaccacccaatcagaattggatagcctggacttatgtgatattgagctaacagaaaagcctcacgtagatctaggtgagttcatcgggtcatcagagacagaggatccagtgctggcgatgactgatgcgggtcagagtacagaagaggttcaagcacctttggccatgtgggaggctggcattcagcacatagagctggagaaagggagcaaaggacttggttttagcattttagattatcaggatccaattgatccagcaagcactgtgattataattcgttctttggtgcctggcggcattgctgaaaaggatggacgacttcttcctggtgaccgactcatgtttgtaaacgatgttaacttggaaaacagcagtcttgaggaagctgtagaagcactgaagggagcaccgtcagggactgtgagaataggagttgctaagcctttacccctttcaccagaagaaggttatgtttctgctaaggaggattcctttctctacccaccacactcctgtgaggaagcagggctggctgacaaacccctcttcagggctgacttggctctggtgggcacaaatgatgctgacttagtagatgaatccacatttgagtctccatactctcctgaaaatgacagcatctactctactcaagcctctattttatctcttcatggcagttcttgtggtgatggcctgaactatggttcttcccttccatcatctcctcctaaggatgttattgaaaattcttgtgatccagtacttgatctgcatatgtctctggaggaactatatacccagaatctcctgcaaagacaggatgagaatacaccttcggtggacataagtatggggcctgcttctggctttactataaatgactacacacctgcaaatgctattgaacaacaatatgaatgtgaaaacacaatagtgtggactgaatctcatttaccaagtgaagttatatcaagtgcagaacttccttctgtgctacccgattcagctggaaagggctctgagtacctgcttgaacagagctccctggcctgtaatgctgagtgtgtcatgcttcaaaatgtatctaaagaatcttttgaaaggactattaatatagcaaaaggcaattctagcctaggaatgacagttagtgctaataaagatggcttggggatgatcgttcgaagcattattcatggaggtgccattagtcgagatggccggattgccattggggactgcatcttgtccattaatgaagagtctaccatcagtgtaaccaatgcccaggcacgagctatgttgagaagacattctctcattggccctgacataaaaattacttatgtgcctgcagaacatttggaagagttcaaaataagcttgggacaacaatctggaagagtaatggcactggatattttttcttcatacactggcagagacattccagaattaccagagcgagaagagggagagggtgaagaaagcgaacttcaaaacacagcatatagcaattggaatcagcccaggcgggtggaactctggagagaaccaagcaaatccttaggcatcagcattgttggtggacgagggatggggagtcggctaagcaatggagaagtgatgaggggcattttcatcaaacatgttctggaagatagtccagctggcaaaaatggaaccttgaaacctggagatagaatcgtagaggtggatggaatggacctcagagatgcaagccatgaacaagctgtggaagccattcggaaagcaggcaaccctgtagtctttatggtacagagcattataaacagaccaaggaaatcccctttgccttccttgctgcacaacctttaccctaagtacaacttcagcagcactaacccatttgctgactctctacaaatcaacgccgacaaggcacccagtcagtcagagtcagagccagagaaggctccattgtgcagtgtgcccccaccccctccttcagcctttgccgaaatgggtagtgatcacacacagtcatctgcaagcaaaatctcacaagatgtggacaaagaggatgagtttggttacagctggaaaaatatcagagagcgttatggaaccctaacaggcgagctgcatatgattgaactggagaaaggtcatagtggtttgggcctaagtcttgctgggaacaaagaccgatccaggatgagtgtcttcatagtggggattgatccaaatggagctgcaggaaaagatggtcgattgcaaattgcagatgagcttctagagatcaatggtcagattttatatggaagaagtcatcagaatgcctcatcaatcattaaatgtgccccttctaaagtgaaaataatttttatcagaaataaagatgcagtgaatcagatggccgtatgtcctggaaatgcagtagaacctttgccttctaactcagaaaatcttcaaaataaggagacagagccaactgttactacttctgatgcagctgtggacctcagttcatttaaaaatgtgcaacatctggagcttcccaaggatcaggggggtttgggtattgctatcagcgaagaagatacactcagtggagtcatcataaagagcttaacagagcatggggtagcagccacggatggacgactcaaagtcggagatcagatactggctgtagatgatgaaattgttgttggttaccctattgaaaagtttattagccttctgaagacagcaaagatgacagtaaaacttaccatccatgctgagaatccagattcccaggctgttccttcagcagctggtgcagccagtggagaaaaaaagaacagctcccagtctctgatggtcccacagtctggctccccagaaccggagtccatccgaaatacaagcagatcatcaacaccagcaatttttgcttctgatcctgcaacctgccccattatccctggctgcgaaacaaccatcgagatttccaaagggcgaacagggctgggcctgagcatcgttgggggttcagacacgctgctgggtgccattattatccatgaagtttatgaagaaggagcagcatgtaaagatggaagactctgggctggagatcagatcttagaggtgaatggaattgacttgagaaaggccacacatgatgaagcaatcaatgtcctgagacagacgccacagagagtgcgcctgacactctacagagatgaggccccatacaaagaggaggaagtgtgtgacaccctcactattgagctgcagaagaagccgggaaaaggcctaggattaagtattgttggtaaaagaaacgatactggagtatttgtgtcagacattgtcaaaggaggaattgcagatgccgatggaagactgatgcagggagaccagatattaatggtgaatggggaagacgttcgtaatgccacccaagaagcggttgccgctttgctaaaggtgagtgaaggcagcctgtcatctttcacttttccactctctggatccagtacatctgagtcactggaaagtagctcaaagaagaatgcattggcatctgaaatacagggattaagaacagtcgaaatgaaaaagggccctactgactcactgggaatcagcattgctggaggagtaggcagcccacttggtgatgtgcctatatttattgcaatgatgcacccaactggagttgcagcacagacccaaaaactcagagttggggataggattgtcaccatctgtggcacatccactgagggcatgactcacacccaagcagttaacctactgaaaaatgcatctggctccattgaaatgcaggtggttgctggaggagacgtgagtgtggtcacaggtcatcagcaggagcctgcaagttccagtctttctttcactgggctgacgtcaagcagtatatttcaggatgatttaggacctcctcaatgtaagtctattacactagagcgaggaccagatggcttaggcttcagtatagttggaggatatggcagccctcatggagacttacccatttatgttaaaacagtgtttgcaaagggagcagcctctgaagacggacgtctgaaaaggggcgatcagatcattgctgtcaatgggcagagtctagaaggagtcacccatgaagaagctgttgccatccttaaacggacaaaaggcactgtcactttgatggttctctcttgaattggctgccagaattgaaccaacccaacccctagctcacctcctactgtaaagagaatgcactggtcctgacaatttttatgctgtgttcagccgggtcttcaaaactgtaggggggaaataacacttaagtttctttttctcatctagaaatgctttccttactgacaacctaacatcatttttcttttcttcttgcattttgtgaacttaaagagaaggaatatttgtgtaggtgaatctcgtttttatttgtggagatatctaatgttttgtagtcacatgggcaagaattattacatgctaagctggttagtataaagaaagataattctaaagctaaccaaagaaaatggcttcagtaaattaggatgaaaaatgaaaatataaaataaagaagaaaatctcggggagtttaaaaaaaatgcctcaatttggcaatctacctcctctccccaccccaaactaaaaaaagaaaaaaaggttttctaatgaaaatctttaaaaatactgtcagtattttaaaattttcaacagtattataaaaacattgcatctccccacctctaatatgcatatatatttttcctgctaaaattggtttctacaattgagtaaatggcaaatacatgaagcaatgtccctaaattttataaagaaattatatttaatgcacatttcaattttcattcttatttttgaccttttgtaaaatattttcatgttgctataagtaaatgatgatgccaccccatgttgactatggtttttctagaaagcaactatgctgctaaccatagaggaacatagaagggttccagaatctttagtgctggttttaacaaccgatgcaacattaaaaatgtgttagtgtgctgtgcaattggttttcaattcatattaatcttaatgacagagaacaatgtgttactaattattttggttgtatgccattagtaaattgatagaaaaattaaggggattaacataacttcatttcattgacttatattaacatcttataatacaatagtttaagactaagggaaacagatggagctgtttattgagacaactggtgaggaattatcatgtgttcattcccattttagagcgtgaaactcctacattagaatatataaagtcactttaaatatctatatttgtaacagaagtagtgtacagatattttattacagcatttttgtgtaaatgcagaattaaagtgaataaataagaattttcagtggtgc

SEQ ID NO: 141153 - DNA, 7603 bp, Artificial Sequence
  derived and/or modified sequence
cgtgagtgtctgtgcgttttgatccgaagctcctcgccgggtcgttacttcagaagagaagacagtgagcgtgggcgaggcgaggcatccagaggccccggcgacccctgctccccagtcctccgccccctcgcgtcgcggccctgggcgggcgccgcgagccggagttccattttaattgctgttaatcatttcagagaagaacactgaactttgaaaaaaatgttggaagccattgacaaaaatcgggccctgcatgcagcagagcgcttgcaaaccaagctgcgagaacgtggggatgtagcaaatgaagacaaactgagccttctgaagtcagtcctgcagagccctctcttcagtcagattctgagccttcagacttctgtacagcagctgaaagaccaggtaaatattgcaacttcagcaacttcaaatattgaatatgcccacgttcctcatctcagcccagctgtgattcctactctgcaaaatgaatcgtttttattatccccaaacaatgggaatctggaagcacttacaggacctggtattccacacattaatgggaaacctgcttgtgatgaatttgatcagcttatcaaaaatatggcccagggtcgccatgtagaagtttttgagctcctcaaacctccatctggaggccttgggtttagtgttgtgggactaagaagtgaaaacagaggagagctgggaatatttgttcaagagatacaagagggcagtgtggcccatagagatggaagattgaaagaaactgatcaaattcttgctatcaatggacaggctcttgatcagacaattacacatcagcaggctatcagcatcctgcagaaagccaaagatactgtccagctagttattgccagaggctcattgcctcagcttgtcagccccatagtttcccgttctccatctgcagccagcacaatttcagctcactctaatccggttcactggcaacacatggaaacgattgaattggtgaatgatggatctggtttgggatttggcatcataggaggaaaagcaactggtgtgatagtaaaaaccattctgcctggaggagtagctgatcagcatgggcgtttatgcagtggagaccacattctaaagattggtgacacagatctagcaggaatgagcagtgagcaagtagcacaagtccttaggcaatgtggaaatagagttaagttgatgattgcaagaggtgccatagaagaacgtacagcacccactgctttgggcatcaccctctcctcatccccaacttcaacaccagagttgcgggttgatgcttctactcagaaaggtgaagaaagtgagacatttgatgtagaactcactaaaaatgtccaaggattaggaattaccattgctggctacattggagataaaaaattggaaccttcaggaatctttgtaaagagcattacaaaaagcagtgccgttgagcatgatggaagaatccaaattggagaccaaattatagcagtagatggcacaaaccttcagggttttactaatcagcaagcagtagaggtattgcgacatacaggacaaactgtgctcctgacactaatgaggagaggaatgaagcaggaagccgagctcatgtcaagggaagacgtcacaaaagatgcagatttgtctcctgttaatgccagcataatcaaagaaaattatgaaaaagatgaagattttttatcttcgacgagaaacaccaacatattaccaactgaagaagaagggtatccattactgtcagctgagatagaagaaatagaagatgcacaaaaacaagaagctgctctgctgacaaaatggcaaaggattatgggaattaactatgaaatagtggtggcccatgtgagcaagtttagtgagaacagtggattggggataagcctggaagcgacagtgggacatcattttatccgatctgttctaccagagggtcctgttggacacagcgggaagctcttcagtggagacgagctattggaagtaaatggcataactttacttggggaaaatcaccaagatgtggtgaatatcttaaaagaactgcctatagaagtgacaatggtgtgctgtcgtcgaactgtgccacccaccacccaatcagaattggatagcctggacttatgtgatattgagctaacagaaaagcctcacgtagatctaggtgagttcatcgggtcatcagagacagaggatccagtgctggcgatgactgatgcgggtcagagtacagaagaggttcaagcacctttggccatgtgggaggctggcattcagcacatagagctggagaaagggagcaaaggacttggttttagcattttagattatcaggatccaattgatccagcaagcactgtgattataattcgttctttggtgcctggcggcattgctgaaaaggatggacgacttcttcctggtgaccgactcatgtttgtaaacgatgttaacttggaaaacagcagtcttgaggaagctgtagaagcactgaagggagcaccgtcagggactgtgagaataggagttgctaagcctttacccctttcaccagaagaaggttatgtttctgctaaggaggattcctttctctacccaccacactcctgtgaggaagcagggctggctgacaaacccctcttcagggctgacttggctctggtgggcacaaatgatgctgacttagtagatgaatccacatttgagtctccatactctcctgaaaatgacagcatctactctactcaagcctctattttatctcttcatggcagttcttgtggtgatggcctgaactatggttcttcccttccatcatctcctcctaaggatgttattgaaaattcttgtgatccagtacttgatctgcatatgtctctggaggaactatatacccagaatctcctgcaaagacaggatgagaatacaccttcggtggacataagtatggggcctgcttctggctttactataaatgactacacacctgcaaatgctattgaacaacaatatgaatgtgaaaacacaatagtgtggactgaatctcatttaccaagtgaagttatatcaagtgcagaacttccttctgtgctacccgattcagctggaaagggctctgagtacctgcttgaacagagctccctggcctgtaatgctgagtgtgtcatgcttcaaaatgtatctaaagaatcttttgaaaggactattaatatagcaaaaggcaattctagcctaggaatgacagttagtgctaataaagatggcttggggatgatcgttcgaagcattattcatggaggtgccattagtcgagatggccggattgccattggggactgcatcttgtccattaatgaagagtctaccatcagtgtaaccaatgcccaggcacgagctatgttgagaagacattctctcattggccctgacataaaaattacttatgtgcctgcagaacatttggaagagttcaaaataagcttgggacaacaatctggaagagtaatggcactggatattttttcttcatacactggcagagacattccagaattaccagagcgagaagagggagagggtgaagaaagcgaacttcaaaacacagcatatagcaattggaatcagcccaggcgggtggaactctggagagaaccaagcaaatccttaggcatcagcattgttggtggacgagggatggggagtcggctaagcaatggagaagtgatgaggggcattttcatcaaacatgttctggaagatagtccagctggcaaaaatggaaccttgaaacctggagatagaatcgtagaggtggatggaatggacctcagagatgcaagccatgaacaagctgtggaagccattcggaaagcaggcaaccctgtagtctttatggtacagagcattataaacagaccaaggaaatcccctttgccttccttgctgcacaacctttaccctaagtacaacttcagcagcactaacccatttgctgactctctacaaatcaacgccgacaaggcacccagtcagtcagagtcagagccagagaaggctccattgtgcagtgtgcccccaccccctccttcagcctttgccgaaatgggtagtgatcacacacagtcatctgcaagcaaaatctcacaagatgtggacaaagaggatgagtttggttacagctggaaaaatatcagagagcgttatggaaccctaacaggcgagctgcatatgattgaactggagaaaggtcatagtggtttgggcctaagtcttgctgggaacaaagaccgatccaggatgagtgtcttcatagtggggattgatccaaatggagctgcaggaaaagatggtcgattgcaaattgcagatgagcttctagagatcaatggtcagattttatatggaagaagtcatcagaatgcctcatcaatcattaaatgtgccccttctaaagtgaaaataatttttatcagaaataaagatgcagtgaatcagatggccgtatgtcctggaaatgcagtagaacctttgccttctaactcagaaaatcttcaaaataaggagacagagccaactgttactacttctgatgcagctgtggacctcagttcatttaaaaatgtgcaacatctggagcttcccaaggatcaggggggtttgggtattgctatcagcgaagaagatacactcagtggagtcatcataaagagcttaacagagcatggggtagcagccacggatggacgactcaaagtcggagatcagatactggctgtagatgatgaaattgttgttggttaccctattgaaaagtttattagccttctgaagacagcaaagatgacagtaaaacttaccatccatgctgagaatccagattcccaggctgttccttcagcagctggtgcagccagtggagaaaaaaagaacagctcccagtctctgatggtcccacagtctggctccccagaaccggagtccatccgaaatacaagcagatcatcaacaccagcaatttttgcttctgatcctgcaacctgccccattatccctggctgcgaaacaaccatcgagatttccaaagggcgaacagggctgggcctgagcatcgttgggggttcagacacgctgctgggtgccattattatccatgaagtttatgaagaaggagcagcatgtaaagatggaagactctgggctggagatcagatcttagaggtgaatggaattgacttgagaaaggccacacatgatgaagcaatcaatgtcctgagacagacgccacagagagtgcgcctgacactctacagagatgaggccccatacaaagaggaggaagtgtgtgacaccctcactattgagctgcagaagaagccgggaaaaggcctaggattaagtattgttggtaaaagaaacgatactggagtatttgtgtcagacattgtcaaaggaggaattgcagatgccgatggaagactgatgcagggagaccagatattaatggtgaatggggaagacgttcgtaatgccacccaagaagcggttgccgctttgctaaaggtgagtgaaggcagcctgtcatctttcacttttccactctctggatccagtacatctgagtcactggaaagtagctcaaagaagaatgcattggcatctgaaatacagggattaagaacagtcgaaatgaaaaagggccctactgactcactgggaatcagcattgctggaggagtaggcagcccacttggtgatgtgcctatatttattgcaatgatgcacccaactggagttgcagcacagacccaaaaactcagagttggggataggattgtcaccatctgtggcacatccactgagggcatgactcacacccaagcagttaacctactgaaaaatgcatctggctccattgaaatgcaggtggttgctggaggagacgtgagtgtggtcacaggtcatcagcaggagcctgcaagttccagtctttctttcactgggctgacgtcaagcagtatatttcaggatgatttaggacctcctcaatgtaagtctattacactagagcgaggaccagatggcttaggcttcagtatagttggaggatatggcagccctcatggagacttacccatttatgttaaaacagtgtttgcaaagggagcagcctctgaagacggacgtctgaaaaggggcgatcagatcattgctgtcaatgggcagagtctagaaggagtcacccatgaagaagctgttgccatccttaaacggacaaaaggcactgtcactttgatggttctctcttgaattggctgccagaattgaaccaacccaacccctagctcacctcctactgtaaagagaatgcactggtcctgacaatttttatgctgtgttcagccgggtcttcaaaactgtaggggggaaataacacttaagtttctttttctcatctagaaatgctttccttactgacaacctaacatcatttttcttttcttcttgcattttgtgaacttaaagagaaggaatatttgtgtaggtgaatctcgtttttatttgtggagatatctaatgttttgtagtcacatgggcaagaattattacatgctaagctggttagtataaagaaagataattctaaagctaaccaaagaaaatggcttcagtaaattaggatgaaaaatgaaaatataaaataaagaagaaaatctcggggagtttaaaaaaaatgcctcaatttggcaatctacctcctctccccaccccaaactaaaaaaagaaaaaaaggttttctaatgaaaatctttaaaaatactgtcagtattttaaaattttcaacagtattataaaaacattgcatctccccacctctaatatgcatatatatttttcctgctaaaattggtttctacaattgagtaaatggcaaatacatgaagcaatgtccctaaattttataaagaaattatatttaatgcacatttcaattttcattcttatttttgaccttttgtaaaatattttcatgttgctataagtaaatgatgatgccaccccatgttgactatggtttttctagaaagcaactatgctgctaaccatagaggaacatagaagggttccagaatctttagtgctggttttaacaaccgatgcaacattaaaaatgtgttagtgtgctgtgcaattggttttcaattcatattaatcttaatgacagagaacaatgtgttactaattattttggttgtatgccattagtaaattgatagaaaaattaaggggattaacataacttcatttcattgacttatattaacatcttataatacaatagtttaagactaagggaaacagatggagctgtttattgagacaactggtgaggaattatcatgtgttcattcccattttagagcgtgaaactcctacattagaatatataaagtcactttaaatatctatatttgtaacagaagtagtgtacagatattttattacagcatttttgtgtaaatgcagaattaaagtgaataaataagaattttcagtggtgcac

SEQ ID NO: 141154 - DNA, 6126 bp, Artificial Sequence
  derived and/or modified sequence
atgctggaggccatcgacaagaaccgggccctgcacgccgccgagcgactgcagacaaagctcagggaacggggtgacgtggcaaatgaggacaagcttagtctgctgaaatccgtgttgcagtcacctctttttagccagattctcagcttacagactagtgtgcagcagcttaaagatcaggtcaatattgccacgagcgcaacatcgaatattgagtatgcacacgttccgcatttatccccggcggtgataccaactctgcagaacgaatcttttcttctctcacccaacaatggaaacttagaggcactgaccggacctggcatcccacatataaatggcaagcccgcctgcgacgagttcgaccagttaattaaaaatatggcacaggggagacacgtcgaggtcttcgagttgcttaagccgcctagcggagggctgggattttccgtcgtggggctgaggtctgagaaccgcggggaattggggatttttgtgcaagaaatacaggaaggatcggtggcccaccgagacggacggctaaaagagacagaccaaattctggccatcaacggccaagccctagatcaaactattactcaccaacaggctatcagcatcttgcaaaaagctaaggatacagtgcagctcgtcattgcccgcggatctttaccccagctcgtgtcacccattgtctctagatccccatccgcagcctctactatctcagcccactcgaaccccgtgcattggcagcatatggaaacgattgaactggtaaatgacggctctggactgggctttggaatcatcggcggtaaagctacaggtgtgatcgtgaaaacaatcttacccggtggcgtggcagaccagcatgggcgactttgctccggcgatcatattctgaagatcggtgatacagacctcgctgggatgagctccgagcaggttgcccaggtcttgcgacagtgcggtaacagggtaaaattgatgattgcccggggcgcaatcgaggagcggacagcgccaaccgccctgggcatcactctctcaagcagcccaactagcaccccagaacttagggtggacgcaagcactcagaagggtgaagagtcggaaacctttgacgtggaactgacaaagaacgtccagggactcggtatcaccattgcaggatatatcggcgacaaaaagcttgaacctagcgggatcttcgtgaagagtataactaagtcttctgctgtggaacatgacggcaggatccagataggggaccaaattatcgctgtggacggtaccaatctacaggggtttaccaaccagcaagcagtcgaagtcctccgccatactggtcagaccgtgcttctcacgctaatgcgacggggtatgaaacaagaagccgagttgatgtcccgcgaggacgtaacgaaagacgccgacctctcaccagtcaacgcaagcatcattaaggaaaactacgagaaggacgaggacttcctctctagcacacggaacacgaatatccttcctacggaggaggagggatatcctctgctgtccgccgaaatagaggagattgaggatgctcagaaacaggaagcagcactgctcactaaatggcaaagaataatgggtatcaattacgaaatcgtcgtggcacatgtgtctaagttttccgagaattctgggctgggcatatcactcgaggcaaccgtggggcatcacttcattcgctcagtcttacccgagggccctgtgggtcattcggggaaattattcagtggagatgagctgctcgaggtgaatgggattactctactcggcgagaaccatcaggacgtagtgaatatcctgaaagagcttccaattgaagtaaccatggtgtgctgtagaagaactgtcccgccaacgacccaaagcgaactagattctttagacctgtgtgacatcgaattgacagaaaagcctcacgttgatcttggagagttcatagggtctagcgaaacagaggaccccgtgctggccatgaccgacgcaggccagagtaccgaggaggtgcaagcgcccttggccatgtgggaggcgggaattcagcacatcgagctggaaaaaggcagtaaagggctgggcttcagcatcctggactaccaggaccccatcgaccctgcaagcactgtcattatcatccggagcctagttccggggggtatcgcagagaaggatggaagactgctgcccggtgaccgcttgatgtttgtcaatgacgtgaacttggagaatagttctctcgaagaagccgttgaagccctgaagggagccccatccggaactgtacggattggtgtggccaagccactgcctttgagtcccgaggagggatatgtgagcgccaaagaggactcatttttataccccccgcatagctgtgaggaggctgggctggccgataagccactgttccgggccgatctcgccctagttgggacaaacgatgcagatctggtggatgaaagcacatttgaaagcccctactcgcccgagaatgatagcatttacagcacgcaggccagtattttgagtctgcatggcagcagctgtggagatggactgaattatggcagttctctgccttcgtccccccctaaggacgtaatcgagaattcatgcgaccccgttctggatcttcacatgtcactcgaggagctttatacccagaatctgctgcagcgacaggatgaaaacaccccctctgtcgatatcagtatggggcccgccagcggatttactataaacgactacacacctgccaatgccatcgaacagcaatacgagtgcgaaaatactattgtctggaccgaatcccaccttccctcggaagtcatctcttctgcagagctcccctccgtgctgccagattccgccggcaagggttccgaatacctgctggagcagagctccctggcctgtaacgcggaatgcgttatgctccaaaacgtctcaaaggagagctttgagaggaccatcaatattgcaaagggcaatagcagcctgggaatgactgtgtctgctaataaagacggattggggatgattgtccggtccatcatccacggcggagccatatctcgcgatgggaggattgcgataggcgattgcatactatcaattaatgaggagtccacaatctcagtcacaaatgcacaggcccgcgctatgttgcgtaggcactcgctaatcggtcccgacattaaaatcacctacgttccggctgagcacctagaggaatttaagataagtctcgggcaacagagcggcagggtgatggcgctagacattttttcttcctacactggccgggatatccccgagctgccagagcgagaagagggcgagggggaggaaagtgagcttcaaaacacggcctacagcaattggaaccagccacgcagagtggagctgtggagggaaccatctaagtcactgggaatctccatcgtggggggcaggggcatggggtcaaggctgtccaacggagaggtcatgcgtggcatctttatcaagcatgtccttgaggatagcccggctggtaagaacgggactctgaagccgggcgataggattgtcgaggtggacgggatggatctcagagacgcgagtcatgagcaggcagtggaagctatacggaaagctggcaacccagtggtctttatggtgcagtccatcatcaaccgtcccagaaaatccccactgccttccctccttcataatctgtatcctaaatataatttttccagtacaaatccgtttgctgactctctccaaataaacgctgataaagcgccctcccagagcgagagtgagcctgaaaaagccccgctgtgttcagtgcctcccccaccgcccagcgcctttgccgagatggggagtgatcacactcagtcgtccgcctctaagattagccaggatgtggataaggaggatgagtttggatattcatggaaaaacattcgggaacgatacgggacccttaccggcgagctgcacatgatcgaactagagaaaggacacagtggcctcggcctgtcacttgctggaaacaaggaccgttctagaatgtccgtgtttatcgttggaatcgatccaaacggcgctgcgggtaaggacgggagactgcaaatcgcagatgaactgctggagatcaacggccaaattttatatggaaggtctcaccaaaatgcatctagcatcatcaagtgcgcgccttctaaggtcaagattatttttatccggaataaagacgccgtcaaccagatggccgtgtgccccggtaatgctgtggaacccctgccaagcaactccgagaacctgcaaaacaaagagacagagcctacagtgacaaccagcgacgccgcagtagatctgtcttctttcaagaacgtacaacacctcgagctgccaaaggaccagggtggtctggggattgctattagtgaggaagacaccctctccggtgtgataattaagtccctgacagaacacggggtggccgccaccgacggcagattgaaggtaggcgaccagatcctcgctgtggatgatgagatagtcgtcgggtatcccattgagaagttcatttcattattgaagaccgcgaagatgacggtcaaactcactattcacgctgagaatcccgactcgcaagcagtgccgagtgccgcaggggccgcaagcggagaaaagaagaatagcagccaatccctgatggtgccccagagcggcagtcccgaacctgaaagcattcgtaatacaagtaggtcaagtacaccagcaatttttgcttccgatcctgctacttgccccattatcccaggttgcgagaccactatcgagatctccaaagggagaacgggactcggactgagcatcgtaggtgggtccgacactctactcggggcgataataattcatgaggtgtatgaggagggagctgcatgcaaagacggccggctgtgggccggcgaccaaatcctcgaagtgaacggtatcgacctgaggaaagctacacatgatgaagctatcaatgttcttagacagactcctcagcgagtgcgtctgacgctgtatcgagacgaggctccatataaggaggaggaggtttgtgacactctgactattgagctgcaaaaaaagcccggtaaggggttgggtctctcaattgtagggaaacggaacgacacaggagtatttgtgtcagacatagtcaagggtggaatcgccgacgccgacgggcggctgatgcagggagaccagatcctgatggttaatggggaggatgttcgtaatgcaacacaggaagccgtggccgcgttactaaaggtgagtgagggatccctctcatcttttactttccccctgagcggctctagtacttcagaaagcctggaatcatccagtaagaaaaacgctctggccagcgagattcaggggctgcggaccgtggagatgaaaaaaggacccactgattccctgggtatttccattgccggcggagtgggatctccactaggtgatgtaccaatctttatcgccatgatgcaccccacaggtgttgcagcacagacgcagaagctgcgtgttggggaccgcatagtcacaatttgcggaacgagtaccgaaggcatgacccacacacaggctgtcaatctgttaaagaatgcttctggttcaatcgaaatgcaggtggtggctggtggggacgtctctgtggtgaccgggcatcagcaggaaccagcttcgtcaagcctgtcgttcactggcctgacctcttcctccattttccaagatgaccttggtcctcctcagtgcaagagcattactttggaacggggcccggacggactgggattttctatcgtcggtggatacggttctccccatggtgatttgccaatctacgtgaaaacagtattcgcgaaaggcgcggctagcgaggatggacggctgaagcgcggagatcagataatcgcagtcaatggacagagtctggagggcgttacccacgaagaggcagtcgctattttaaagaggacaaagggcaccgttactttgatggtgcttagttag

SEQ ID NO: 141155 - DNA, 6126 bp, Artificial Sequence
  derived and/or modified sequence
atgctggaggccatcgacaagaaccgggccctgcacgccgccgagcgattacagaccaaactcagagaaagaggtgatgtggccaatgaggataaactttctctactaaagagcgttctgcagtctccactgttctctcagatcttgtcactacagacttctgtgcagcagcttaaggatcaggtaaacatcgcgacatcagcaacatcgaacatagaatacgcccacgttccccacctctcccccgcggtgatccctaccctgcaaaatgaatcattccttctctcaccaaacaatggcaatctcgaggccttgacaggcccgggcattccacacattaatggaaagcccgcatgcgatgagtttgaccaactcattaagaacatggcacagggacggcatgttgaagtttttgaactgttgaagccacctagcggcgggttgggcttctctgtcgtaggtctacggtcagagaatagaggcgagctgggaatctttgtacaggagatccaggagggttcagtcgctcatcgtgatgggcggctgaaggagaccgatcagatactagccatcaacggacaagcgctggaccagacaatcactcatcagcaggctatcagtatccttcaaaaggccaaggatacagtccagttggtgatagcaagagggtccctaccacagctcgtgagcccaatcgtcagccggtctccatcggccgccagtaccattagtgcccattccaacccagttcattggcaacacatggagaccattgagctggtgaatgacggttcaggcctgggattcggcattataggcggtaaggctactggagttatagtcaagactatcctgcccggcggcgtggcggaccaacacgggagactctgctcaggggaccacatcctcaagataggcgacacggacttggctgggatgagctccgagcaggttgcccaagtcctgcggcagtgcggcaatagggtgaagctgatgatcgccaggggggccatagaagagcgcaccgcacctaccgccctaggcatcacactgagttcctctcccacttccacacctgaactgagggttgatgcctccacacagaagggggaggagtccgaaaccttcgacgtggagctgactaagaatgtgcaaggactaggtattacaatcgccggatacatcggcgacaaaaaactggaacccagcgggattttcgtgaagtctataaccaaaagcagcgccgtggagcatgacgggaggatccagatcggggatcaaatcatcgcagtggacggcacaaatctgcagggatttaccaatcagcaggcagtggaagtcctgcggcataccgggcagactgtgctgttgaccctgatgaggcggggtatgaaacaagaggcagagctaatgtctcgcgaggatgttacaaaggacgccgatctctctccggtaaacgcaagtatcattaaggagaattatgagaaggacgaagatttcttgagttctacaagaaataccaatattttacctactgaagaggagggttaccctctactgagcgccgaaatcgaggagattgaggacgcacagaagcaggaggctgccctcctaacaaagtggcagcggatcatgggtatcaattacgaaattgtcgtggcgcacgtgagcaagttctcggaaaacagcgggctgggcatttccctcgaagcaaccgtgggccatcactttatccggtctgtgctgcccgagggacccgtaggccacagcggaaaactattctctggcgacgagctgctcgaagtcaacggtatcactctgcttggagaaaaccaccaggacgtagtgaacatactgaaagaacttcctattgaggtgacgatggtctgctgccggagaaccgtcccacctacgacccagtctgagctggattcactggatctctgtgatattgaactcacggagaaaccacacgtcgacttgggggaattcattgggagctccgaaactgaggaccccgtgctggcgatgacagatgcaggacagagcacagaggaagtgcaggcgccactggctatgtgggaggctggcatacaacacattgagctcgaaaagggcagcaagggtttaggcttttcgatccttgattaccaggatcctatcgatccagcctcaaccgttatcatcattcgctcactggtcccaggaggcattgctgagaaagatggtaggttactgcccggagatcgacttatgttcgtcaacgatgtaaatttagagaatagcagtctggaagaagctgttgaagccctgaaaggagcgccttccggaacagtgagaattggcgtggctaaacccttgccactgtccccagaggaaggatacgtaagcgccaaagaggacagcttcctgtatcccccacacagctgcgaagaagccgggctggcagacaaacctctatttcgcgcagacctggctctcgtcggcactaacgacgcagacctggtcgacgaatcaacgtttgagtctccctacagtccagagaatgacagtatttactcgacacaggcttcaattttgagtcttcatggatcttcttgtggcgatggattgaattacggatcatctcttccgtcaagcccaccaaaagacgttatcgagaactcttgtgaccctgtgttggacctgcacatgagcctggaagagctgtatacacaaaacttactgcagagacaggatgagaacaccccaagcgtggatatttccatgggtcccgcttcaggatttacgataaacgactacacccccgctaatgccatcgaacagcagtacgaatgcgaaaataccatcgtctggacagaatcacacctgcctagtgaggttatctcaagcgcggaactcccctcagtgctgcctgactctgccggcaagggctctgagtatctcctagagcagagctcactcgcatgtaacgctgagtgtgtaatgttgcaaaacgtctctaaagagtcattcgagcgcacgatcaatatagccaagggcaatagctcccttggaatgaccgtgagcgccaacaaggacggcctgggtatgattgtcaggagcatcatccatggaggagccatatcacgggacggtaggatcgctattggcgactgcatcttgtctataaacgaggagtccacgatatctgttacaaatgctcaagcgcgcgcaatgctgaggaggcactcccttattgggcctgacattaagataacatatgtgccggctgagcacctcgaggaattcaagatcagcctggggcaacagtctggcagggtgatggctcttgatatctttagtagttacacaggacgggacatacctgaactccccgaacgggaggagggcgagggtgaggaatctgagctgcagaatacagcatactctaattggaaccagccacggcgagtggaactatggcgggaacctagtaagtcactgggtatatccattgtgggcggccggggcatgggctctcgactgtctaacggggaggtgatgagaggaatttttattaaacacgtcctcgaagactctcccgctgggaagaatggcaccctaaaaccgggcgaccggatcgtggaagtggacggaatggacctcagggatgccagccatgagcaggccgtggaagccatacgcaaggcaggaaatccagtggttttcatggtgcagtccatcatcaaccgacccagaaaatcgccgttgccatctctgttgcacaacctgtatcctaagtacaatttcagcagcaccaatccgtttgcagactcactgcagattaatgccgacaaggctcccagccaaagcgaatctgagcccgagaaggcccctttatgcagtgtcccgccccctcccccttccgccttcgccgaaatgggatcggatcatacacagagttctgcatccaagatttcccaagatgtggataaagaggacgagtttggatatagttggaaaaacattagggagcgctacggtactctcaccggcgaattgcatatgatcgaactcgaaaaggggcactcaggtctgggactcagcctggcagggaataaagataggagcagaatgtctgtttttatcgttgggatcgatcccaacggcgctgctggtaaagatggtagactgcagatcgccgatgagctcttggagattaacggccagatattgtatggccggtcccatcagaacgcctctagcattatcaagtgcgcaccttcaaaggtgaagattattttcatccggaacaaggacgccgtgaatcagatggcggtctgcccgggaaatgcagtagagcccctgcccagtaacagtgagaatctccaaaacaaagagacagaacctactgttaccactagcgatgctgcagttgatctgagcagctttaagaatgtccagcacttagagctgcccaaagatcaagggggacttggaattgccatctccgaagaggacacgctgagcggcgtgatcatcaaaagcctgaccgagcatggagtcgccgcaacggacggtaggctgaaggtcggcgatcagatcttggccgttgatgatgagattgtcgtgggctatccaatcgagaaattcatatcactcctcaaaacagctaagatgactgtgaaactgactatacacgccgagaaccccgactctcaggccgtcccttcagccgccggcgccgcatcaggcgagaaaaagaattctagtcagagcctcatggtaccccagtctggttccccagaaccggaaagtatccggaacacttcacgctcctctacgccagccattttcgctagtgatcccgcaacctgtccaataattccagggtgtgagacaactatcgagatttcaaagggccgcaccgggctgggtttaagcatcgtcggcggctctgacacattgctgggggcaatcattatccatgaggtgtatgaggagggggcggcctgcaaggacggtcggctctgggctggcgatcagatccttgaggtgaacggaattgacctgagaaaggctacccatgatgaagcaatcaacgtgctgagacaaaccccacagcgcgttcgattgaccctctacagggacgaggccccatataaggaggaagaagtgtgcgatacactgactatcgaattacagaaaaagccgggaaaaggactgggcctctccatcgtgggcaagcggaatgacaccggagtatttgtgtccgatatcgtgaaaggtgggatcgcggacgcagacgggcggctgatgcagggtgatcaaatcctgatggtgaatggggaagatgtccgtaacgctacgcaggaagctgttgcagccctgctcaaggtgtctgaagggtccctctccagctttacgtttcccctgtctggatctagcacttcagaaagcctcgagagcagcagtaagaagaacgccctggcaagcgaaatccagggcctgaggaccgtggagatgaagaaggggccaaccgattccctcggcatctctatagcgggtggagttggctcaccacttggtgacgtccccatattcattgcgatgatgcaccccacaggggtggctgcccagacccagaagttgcgtgtgggcgataggatcgtaacgatttgtgggacaagcaccgaaggaatgacgcacacccaggcagtcaatctgctgaaaaacgcaagcggctccattgaaatgcaggtagtggcaggtggtgatgtttcggtggtgactggccaccagcaagagcccgcctccagttccctgagttttactgggttaacctcaagcagcatttttcaagacgatttggggcctcctcagtgtaaatccatcaccctggaacgggggcctgatggcctgggcttttccatcgtcggtgggtacggcagccctcacggggaccttccaatctacgtgaagacagtttttgcgaagggagctgcttcagaagacgggcgtctgaagagaggagatcagatcattgcagtgaatgggcagtcattggaaggagtaactcatgaggaagctgtcgctatcctgaagagaaccaaggggacagtcactctcatggtactctcttag

SEQ ID NO: 141156 - DNA, 6125 bp, Artificial Sequence
  derived and/or modified sequence
atgttggaagcaatcgataagaatcgggctcttcacgccgcagagaggctccagactaaactgagagaacgcggagatgttgcaaatgaagataaattatcactgctcaagtctgtcctccaatctcctctattctctcaaattctgtccttgcagacctctgtccaacaactcaaggatcaggtgaacatcgctacttccgccacaagcaacatcgagtatgcacacgtgccacatcttagtcctgctgttattccgactctccaaaatgaaagctttctgctttctcccaataatggcaacttggaagccctaaccggtccagggatcccccacatcaatggtaagcctgcttgcgacgagttcgaccagctgatcaagaacatggctcaaggaaggcacgtcgaggtctttgagcttctgaaaccaccaagtgggggtcttggcttcagcgtggtcggcctccggtccgagaacaggggagaactcggcatattcgtgcaagagattcaggaggggagcgtggcccaccgcgatgggaggcttaaggagacagaccagattctcgccattaacggccaggctctggatcagactatcactcaccagcaggcaatctctattctgcagaaggctaaggataccgtacaactggtcattgctagaggctccctgcctcagctcgtcagtccgatcgtcagtagaagtccgtctgcggcatcaacgatttctgcgcactctaaccccgttcactggcagcatatggaaacaatcgagctagtgaatgacggcagcggactgggattcgggatcattggcggtaaggccaccggcgtgattgttaaaaccatcctgcctggtggtgtcgccgaccagcacggtcgcctgtgcagcggcgatcatatccttaaaattggagacacggatctggccggaatgtccagcgagcaggtcgcccaggtgctgcgtcaatgcgggaatcgggtcaagctaatgatcgcccgtggggcaatcgaggagcggactgctccaaccgctctgggaataaccttgagtagttccccaaccagcacccctgaactgagggttgacgcctcgactcaaaagggagaggagtccgagacatttgacgtggaattgaccaagaatgtccagggactgggaatcaccattgcaggctacataggtgataagaagctggaacccagcggaatttttgtcaagtctattacaaagtcctccgctgtcgagcacgacggaaggatccaaatcggcgaccaaatcattgcagtggacggcactaaccttcagggcttcacaaatcagcaggctgtggaggtcctgcgccatactgggcagacggtcttattaaccctgatgcggagggggatgaagcaggaagcagaactcatgagtagggaggacgttactaaggacgcagacctgtcccccgtaaatgcttctattatcaaagaaaactatgagaaggatgaagattttctttcttctacaaggaacacaaatatcctgccaaccgaggaagagggttatccactgctgagcgcagaaatcgaggaaatagaggacgctcaaaagcaggaggcggctctcctgacaaagtggcagcggattatgggaattaactacgagattgtggtcgcccatgtatctaaattttcagagaactctgggttgggcatatcactcgaggccactgtggggcaccacttcattcgctccgtgttgcccgaagggccagtcggacattcaggtaaactgttttctggggacgaactcctggaagtaaatggtataactctccttggggagaaccaccaggatgtggtgaacatacttaaggaattgcccatcgaagtgaccatggtatgttgcagaaggactgtgccccctaccacacagagcgaattagacagtctcgacctttgcgatatcgaactgactgagaagcctcatgtagacctaggcgagttcattgggtcgagtgagaccgaggacccagttctggccatgactgatgcgggacagagcaccgaggaagttcaagcccctttagccatgtgggaggccggtatccagcacatagaactcgaaaaaggcagcaaaggactggggttttccatcctcgactatcaggatcctatcgaccctgccagcaccgtgatcatcatacgcagcctggtccccggtggaatcgccgaaaaagacgggcgtctgttacccggtgatagactaatgttcgtgaacgatgtgaatctggaaaactcctctctggaagaagccgtggaggccctgaaaggtgcaccctcgggcactgtccgaatcggcgtggcaaagcctcttccacttagccccgaagagggatacgtctctgccaaagaggattcttttctgtaccctccacactcgtgtgaagaggctggactcgccgataaacccttgttccgtgctgacctcgccctggttggaaccaacgacgcagatctcgtcgatgaaagtactttcgaatctccctatagcccagagaacgattccatctactctacccaggcatctatcctgagcctgcacggtagcagttgtggggacggtctcaattacggatcatccctgcccagcagccctcctaaggacgttatcgagaatagttgcgaccctgtcttggacctgcacatgagtttagaggagctctatactcagaacctgctgcaaaggcaagacgagaacaccccaagcgtcgacatttcaatgggccctgcctcaggcttcaccattaacgactataccccagccaacgctattgagcagcaatatgagtgtgaaaacaccattgtgtggactgaaagtcacctccctagcgaggtgatcagctctgctgaactcccatctgtccttccggactcagccggtaaggggtccgaatatctgttggaacaatcttctcttgcatgcaacgctgagtgcgtgatgttacagaacgtttccaaagagagtttcgagaggactattaacatagccaaagggaattccagtctggggatgacagtctccgctaacaaggacggcctcggaatgatcgttcggagtataatccatggtggagcaatctcacgggacggaaggatcgctattggcgattgtatcctgagtatcaacgaagagtcaacgatctcagttacaaatgctcaggcgagagctatgctccgccgtcacagcctgatcgggcctgacattaagattacctatgtacccgcagagcacttggaggaatttaagatatccctggggcagcagtcagggcgagttatggcactagacattttctccagctatacagggagagacattccggagctcccagagagagaggagggagagggggaggaaagcgaactacagaataccgcatattcaaattggaatcagcctcgtagggtggagctttggcgtgagccatcgaagtccctggggatctccattgtcggcggtagaggtatggggagccggctgagtaatggcgaggttatgaggggaatttttatcaaacacgtattggaagactctcccgcaggtaagaacggaactctgaagcctggggatcggatagtcgaggtggacggtatggatctccgggacgcctcgcacgagcaggccgttgaggcgatacgtaaagcgggtaaccctgtagtgttcatggtgcaaagtattataaaccggccacgaaagtcacccctcccaagcctactacacaacctgtacccaaagtacaatttttcctccactaatccttttgcagactcccttcagattaacgccgacaaggccccatcccagagtgagtcggaaccagagaaagccccattgtgctccgtaccccctccaccaccctccgctttcgcggaaatggggtccgatcatacccagtcttctgcaagcaaaatcagtcaggacgttgacaaagaggatgagtttggctactcttggaagaatatcagggaaagatacggaaccctgaccggtgaactgcacatgattgaactcgagaagggccatagcggtctcgggttaagtttagccggtaataaggaccggtcgcggatgtctgttttcatcgtgggaatcgacccaaatggcgcagcaggtaaagacggcaggctgcaaatcgccgatgagctgctggaaattaacggacagatcttatacggccgatctcatcagaacgcaagcagtatcattaaatgcgccccttcaaaagtaaagatcatttttattcgcaataaagatgccgtgaaccagatggccgtctgcccaggcaatgccgtggaacccttgccgtcaaacagcgaaaatctccagaataaagagacggagcccacagtgaccacttcagatgcggctgtagacctgtcttccttcaagaatgtccagcatctcgaattaccgaaagatcagggcggactgggtattgcgatttcagaggaggacaccttgtctggagttatcattaaaagtcttactgaacacggagtcgccgctaccgatgggagactgaaggttggggatcagatcctggccgtggatgacgagattgtcgtaggctaccccatagagaaattcataagcctcctgaaaactgcaaaaatgaccgtaaagctcacaatccatgccgaaaatcctgattcgcaggctgtgccaagtgcggctggtgcagcatccggggagaagaagaactcttcacaatccctgatggtcccacagtcgggatcccccgagcctgaaagtatacgaaacacctcgagaagttccacccctgctatctttgccagtgatcccgctacatgcccgattattcccggatgtgagaccacaatcgaaatctcgaaggggaggaccgggctggggctgtcgatagtaggaggctctgacaccttgctcggcgcaatcataattcacgaggtgtatgaggaaggtgcagcctgcaaggacggcaggctgtgggccggtgatcagattctggaagtgaatgggattgatctgcggaaggccacgcatgatgaggcaataaacgtgctgcgacagacccctcagcgggtccgcttgactctataccgagatgaggccccttacaaggaggaggaagtctgcgatacattgacaattgagttgcagaaaaaaccgggaaaaggcttgggactaagtatcgttgggaaaaggaatgatacgggggtttttgtaagtgacattgtcaaaggtgggatcgccgatgcagatggcagactcatgcagggggaccaaatcctgatggtgaacggcgaggacgtgaggaacgcaacccaagaggctgtggccgcacttttaaaggtttcagaaggatctctgtcatcgttcaccttcccactatccggatcttccacttccgagtcattggagtcaagttccaagaagaatgctctggcgagtgaaatccaggggctcagaactgttgaaatgaagaaaggaccaacagacagcctgggcatcagtatagccggaggggtggggtctccacttggggacgtacccatctttatcgccatgatgcaccctaccggggtggcggctcagacacagaaactgagagtgggtgaccgcatcgttaccatctgcggaacctccacggaaggaatgacccacacccaggctgttaacctgctcaaaaacgctagcgggtcaatcgaaatgcaagtggtggcaggtggcgacgtaagcgtggtcaccgggcaccagcaggagcccgcatcctcatcgctcagctttacaggacttacgtctagcagcatcttccaggacgatctggggcctccccagtgcaagagcatcaccctggagcgcggacctgatggcctgggattctccatcgtggggggatacggcagccctcacggggacttacctatctatgtcaaaacagtgtttgcaaaaggagcagcgtctgaggacggtcgtttgaagcggggagaccaaattattgcagtgaatgggcaatcgctggaaggcgtcacacatgaggaggcagtggcgatcttaaaacgtaccaagggtaccgtaacgctcatggtgctcagcta

SEQ ID NO: 141157 - DNA, 6125 bp, Artificial Sequence
  derived and/or modified sequence
atgcttgaggcaatagacaagaacagggccctgcatgcagccgaaagactgcaaaccaaactaagagaacggggtgatgtcgccaacgaagataagctcagcctgctcaagtcagtgctgcagtctcctcttttctcccagattctttcactccagacctccgtgcagcaactgaaagatcaggtgaacattgcaacgtcggcgacctccaatatcgagtatgcccacgtgccacacctgtctcccgctgttatcccgactctgcagaatgagagcttcctcctatctcccaacaatgggaatctcgaagccttgaccgggccagggatccctcatatcaatgggaaacccgcttgcgatgagttcgaccagctgataaagaatatggcacaggggcgtcacgtggaggtgtttgagctgctcaaaccgccttctgggggactgggattcagcgtagtgggccttcgttctgaaaaccgcggagagctggggatcttcgtgcaggagattcaggagggcagcgtcgcccaccgagacgggagattgaaggagaccgaccagatccttgccattaacggacaggcgctggaccaaaccattacacaccaacaggccatctccatcctccaaaaggctaaggacactgtgcagttagtgattgctcggggatcactacctcagttagtgtcccctatcgtgtcccgcagcccctcagcggcatctaccatatcagctcattcaaaccccgtgcactggcagcatatggagacaatcgaactggtgaacgatggaagcggtttgggctttggaattattggcggaaaggccacaggggtgatcgttaaaaccatcctgccaggtggggtggccgatcagcacggacggctgtgcagcggcgatcacatcctgaagattggcgatacagatctggcgggaatgtcttcagaacaagtagcacaggtgctcagacagtgcggcaaccgggtaaaactgatgattgccagaggcgcaattgaggagcggaccgctcccacagcactcggtatcacattgtcgtccagccctacaagtacgccagaactgagggtggacgcctctactcagaagggagaagaatcagaaacttttgacgtcgagctaaccaaaaacgtgcaagggctggggattacaatagcaggctatataggggataagaagctggaaccctccggcatcttcgttaagtcaatcactaagtcatcggccgtggagcacgatggacggattcagatcggcgaccaaatcattgccgtggacggaaccaacctacagggcttcaccaaccagcaggcagtggaggtgctccgtcacaccgggcagacagtactgttgacccttatgaggcggggaatgaagcaagaggcagaattgatgtcgcgcgaagatgtcaccaaggatgctgacctgagtcctgtcaacgcttccataataaaggaaaactatgaaaaagacgaggactttctcagctctactaggaataccaatattcttcccaccgaggaggaagggtaccccctgttatcagctgaaattgaggagattgaagatgcgcaaaagcaggaggccgctctacttaccaaatggcaaaggattatgggaatcaattacgagattgttgtggcccacgtgagcaagtttagcgagaactcaggactggggatatctctggaagctaccgttggacatcactttatccgctccgtgctgcctgaaggacccgtgggacactcaggaaaacttttcagcggcgacgagctcctcgaagtaaacgggattacactgcttggagagaatcaccaagacgtggtgaatattctaaaggaactgcccatcgaggtcactatggtgtgttgcagacgcaccgtacctccaacaacccagagcgaattagattcactggacctgtgcgacatagagctgaccgaaaaaccgcacgtcgatctcggggagtttatcgggtcttcagagactgaggacccagttcttgccatgacagacgcaggtcagtccactgaagaggtgcaggcacccctcgccatgtgggaagccggaatacagcatattgaactggaaaaaggctccaaaggtctcggcttttctattctcgattaccaagatcctatagatcccgcttccacagttatcatcattcgtagcctcgtcccaggtgggatcgccgaaaaggacggcagactgctgccaggggatcgattaatgtttgttaacgatgtgaacctggaaaatagcagtctagaggaggccgtagaagcattaaagggtgccccttctgggactgttcgcataggcgttgccaaacctctgccactgagcccagaggaggggtacgtcagtgccaaagaagattctttcctttatccgccacacagttgcgaggaagcaggattggccgataaacccctttttcgcgctgatttagccctggtcggcacgaatgacgcagacctggtcgacgaatccacattcgaatcgccttacagccctgaaaacgattctatttactccacccaagcctcaatcctctcattgcacggctcaagctgcggcgacggactcaactacgggagtagtctaccatcttcccctccgaaagatgtgatcgagaattcctgtgaccctgtgctggacctgcacatgagtcttgaggagctttatactcagaacctgctgcaaaggcaagacgaaaataccccatcggtggacatttccatgggcccagcgtcaggatttaccataaacgattatacacccgcaaacgccatcgaacagcagtacgagtgcgagaacaccattgtttggactgagtctcaccttcccagcgaggttatctcctcggccgagctgccaagtgtacttcctgactccgccggtaagggaagcgaatacctcctagagcagtcctcccttgcttgtaatgccgaatgcgtcatgctgcagaatgtgagcaaggagtcattcgagcgcacaataaacattgcaaaaggtaacagctcactagggatgactgtttctgctaacaaggacggacttggcatgattgtgcgctctattatccatggaggggctatcagtagagatggacgcatagctatcggggactgcatactgagcatcaacgaagaatctacaattagtgtgacaaacgcccaggccagagctatgctacgcagacatagcctgatcggccctgacatcaaaataacttatgtccctgcggagcacttggaggagtttaaaatcagccttgggcagcagtctggacgtgtgatggccctagacatcttcagcagttacacagggagagatatccctgagctcccggaacgggaggaaggagagggagaagagtctgaactccaaaatacggcctattccaattggaatcagccaagacgtgtagagctgtggcgggagccctccaaatctttaggaatttccatcgttggcggtcgaggaatgggctctagactctctaatggggaggtcatgcgcggaatcttcatcaaacacgtcctagaggattcacccgctgggaaaaatggaacgcttaagcccggtgacagaattgtggaggtggacggaatggatttgcgcgatgctagccatgaacaggcagttgaggctatccgaaaagcgggtaaccctgttgtattcatggtccagtctattatcaatagacccagaaaatcacccctgccatcactacttcacaatctgtacccgaaatacaacttcagttccactaaccctttcgctgactctctacaaatcaacgctgacaaggcaccttcacaaagcgagagcgaacctgagaaggcacccctctgctctgtgccgccaccacctccttccgctttcgcggagatgggctccgaccacacacagtcaagtgcttccaaaatctcccaggatgtcgacaaagaagatgagtttggttactcctggaaaaatatccgcgaacgctacgggacactgaccggagaacttcatatgatagagctagagaagggccattctgggctagggttatccctggccggtaacaaggatagatcccggatgtctgtcttcatcgtgggaatcgaccccaacggagcagcgggtaaggacggaaggcttcaaatcgccgacgagttgttggaaattaatggccaaatcctgtacggtagaagtcaccagaatgcctccagcattattaagtgcgccccatctaaggtgaagatcatttttatcagaaataaagacgcagtaaaccagatggcagtatgcccaggcaatgccgtagaaccgctcccctctaatagcgaaaatcttcagaacaaggagactgaacctacggtgactacaagcgatgccgcagtggatctcagctcttttaagaatgttcaacatctggagttgcctaaggaccagggcggattgggcatcgccatttccgaggaagatactctgtctggtgtcatcataaaaagtctaactgaacacggtgtggctgccacagatggcaggttaaaagtgggagaccaaatcttggccgtggatgacgaaatagtcgtgggctatcccatagaaaagttcatctcccttctcaaaactgctaagatgacagtgaaattgactattcatgccgaaaaccccgacagccaggcagtcccatccgcagcaggcgcagcctccggcgagaagaagaactcttcacaaagcctcatggtaccacagtctgggagccctgaaccggagagcattcgcaacacatctagatcctcgaccccagccatctttgctagcgatccagccacatgtccaatcatccccggatgcgagacaaccatcgagatctcgaaaggacgcactgggctgggtctgtctattgtcggaggttccgacactctgctcggcgctattattatacatgaagtgtacgaagaaggggcagcgtgtaaagacggtaggctctgggccggtgatcagattctggaagtcaatggcatagacctgcggaaagcaacccatgacgaggctattaacgttctgaggcagactcctcagcgcgttaggctgacactctacagagatgaggccccatacaaagaggaggaagtctgtgatacacttaccattgaattgcagaagaaacctggcaagggactggggctgtctatagtcggcaagcggaacgataccggagtattcgtgtctgatattgtcaagggcggaattgccgacgcagatgggagactgatgcagggggatcagatcctcatggtgaacggcgaggacgtacgaaacgccacacaggaggctgttgcagcactgctgaaagtgtccgagggttcgctgtctagtttcacttttcctctatctgggtcatctacatcagaatcactggaaagttcctccaaaaagaatgccctcgcttcagaaatccaaggactgcgtacagtggagatgaaaaaaggtccgacggatagtctcggcattagcatcgcaggaggtgtgggatctcctctgggcgacgtcccgatctttatcgccatgatgcacccaactggggtcgcagcgcagactcagaaactcagagtgggcgacagaattgttactatttgcgggacatctactgaaggcatgacgcacacacaagctgtcaatctgctgaaaaatgcttcaggctcgatagagatgcaggtggtcgcagggggagacgtgagcgttgtgactggccaccagcaggagcccgcttcatcgtcattgagtttcaccggactgacctctagctctatctttcaggatgaccttggcccaccccaatgcaagtctattaccctggaaagaggccctgatgggctcgggttttctattgtcggtggatacggtagtccacatggagatttgccaatttatgtgaagactgtcttcgctaagggagcagctagtgaagacggcaggctgaagaggggagatcagattatcgcagtgaatggacaaagcttggagggggtaacacacgaagaggcggtagctattcttaagaggactaagggaacggtgaccctgatggtactgagcta

SEQ ID NO: 141158 - DNA, 6126 bp, Artificial Sequence
  derived and/or modified sequence
atgctggaggccatcgacaagaacagagccctgcacgccgccgagagactgcagaccaagctgagagagagaggcgacgtggccaacgaggacaagctgagcctgctgaagagcgtgctgcagagccccctgttcagccagatcctgagcctgcagaccagcgtgcagcagctgaaggaccaggtgaacatcgccaccagcgccaccagcaacatcgagtacgcccacgtgccccacctgagccccgccgtgatccccaccctgcagaacgagagcttcctgctgagccccaacaacggcaacctggaggccctgaccggccccggcatcccccacatcaacggcaagcccgcctgcgacgagttcgaccagctgatcaagaacatggcccagggcagacacgtggaggtgttcgagctgctgaagccccccagcggcggcctgggcttcagcgtggtgggcctgagaagcgagaacagaggcgagctgggcatcttcgtgcaggagatccaggagggcagcgtggcccacagagacggcagactgaaggagaccgaccagatcctggccatcaacggccaggccctggaccagaccatcacccaccagcaggccatcagcatcctgcagaaggccaaggacaccgtgcagctggtgatcgccagaggcagcctgccccagctggtgagccccatcgtgagcagaagccccagcgccgccagcaccatcagcgcccacagcaaccccgtgcactggcagcacatggagaccatcgagctggtgaacgacggcagcggcctgggcttcggcatcatcggcggcaaggccaccggcgtgatcgtgaagaccatcctgcccggcggcgtggccgaccagcacggcagactgtgcagcggcgaccacatcctgaagatcggcgacaccgacctggccggcatgagcagcgagcaggtggcccaggtgctgagacagtgcggcaacagagtgaagctgatgatcgccagaggcgccatcgaggagagaaccgcccccaccgccctgggcatcaccctgagcagcagccccaccagcacccccgagctgagagtggacgccagcacccagaagggcgaggagagcgagaccttcgacgtggagctgaccaagaacgtgcagggcctgggcatcaccatcgccggctacatcggcgacaagaagctggagcccagcggcatcttcgtgaagagcatcaccaagagcagcgccgtggagcacgacggcagaatccagatcggcgaccagatcatcgccgtggacggcaccaacctgcagggcttcaccaaccagcaggccgtggaggtgctgagacacaccggccagaccgtgctgctgaccctgatgagaagaggcatgaagcaggaggccgagctgatgagcagagaggacgtgaccaaggacgccgacctgagccccgtgaacgccagcatcatcaaggagaactacgagaaggacgaggacttcctgagcagcaccagaaacaccaacatcctgcccaccgaggaggagggctaccccctgctgagcgccgagatcgaggagatcgaggacgcccagaagcaggaggccgccctgctgaccaagtggcagagaatcatgggcatcaactacgagatcgtggtggcccacgtgagcaagttcagcgagaacagcggcctgggcatcagcctggaggccaccgtgggccaccacttcatcagaagcgtgctgcccgagggccccgtgggccacagcggcaagctgttcagcggcgacgagctgctggaggtgaacggcatcaccctgctgggcgagaaccaccaggacgtggtgaacatcctgaaggagctgcccatcgaggtgaccatggtgtgctgcagaagaaccgtgccccccaccacccagagcgagctggacagcctggacctgtgcgacatcgagctgaccgagaagccccacgtggacctgggcgagttcatcggcagcagcgagaccgaggaccccgtgctggccatgaccgacgccggccagagcaccgaggaggtgcaggcccccctggccatgtgggaggccggcatccagcacatcgagctggagaagggcagcaagggcctgggcttcagcatcctggactaccaggaccccatcgaccccgccagcaccgtgatcatcatcagaagcctggtgcccggcggcatcgccgagaaggacggcagactgctgcccggcgacagactgatgttcgtgaacgacgtgaacctggagaacagcagcctggaggaggccgtggaggccctgaagggcgcccccagcggcaccgtgagaatcggcgtggccaagcccctgcccctgagccccgaggagggctacgtgagcgccaaggaggacagcttcctgtaccccccccacagctgcgaggaggccggcctggccgacaagcccctgttcagagccgacctggccctggtgggcaccaacgacgccgacctggtggacgagagcaccttcgagagcccctacagccccgagaacgacagcatctacagcacccaggccagcatcctgagcctgcacggcagcagctgcggcgacggcctgaactacggcagcagcctgcccagcagcccccccaaggacgtgatcgagaacagctgcgaccccgtgctggacctgcacatgagcctggaggagctgtacacccagaacctgctgcagagacaggacgagaacacccccagcgtggacatcagcatgggccccgccagcggcttcaccatcaacgactacacccccgccaacgccatcgagcagcagtacgagtgcgagaacaccatcgtgtggaccgagagccacctgcccagcgaggtgatcagcagcgccgagctgcccagcgtgctgcccgacagcgccggcaagggcagcgagtacctgctggagcagagcagcctggcctgcaacgccgagtgcgtgatgctgcagaacgtgagcaaggagagcttcgagagaaccatcaacatcgccaagggcaacagcagcctgggcatgaccgtgagcgccaacaaggacggcctgggcatgatcgtgagaagcatcatccacggcggcgccatcagcagagacggcagaatcgccatcggcgactgcatcctgagcatcaacgaggagagcaccatcagcgtgaccaacgcccaggccagagccatgctgagaagacacagcctgatcggccccgacatcaagatcacctacgtgcccgccgagcacctggaggagttcaagatcagcctgggccagcagagcggcagagtgatggccctggacatcttcagcagctacaccggcagagacatccccgagctgcccgagagagaggagggcgagggcgaggagagcgagctgcagaacaccgcctacagcaactggaaccagcccagaagagtggagctgtggagagagcccagcaagagcctgggcatcagcatcgtgggcggcagaggcatgggcagcagactgagcaacggcgaggtgatgagaggcatcttcatcaagcacgtgctggaggacagccccgccggcaagaacggcaccctgaagcccggcgacagaatcgtggaggtggacggcatggacctgagagacgccagccacgagcaggccgtggaggccatcagaaaggccggcaaccccgtggtgttcatggtgcagagcatcatcaacagacccagaaagagccccctgcccagcctgctgcacaacctgtaccccaagtacaacttcagcagcaccaaccccttcgccgacagcctgcagatcaacgccgacaaggcccccagccagagcgagagcgagcccgagaaggcccccctgtgcagcgtgcccccccccccccccagcgccttcgccgagatgggcagcgaccacacccagagcagcgccagcaagatcagccaggacgtggacaaggaggacgagttcggctacagctggaagaacatcagagagagatacggcaccctgaccggcgagctgcacatgatcgagctggagaagggccacagcggcctgggcctgagcctggccggcaacaaggacagaagcagaatgagcgtgttcatcgtgggcatcgaccccaacggcgccgccggcaaggacggcagactgcagatcgccgacgagctgctggagatcaacggccagatcctgtacggcagaagccaccagaacgccagcagcatcatcaagtgcgcccccagcaaggtgaagatcatcttcatcagaaacaaggacgccgtgaaccagatggccgtgtgccccggcaacgccgtggagcccctgcccagcaacagcgagaacctgcagaacaaggagaccgagcccaccgtgaccaccagcgacgccgccgtggacctgagcagcttcaagaacgtgcagcacctggagctgcccaaggaccagggcggcctgggcatcgccatcagcgaggaggacaccctgagcggcgtgatcatcaagagcctgaccgagcacggcgtggccgccaccgacggcagactgaaggtgggcgaccagatcctggccgtggacgacgagatcgtggtgggctaccccatcgagaagttcatcagcctgctgaagaccgccaagatgaccgtgaagctgaccatccacgccgagaaccccgacagccaggccgtgcccagcgccgccggcgccgccagcggcgagaagaagaacagcagccagagcctgatggtgccccagagcggcagccccgagcccgagagcatcagaaacaccagcagaagcagcacccccgccatcttcgccagcgaccccgccacctgccccatcatccccggctgcgagaccaccatcgagatcagcaagggcagaaccggcctgggcctgagcatcgtgggcggcagcgacaccctgctgggcgccatcatcatccacgaggtgtacgaggagggcgccgcctgcaaggacggcagactgtgggccggcgaccagatcctggaggtgaacggcatcgacctgagaaaggccacccacgacgaggccatcaacgtgctgagacagaccccccagagagtgagactgaccctgtacagagacgaggccccctacaaggaggaggaggtgtgcgacaccctgaccatcgagctgcagaagaagcccggcaagggcctgggcctgagcatcgtgggcaagagaaacgacaccggcgtgttcgtgagcgacatcgtgaagggcggcatcgccgacgccgacggcagactgatgcagggcgaccagatcctgatggtgaacggcgaggacgtgagaaacgccacccaggaggccgtggccgccctgctgaaggtgagcgagggcagcctgagcagcttcaccttccccctgagcggcagcagcaccagcgagagcctggagagcagcagcaagaagaacgccctggccagcgagatccagggcctgagaaccgtggagatgaagaagggccccaccgacagcctgggcatcagcatcgccggcggcgtgggcagccccctgggcgacgtgcccatcttcatcgccatgatgcaccccaccggcgtggccgcccagacccagaagctgagagtgggcgacagaatcgtgaccatctgcggcaccagcaccgagggcatgacccacacccaggccgtgaacctgctgaagaacgccagcggcagcatcgagatgcaggtggtggccggcggcgacgtgagcgtggtgaccggccaccagcaggagcccgccagcagcagcctgagcttcaccggcctgaccagcagcagcatcttccaggacgacctgggccccccccagtgcaagagcatcaccctggagagaggccccgacggcctgggcttcagcatcgtgggcggctacggcagcccccacggcgacctgcccatctacgtgaagaccgtgttcgccaagggcgccgccagcgaggacggcagactgaagagaggcgaccagatcatcgccgtgaacggccagagcctggagggcgtgacccacgaggaggccgtggccatcctgaagagaaccaagggcaccgtgaccctgatggtgctgagctag

SEQ ID NO: 141159 - protein, 551 aa, Artificial Sequence
  derived and/or modified sequence
MLPLLLLPLLWGGSLQEKPVYELQVQKSVTVQEGLCVLVPCSFSYPWRSWYSSPPLYVYWFRDGEIPYYAEVVATNNPDRRVKPETQGRFRLLGDVQKKNCSLSIGDARMEDTGSYFFRVERGRDVKYSYQQNKLNLEVTALIEKPDIHFLEPLESGRPTRLSCSLPGSCEAGPPLTFSWTGNALSPLDPETTRSSELTLTPRPEDHGTNLTCQMKRQGAQVTTERTVQLNVSYAPQTITIFRNGIALEILQNTSYLPVLEGQALRLLCDAPSNPPAHLSWFQGSPALNATPISNTGILELRRVRSAEEGGFTCRAQHPLGFLQIFLNLSVYSLPQLLGPSCSWEAEGLHCRCSFRARPAPSLCWRLEEKPLEGNSSQGSFKVNSSSAGPWANSSLILHGGLSSDLKVSCKAWNIYGSQSGSVLLLQGRSNLGTGVVPAALGGAGVMALLCICLCLIFFLIVKARRKQAAGRPEKMDDEDPIMGTITSGSRKKPWPDSPGDQASPPGDAPPLEEQKELHYASLSFSEMKSREPKDQEAPSTTEYSEIKTSK

SEQ ID NO: 141160 - DNA, 1656 bp, Artificial Sequence
  derived and/or modified sequence
atgttgcccctgttgctgttacccctcctatggggtgggtctttacaggagaagcctgtctacgaacttcaggtgcagaagtccgtgacagtgcaggaagggctgtgcgtgctagttccatgctccttctcttacccctggcgaagctggtatagttcaccacctctctatgtctactggttccgtgacggggagatcccttactacgccgaggtggtagcaactaacaatccagaccgccgggtcaaacccgagacacaaggccgcttccgcctgctgggggacgttcagaagaagaattgtagcctctctattggggatgcccgcatggaagatactgggagttatttctttcgggttgagcgggggagggacgtgaagtattcataccaacagaataagcttaacctggaggtaactgccctgattgagaagcccgatatacacttcctggaaccactcgaaagtgggaggccaaccaggctcagttgctcccttccaggctcttgtgaggccggaccgcccctaacgttcagctggaccggaaatgcattgtcccccctagatcccgagacgactcgctccagtgagcttacactcaccccacggcctgaggaccacggaacgaatcttacatgccagatgaaaagacagggcgctcaggtgacaaccgagcgtaccgtgcaattaaatgtctcttacgccccgcagaccatcacaatttttagaaatggtatcgcactcgagattctccagaacaccagctacctgcctgtgttggagggccaggcattacgtctgctgtgcgatgccccttctaacccgcccgcccatttatcttggtttcagggctctcctgcccttaatgcaacgccaatatcaaacacaggcattctcgagctccgacgggtgcgctccgctgaggaaggggggttcacatgccgcgcccagcaccctctgggattccttcagatcttcctcaatttatcggtgtattccctgcctcagctgctgggtccctcttgttcatgggaggctgaggggctgcactgtagatgtagtttccgcgcccgcccggctcctagcctgtgctggcgtcttgaagaaaaaccgctggaaggcaattccagtcagggctcgttcaaggtaaactcctcctccgccgggccttgggccaattctagtctgattcttcacggcggcttgagcagcgatctgaaagtgagttgcaaagcttggaatatctacggctcacagagtgggtccgttttattattacagggccgaagcaaccttggaaccggcgtggtccctgcggctctcgggggcgctggggtcatggctctgctgtgtatttgtttgtgtctaatattcttcctgatcgtcaaagcgcggcgaaagcaggcggccggtcgaccagagaagatggacgacgaagatcctataatggggacgatcacttctgggtcaagaaagaagccctggccggatagtcctggagaccaagcttctccccccggagatgcgcctccactggaggaacagaaggaactccactacgcaagcttaagctttagtgagatgaaatccagagagcccaaggaccaggaggcacccagtacaacggaatactccgagatcaagacatcaaagtag

SEQ ID NO: 141161 - DNA, 1656 bp, Artificial Sequence
  derived and/or modified sequence
atgctgcccttgctgctcctcccactgctgtgggggggcagcctgcaagagaagccagtctatgaacttcaggtgcagaagagtgtgaccgtccaggaaggcctttgtgtcctagtcccttgcagttttagctatccatggagaagctggtattctagcccccccctatatgtgtactggtttcgagacggagaaatcccctattatgctgaagtagtggccactaacaatccagatcgcagggttaagcctgaaactcagggacgctttaggctgctgggtgacgttcagaagaaaaattgctctctgtcaattggcgatgctcgaatggaagacaccggctcctatttttttagggtggagagggggcgggacgtgaagtattcataccagcagaataaattaaacctggaagttaccgccctgatcgagaaaccagatatccattttctcgagccactggaaagtggccggccaacccggttatcatgctcactccccgggtcctgcgaggcgggcccaccgctgacattctcctggaccggtaacgccctctcccctctggatcccgaaaccacccgcagctctgagctgaccctgacgccgcgacctgaagaccacgggacaaaccttacgtgccaaatgaaacggcagggcgctcaagtgaccaccgagcgcactgtgcagctgaatgtgtcatacgcgcctcagaccattaccatcttcagaaatggcatcgcactggaaattctacagaacacgtcctatcttcccgtcttagaggggcaagctctcaggttattatgtgatgcgcctagcaacccacctgcgcatctttcctggtttcaaggttcccctgccctcaacgctacaccaattagcaatactggaatactggaactccgacgcgtgcggagcgccgaggagggagggtttacgtgccgagcgcaacatccattaggctttctgcagatcttcttgaacctaagtgtgtacagcctgccgcagctgttgggcccttcctgcagctgggaggcagaaggactgcactgtagatgtagctttcgggcccgtccagccccatctctttgttggaggctggaggaaaagcccttggaaggcaactcttcacagggttctttcaaggtgaacagttcttccgcggggccctgggccaatagcagcctgatactgcatggcggccttagttctgacctgaaggtttcctgcaaagcttggaacatttatggctctcagtccgggtcggtactgcttttgcagggcagatcaaaccttggaactggggtggttcccgccgctctggggggggcaggggtgatggcgctgttgtgcatttgtctgtgccttattttttttctgatcgttaaagcccgacgcaagcaggccgccggacggcccgaaaaaatggatgatgaggatccaattatgggcaccattacctccggcagcaggaaaaaaccttggccggactcccctggcgatcaggcctctcctccgggggatgcccccccactggaagagcagaaggagcttcactacgcatctctttctttctctgaaatgaagagccgggagcccaaagatcaagaggctccctctaccactgagtacagtgagataaagacctcaaaatag

SEQ ID NO: 141162 - DNA, 1656 bp, Artificial Sequence
  derived and/or modified sequence
atgctgcccctgctgctgctgcccctgctgtggggcggcagcctgcaggagaagcctgtgtatgagctgcaggtgcagaagtctgtgacagtgcaggagggcctgtgtgtgctggtgccctgcagcttctcctacccctggaggtcctggtacagcagcccccccctgtatgtgtactggttcagagatggagagatcccctactatgcagaggtggtggccaccaacaacccagaccggcgggtgaagccagagacccagggccgcttccggctgctgggagatgtgcagaagaagaactgcagcctgagcattggagatgccaggatggaggacaccggcagctacttcttccgggtggagcggggcagagatgtgaagtacagctaccagcagaacaagctgaacctggaggtgacagccctgattgagaagccagacatccacttcctggagcccctggagagcggccggcccacccggctgagctgcagcctgcccggcagctgtgaggccggcccccccctgaccttctcctggacaggaaatgccctgagccccctggaccctgagaccaccaggagcagcgagctgaccctgacccccaggccagaagatcatggcaccaacctgacctgccagatgaagaggcagggcgcccaggtgaccacagagaggacagtgcagctgaatgtgtcctatgccccccagaccatcaccatcttcagaaatggcatcgccctggagatcctgcagaacaccagctacctgcctgtgctggagggccaggccctgcggctgctgtgtgatgcccccagcaaccccccagcccacctgtcctggttccagggcagccctgccctgaatgccacccccatcagcaacacaggcatcctggagctgcggcgggtgcgctctgctgaggagggcggcttcacctgccgggcccagcaccccctgggcttcctgcagatcttcctgaacctgtctgtgtacagcctgccccagctgctgggccccagctgctcctgggaggccgagggcctgcactgccgctgcagcttccgggcccggcctgcccccagcctgtgctggaggctggaggagaagcccctggagggcaacagcagccagggcagcttcaaggtgaacagcagcagcgctggcccctgggccaacagcagcctcatcctgcatggaggcctgagcagtgacctgaaggtgtcctgcaaggcctggaacatctacggcagccagagcggctctgtgctgctgctgcagggccgcagcaacctgggcaccggggtggtgcctgctgccctgggcggggccggcgtgatggccctgctgtgcatctgcctgtgcctgatcttcttcctgattgtgaaggcccggaggaagcaggccgccggccggcctgagaagatggatgatgaggaccccatcatgggcaccatcaccagcggcagcaggaagaagccctggccagacagccctggggaccaggccagccccccaggagatgccccacccctggaggagcagaaggagctgcactacgccagcctgtccttcagcgagatgaagagccgggagcccaaggaccaggaggcccccagcaccacagagtacagcgagatcaagaccagcaagtag

SEQ ID NO: 141163 - DNA, 1656 bp, Artificial Sequence
  derived and/or modified sequence
atgctgcccctgctgctgctgcccctgctgtggggcggcagcctgcaagagaaacccgtctacgaactccaggtccagaagagcgtgacagttcaggagggcttgtgtgtcttagtcccctgcagcttcagctatccgtggagatcctggtactcttcgccccccctgtatgtgtactggttcagagacggagaaattccatattacgctgaagtagtcgccaccaataatcctgatagaagagtcaaaccagagacccagggcagattcaggctgttgggcgatgtacagaagaagaactgctccttgagcataggggatgctcgtatggaagatacagggtcatattttttcagagttgagcggggcagggatgtcaagtactcctaccagcagaacaaactcaatctggaggtcacggccctcattgagaagccagatatccactttcttgaacctttagagtctgggaggcctacacgactcagttgttcactccccgggtcatgtgaggcgggtccccctcttactttttcatggacaggaaacgcactctcaccgctagaccctgaaacaacaagatcatctgagttaaccctgacaccacgcccagaggaccacggcactaatctcacgtgtcagatgaaaagacaaggtgctcaagttacaactgagagaacagtgcagttgaatgtgtcctacgccccccaaacaatcacaatcttcagaaatgggatcgcactggagatcctgcagaatacttcgtatctgcccgtgctggaaggccaggccctgagattgctctgcgacgcgccttcaaatccacctgcccatctgagctggttccagggatctcctgcgttaaatgccaccccaatcagtaatactggcattctggaacttcgaagagtccgctccgctgaggagggcgggttcacgtgtagagcgcagcaccccctcggattcttacaaatcttcctgaatctgtccgtttactctctgccacagctcctgggcccaagttgtagttgggaagcagaagggctgcactgcaggtgtagctttcgggcgcgcccggccccttccctttgctggaggttagaggaaaaaccattggaaggaaatagcagtcaggggagtttcaaagtgaattcaagcagcgccggaccatgggcaaactcttccctgatcctgcacggagggttgtcatctgacctcaaggtcagctgtaaagcgtggaacatttatggcagtcagtccggctccgtcctcctccttcagggcaggtccaacctcggaacaggcgttgtccccgcagctctcgggggagccggggtgatggctcttctgtgcatctgtttatgtctgattttcttcctgatagttaaggcccgccgcaagcaggccgctggacgtcccgagaagatggacgacgaagatcccatcatgggcacaatcacgagtggcagcagaaaaaaaccgtggcccgatagccctggagatcaggcatccccccctggcgacgccccccctctcgaggagcagaaggaactacactacgcctcactgtccttttcagagatgaagagtcgcgagccaaaggatcaggaagccccgagcactaccgagtatagtgaaataaaaaccagcaagtag

SEQ ID NO: 141164 - DNA, 1656 bp, Artificial Sequence
  derived and/or modified sequence
atgctgcccctgctgctgctgcccctgctgtggggcggcagcctgcaggaaaaaccagtgtacgagctgcaggtgcaaaaaagtgttaccgtacaggagggcttatgtgttcttgtgccgtgttccttctcttacccatggcggagttggtactcatcccctcctctgtatgtctattggttccgcgatggggagattccatactatgcagaagtcgtcgccacaaacaacccggacaggagggtgaaaccagagactcaggggcgattcagactactcggcgacgtgcaaaaaaagaattgtagtttatcaattggcgacgccaggatggaagacactgggtcttactttttcagagtggagcgaggaagagacgtcaagtactcctatcagcagaataagctgaacctggaggtaacagctctgattgaaaagcccgatattcatttcctcgaacctctcgagagcggaaggcccacacggttaagttgtagcctccccggttcttgtgaagccgggccgccattgaccttttcttggaccggcaatgctctcagccctctcgacccggagactactcgaagtagtgaattaactctaacaccacggcccgaggaccacggaaccaatctgacttgtcagatgaaaaggcagggagctcaggttaccaccgagcgtaccgttcaacttaacgtatcctatgccccacagaccataactatatttcggaatggtatagcgcttgagattctccagaacactagctacttgcccgttctcgagggccaagctttaagactgctctgtgatgcgccatccaatcctccagcccacctgtcatggttccaaggttcacccgcccttaatgcaacccctatctctaacaccgggattctcgaactgcggcgagtacgttccgctgaggagggtggctttacctgtcgcgcacagcatcccctagggtttctgcagatctttctgaacctgagcgtgtacagcctgccacagttgcttggaccaagctgtagttgggaagctgaggggttacattgcagatgttcctttagggcccgcccggcaccatcactgtgttggaggctagaggaaaagccactagagggcaatagctcgcaggggtcttttaaggtgaattccagcagcgccggaccatgggcgaactcgagtctcattctgcatggaggtctgtcaagcgacctaaaagtgagttgtaaggcttggaacatctacgggtcacagtcgggttcagtcctgctgctgcaggggcgctcaaatttaggtactggggtggtgccagccgctctcggcggtgctggcgtgatggccttgctgtgcatttgtctatgtctgattttcttccttatcgttaaggctagacgaaagcaggcggcaggcaggccggaaaagatggatgatgaagatcctatcatgggtaccatcactagcggtagccggaagaagccctggcccgattcacccggcgaccaggcttctccacctggcgatgcgccaccgctggaggagcaaaaggaactgcactacgcaagtctctctttttctgagatgaaaagtcgggaacccaaggatcaagaggcccccagtacaactgaatattctgaaatcaaaactagcaaatag

SEQ ID NO: 141165 - DNA, 1656 bp, Artificial Sequence
  derived and/or modified sequence
atgttgcccctcctgttgttgcccctgctttggggaggctcactccaggaaaagccagtgtacgaattacaggtgcagaagtccgtgacagtccaggaggggctatgtgttctagtgccctgttcctttagctacccgtggcgctcctggtatagctctccccctctctacgtctattggtttcgggatggcgagattccctattacgccgaggtcgtagctaccaataaccccgatagaagggttaagcctgagactcagggacgctttaggctgctaggggatgtgcagaagaagaactgcagtctctcaatcggcgatgcccgtatggaggacactggttcctacttcttcagagtcgagagaggtagagacgtaaagtattcctatcaacagaataaattgaatcttgaggttacagctctcatcgaaaagccggatattcactttctggaacccttagaaagtggccgacctactcgattgagctgttccctgcctggtagctgtgaggctggaccacccctgacattctcatggacaggcaacgcactgtcccctctcgaccccgagaccacaagatctagcgagctgaccttaactcccagaccagaagatcacgggacaaatctgacctgccagatgaagaggcagggtgcccaggtgactactgagcggactgtgcagctgaatgtaagttatgccccacaaacaattactatctttcgcaacgggattgctttggagatattgcagaatactagctacctccctgtcttggagggccaggcgctgaggctgctgtgcgatgctccttctaaccctccagcccacttgagttggtttcagggaagcccagccttgaacgctacgccaatatctaacaccggaattctggagctccgtagagtcaggagcgcagaagaagggggatttacatgtcgggctcagcatccacttggctttctgcagatctttctgaatctcagtgtttattctttgcctcagctactgggcccaagctgcagctgggaggctgaaggcttacattgtaggtgcagtttcagagctcggccagcaccctcgttgtgttggagactggaggagaaacccttggaaggcaactcatctcagggaagctttaaggtgaacagtagctcagcaggcccatgggcaaacagcagtctaatactgcacggcggtctatcttccgacctcaaagtgtcatgcaaggcatggaatatctacgggagccagtctggctccgtccttcttctgcagggtcggtcaaacctcgggactggcgttgttcctgcagcattggggggagccggagtgatggcactcctgtgtatatgtctgtgcctcattttctttttaattgtcaaggcgagaagaaaacaggccgctggcagaccggaaaaaatggacgacgaagaccccattatgggaacaatcactagcggctcaagaaagaaaccctggcccgacagccccggtgatcaggcatcacctccaggcgatgcccctcccttggaggagcaaaaggaattgcattacgcgtctctgtctttctcagagatgaaaagcagggagccgaaagaccaggaagctccctccacaacagaatacagcgagatcaaaacatcaaaatag

SEQ ID NO: 141166 - DNA, 1656 bp, Artificial Sequence
  derived and/or modified sequence
atgctgccgttgttgctgctgcctctgctttgggggggatccctacaggagaagcccgtgtatgaactacaggtacagaaatctgtgaccgtacaggaaggcctttgcgtcctagtgccttgcagcttcagttatccctggcgctcctggtattccagtccccctctgtatgtgtattggttccgcgatggagaaattccatactatgctgaagtggtagcaacaaataatccggatagaagagtaaagcccgagacgcagggacgcttccgattgttgggcgatgtgcagaaaaaaaattgtagcttgtctattggtgacgccaggatggaagacacgggatcttatttcttcagggttgaacggggaagagatgtgaagtactcataccagcagaacaaacttaacctagaagtgacggccctgatcgagaagccagacatccatttcctggagcccctggaaagcggaagacccaccaggctgtcatgctctctccctgggagctgcgaagcaggcccaccattgacattctcctggacaggcaacgcattgagtccactcgaccctgaaaccacgcgcagttcggagctcacactaacccctaggcccgaagaccacggaactaatctcacatgtcagatgaagcgtcagggagcacaagtgacgactgaacgtaccgtgcaactcaatgtttcctatgcaccacagacaatcactattttccgaaacggcatcgccttggagattctccagaacacgagctacctgcccgtgctggagggacaggccttgcgcttgctctgcgatgccccaagcaatccgcctgctcacctgtcctggtttcagggctcgccagcacttaacgctacgcctatctcgaacaccggcattctggaactgagacgggtaagaagtgccgaggaaggcggtttcacatgtcgggcacaacaccctctgggcttcctacagatcttcttaaacctgtctgtctacagcctgccacagctgttagggccaagttgtagctgggaagctgaaggattacattgtcgttgttcattccgtgcaagacccgctccatccttatgctggaggctggaggagaagccccttgagggtaactccagccaggggtcatttaaggtgaattcttcctcggctggcccatgggcaaacagctcgctcatccttcacggaggactgagctcagatctgaaagtttcatgcaaggcatggaatatctatggtagccagtctggaagtgtgctcctgctgcaagggcgttctaatctgggtaccggtgtcgtccctgcagcactgggcggtgcaggagtgatggctcttctgtgtatttgtctgtgcctcattttcttcctgattgttaaagcccgtcggaaacaggcggctggacgccctgaaaagatggatgatgaagatcctattatggggaccattacctcggggtcccgcaaaaagccctggcctgactctcctggagaccaggccagtcctcccggagatgcacccccattggaagaacaaaaggagttgcactacgcatccctgtcatttagcgagatgaaaagcagagagccaaaggatcaagaggccccttctactaccgagtactccgagatcaagacaagcaaatag

SEQ ID NO: 141167 - DNA, 2498 bp, Artificial Sequence
  derived and/or modified sequence
gtgcgcgtccacagctctcactcaccctccggcttcctgtcggggctttctcagccccaccccacgtttggacatttggagcatttccttccctgacagccggacctgggactgggctggggccctggcggatggagacatgctgcccctgctgctgctgcccctgctgtggggggggtccctgcaggagaagccagtgtacgagctgcaagtgcagaagtcggtgacggtgcaggagggcctgtgcgtccttgtgccctgctccttctcttacccctggagatcctggtattcctctcccccactctacgtctactggttccgggacggggagatcccatactacgctgaggttgtggccacaaacaacccagacagaagagtgaagccagagacccagggccgattccgcctccttggggatgtccagaagaagaactgctccctgagcatcggagatgccagaatggaggacacgggaagctatttcttccgcgtggagagaggaagggatgtaaaatatagctaccaacagaataagctgaacttggaggtgacagccctgatagagaaacccgacatccactttctggagcctctggagtccggccgccccacaaggctgagctgcagccttccaggatcctgtgaagcgggaccacctctcacattctcctggacggggaatgccctcagccccctggaccccgagaccacccgctcctcggagctcaccctcacccccaggcccgaggaccatggcaccaacctcacctgtcagatgaaacgccaaggagctcaggtgaccacggagagaactgtccagctcaatgtctcctatgctccacagaccatcaccatcttcaggaacggcatagccctagagatcctgcaaaacacctcataccttccggtcctggagggccaggctctgcggctgctctgtgatgctcccagcaacccccctgcacacctgagctggttccagggctcccctgccctgaacgccacccccatctccaataccgggatcttggagcttcgtcgagtaaggtctgcagaagaaggaggcttcacctgccgcgctcagcacccgctgggcttcctgcaaatttttctgaatctctcagtttactccctcccacagttgctgggcccctcctgctcctgggaggctgagggtctgcactgcagatgctcctttcgagcccggccggccccctccctgtgctggcggcttgaggagaagccgctggaggggaacagcagccagggctcattcaaggtcaactccagctcagctgggccctgggccaacagctccctgatcctccacggggggctcagctccgacctcaaagtcagctgcaaggcctggaacatctatgggtcccagagcggctctgtcctgctgctgcaagggagatcgaacctcgggacaggagtggttcctgcagcccttggtggtgctggtgtcatggccctgctctgtatctgtctgtgcctcatcttctttttaatagtgaaagcccgcaggaagcaagcagctgggagaccagagaaaatggatgatgaagaccccattatgggtaccatcacctcgggttccaggaagaagccctggccagacagccccggagatcaagcatctcctcctggggatgcccctcccttggaagaacaaaaggagctccattatgcctcccttagtttttctgagatgaagtcgagggagcctaaggaccaggaggccccaagcaccacggagtactcggagatcaagacaagcaagtgaggatttgcccagagttcagtcctggctggaggagccacagcctgtctgggggaaaggacaagtcagggaccacttgctgaagcacgaagagcccttgtggcaatgttaacattaactgatgtttaagtgctccaagcagatggaattagagaggtgggctcaaatctaggccctggcactgtcatcaagcaattcactgcatccctctgtgcctcagtttcccattctgtaaatcagagatcatgcatgctacctcaaaggttgttgtgaacattaaagaaatcaacacatggaaatcaaccaacatgggtcctggaacagggcgttgtgctcagtgctttctggtctctcttccttgaatagaaaggtcctgctggcaagttctctcaaggctggggatgaccaggcacaaaaaacagggcagcaatatgttggtgtcactccccttcccaaaactcttcgaagactccctaggaaagaccagcccctcagcctggcacttggttcatgatgtgggatcttatatccttgccagagtcatatctttgcccacttttacctgcaatccttgcatcatattcctttggctccagtccttcatttatgagacccataggaatccttccaacagccaaagagttgagtctaactctttcctgcccaaacccattcacggccccctggccttagacaatatatcaca

SEQ ID NO: 141168 - DNA, 2086 bp, Artificial Sequence
  derived and/or modified sequence
cacagctctcactcaccctccggcttcctgtcggggctttctcagccccaccccacgtttggacatttggagcatttccttccctgacagccggacctgggactgggctggggccctggcggatggagacatgctgcccctgctgctgctgcccctgctgtggggggggtccctgcaggagaagccagtgtacgagctgcaagtgcagaagtcggtgacggtgcaggagggcctgtgcgtccttgtgccctgctccttctcttacccctggagatcctggtattcctctcccccactctacgtctactggttccgggacggggagatcccatactacgctgaggttgtggccacaaacaacccagacagaagagtgaagccagagacccagggccgattccgcctccttggggatgtccagaagaagaactgctccctgagcatcggagatgccagaatggaggacacgggaagctatttcttccgcgtggagagaggaagggatgtaaaatatagctaccaacagaataagctgaacttggaggtgacagccctgatagagaaacccgacatccactttctggagcctctggagtccggccgccccacaaggctgagctgcagccttccaggatcctgtgaagcgggaccacctctcacattctcctggacggggaatgccctcagccccctggaccccgagaccacccgctcctcggagctcaccctcacccccaggcccgaggaccatggcaccaacctcacctgtcagatgaaacgccaaggagctcaggtgaccacggagagaactgtccagctcaatgtctcctatgctccacagaccatcaccatcttcaggaacggcatagccctagagatcctgcaaaacacctcataccttccggtcctggagggccaggctctgcggctgctctgtgatgctcccagcaacccccctgcacacctgagctggttccagggctcccctgccctgaacgccacccccatctccaataccgggatcttggagcttcgtcgagtaaggtctgcagaagaaggaggcttcacctgccgcgctcagcacccgctgggcttcctgcaaatttttctgaatctctcagtttactccctcccacagttgctgggcccctcctgctcctgggaggctgagggtctgcactgcagatgctcctttcgagcccggccggccccctccctgtgctggcggcttgaggagaagccgctggaggggaacagcagccagggctcattcaaggtcaactccagctcagctgggccctgggccaacagctccctgatcctccacggggggctcagctccgacctcaaagtcagctgcaaggcctggaacatctatgggtcccagagcggctctgtcctgctgctgcaagggagatcgaacctcgggacaggagtggttcctgcagcccttggtggtgctggtgtcatggccctgctctgtatctgtctgtgcctcatcttctttttaatagtgaaagcccgcaggaagcaagcagctgggagaccagagaaaatggatgatgaagaccccattatgggtaccatcacctcgggttccaggaagaagccctggccagacagccccggagatcaagcatctcctcctggggatgcccctcccttggaagaacaaaaggagctccattatgcctcccttagtttttctgagatgaagtcgagggagcctaaggaccaggaggccccaagcaccacggagtactcggagatcaagacaagcaagtgaggatttgcccagagttcagtcctggctggaggagccacagcctgtctgggggaaaggacaagtcagggaccacttgctgaagcacgaagagcccttgtggcaatgttaacattaactgatgtttaagtgctccaagcagatggaattagagaggtgggctcaaatctaggccctggcactgtcatcaagcaattcactgcatccctctgtgcctcagtttcccattctgtaaatcagagatcatgcatgctacctcaaaggttgttgtgaacattaaagaaatcaacacatggaaatcaa

SEQ ID NO: 141169 - DNA, 1656 bp, Artificial Sequence
  derived and/or modified sequence
atgctgcccctgctgctgctgcccctgctgtggggcggcagcctgcaggagaagcccgtgtacgagctgcaggtgcagaagagcgtgaccgtgcaggagggcctgtgcgtgctggtgccctgcagcttcagctacccctggagaagctggtacagcagcccccccctgtacgtgtactggttcagagacggcgagatcccctactacgccgaggtggtggccaccaacaaccccgacagaagagtgaagcccgagacccagggcagattcagactgctgggcgacgtgcagaagaagaactgcagcctgagcatcggcgacgccagaatggaggacaccggcagctacttcttcagagtggagagaggcagagacgtgaagtacagctaccagcagaacaagctgaacctggaggtgaccgccctgatcgagaagcccgacatccacttcctggagcccctggagagcggcagacccaccagactgagctgcagcctgcccggcagctgcgaggccggcccccccctgaccttcagctggaccggcaacgccctgagccccctggaccccgagaccaccagaagcagcgagctgaccctgacccccagacccgaggaccacggcaccaacctgacctgccagatgaagagacagggcgcccaggtgaccaccgagagaaccgtgcagctgaacgtgagctacgccccccagaccatcaccatcttcagaaacggcatcgccctggagatcctgcagaacaccagctacctgcccgtgctggagggccaggccctgagactgctgtgcgacgcccccagcaacccccccgcccacctgagctggttccagggcagccccgccctgaacgccacccccatcagcaacaccggcatcctggagctgagaagagtgagaagcgccgaggagggcggcttcacctgcagagcccagcaccccctgggcttcctgcagatcttcctgaacctgagcgtgtacagcctgccccagctgctgggccccagctgcagctgggaggccgagggcctgcactgcagatgcagcttcagagccagacccgcccccagcctgtgctggagactggaggagaagcccctggagggcaacagcagccagggcagcttcaaggtgaacagcagcagcgccggcccctgggccaacagcagcctgatcctgcacggcggcctgagcagcgacctgaaggtgagctgcaaggcctggaacatctacggcagccagagcggcagcgtgctgctgctgcagggcagaagcaacctgggcaccggcgtggtgcccgccgccctgggcggcgccggcgtgatggccctgctgtgcatctgcctgtgcctgatcttcttcctgatcgtgaaggccagaagaaagcaggccgccggcagacccgagaagatggacgacgaggaccccatcatgggcaccatcaccagcggcagcagaaagaagccctggcccgacagccccggcgaccaggccagcccccccggcgacgccccccccctggaggagcagaaggagctgcactacgccagcctgagcttcagcgagatgaagagcagagagcccaaggaccaggaggcccccagcaccaccgagtacagcgagatcaagaccagcaagtag

SEQ ID NO: 141170 - protein, 519 aa, Artificial Sequence
  derived and/or modified sequence
MDLVGVASPEPGTAAAWGPSKCPWAIPQNTISCSLADVMSEQLAKELQLEEEAAVFPEVAVAEGPFITGENIDTSSDLMLAQMLQMEYDREYDAQLRREEKKFNGDSKVSISFENYRKVHPYEDSDSSEDEVDWQDTRDDPYRPAKPVPTPKKGFIGKGKDITTKHDEVVCGRKNTARMENFAPEFQVGDGIGMDLKLSNHVFNALKQHAYSEERRSARLHEKKEHSTAEKAVDPKTRLLMYKMVNSGMLETITGCISTGKESVVFHAYGGSMEDEKEDSKVIPTECAIKVFKTTLNEFKNRDKYIKDDFRFKDRFSKLNPRKIIRMWAEKEMHNLARMQRAGIPCPTVVLLKKHILVMSFIGHDQVPAPKLKEVKLNSEEMKEAYYQTLHLMRQLYHECTLVHADLSEYNMLWHAGKVWLIDVSQSVEPTHPHGLEFLFRDCRNVSQFFQKGGVKEALSERELFNAVSGLNITADNEADFLAEIEALEKMNEDHVQKNGRKAASFLKDDGDPPLLYDE

SEQ ID NO: 141171 - DNA, 1560 bp, Artificial Sequence
  derived and/or modified sequence
atggacctggtgggcgtggccagccccgagcccggcaccgccgccgcctggggccccagcaagtgcccctgggccatcccccagaacaccatcagctgcagcctggccgacgtgatgagcgagcagctggccaaggagctgcagctggaggaggaggccgccgtgttccccgaggtggccgtggccgagggccccttcatcaccggcgagaacatcgacaccagcagcgacctgatgctggcccagatgctgcagatggagtacgacagagagtacgacgcccagctgagaagagaggagaagaagttcaacggcgacagcaaggtgagcatcagcttcgagaactacagaaaggtgcacccctacgaggacagcgacagcagcgaggacgaggtggactggcaggacaccagagacgacccctacagacccgccaagcccgtgcccacccccaagaagggcttcatcggcaagggcaaggacatcaccaccaagcacgacgaggtggtgtgcggcagaaagaacaccgccagaatggagaacttcgcccccgagttccaggtgggcgacggcatcggcatggacctgaagctgagcaaccacgtgttcaacgccctgaagcagcacgcctacagcgaggagagaagaagcgccagactgcacgagaagaaggagcacagcaccgccgagaaggccgtggaccccaagaccagactgctgatgtacaagatggtgaacagcggcatgctggagaccatcaccggctgcatcagcaccggcaaggagagcgtggtgttccacgcctacggcggcagcatggaggacgagaaggaggacagcaaggtgatccccaccgagtgcgccatcaaggtgttcaagaccaccctgaacgagttcaagaacagagacaagtacatcaaggacgacttcagattcaaggacagattcagcaagctgaaccccagaaagatcatcagaatgtgggccgagaaggagatgcacaacctggccagaatgcagagagccggcatcccctgccccaccgtggtgctgctgaagaagcacatcctggtgatgagcttcatcggccacgaccaggtgcccgcccccaagctgaaggaggtgaagctgaacagcgaggagatgaaggaggcctactaccagaccctgcacctgatgagacagctgtaccacgagtgcaccctggtgcacgccgacctgagcgagtacaacatgctgtggcacgccggcaaggtgtggctgatcgacgtgagccagagcgtggagcccacccacccccacggcctggagttcctgttcagagactgcagaaacgtgagccagttcttccagaagggcggcgtgaaggaggccctgagcgagagagagctgttcaacgccgtgagcggcctgaacatcaccgccgacaacgaggccgacttcctggccgagatcgaggccctggagaagatgaacgaggaccacgtgcagaagaacggcagaaaggccgccagcttcctgaaggacgacggcgacccccccctgctgtacgacgagtag

SEQ ID NO: 141172 - DNA, 1560 bp, Artificial Sequence
  derived and/or modified sequence
atggacctcgtgggcgtggcgtccccagagcctggaactgctgccgcctggggccctagcaaatgtccgtgggctatcccacagaatacaataagctgctccctggccgacgtcatgtccgaacagcttgcaaaggagctccagctcgaagaagaggccgcggtcttcccagaggtcgccgtagctgaggggccgttcatcacaggcgagaacattgatacgtccagtgacctaatgctagcccaaatgctgcagatggaatatgatagagagtacgatgcccagctgaggcgcgaggagaagaagttcaatggggacagcaaagtttctatctcattcgaaaactatcgaaaagttcacccctatgaagactcagacagttctgaagatgaggtagattggcaggacacgcgagacgatccataccgccccgccaaacccgtacccactcctaaaaaggggttcattggaaagggcaaagatatcaccaccaagcacgacgaagttgtatgtggccgcaaaaataccgctcgcatggagaattttgcccctgagttccaggtgggtgacggaatcggcatggatctgaagctttccaatcatgtgttcaatgctctgaaacagcatgcttattctgaggagcgtcgatccgcacgactgcacgagaagaaggaacattccaccgcggaaaaagccgtggacccgaaaacaaggctgttgatgtataaaatggtcaatagcggcatgcttgagacaatcaccggctgcatcagcacaggaaaggagagcgtcgtatttcatgcctacggaggcagtatggaagacgaaaaggaagatagcaaagttatacctacagagtgcgccattaaggtgtttaaaactactctcaatgagttcaagaatcgcgacaaatacatcaaggacgatttcagatttaaggatcggttctccaagctgaaccctcgaaagatcattcgcatgtgggcagaaaaggaaatgcacaacttggcgcgcatgcagcgggccggtattccctgtccgacagttgtactgttgaaaaaacatatcctggtgatgtcctttataggccacgatcaggtacctgctcctaaattaaaagaagttaagctcaattccgaggaaatgaaggaggcttactatcagacattgcatctgatgcggcagctttaccacgagtgtacactagtgcacgcagacttgtctgagtataatatgctgtggcatgccggaaaggtttggttaatcgatgtgagtcagtcggtagagccaactcaccctcacggtctggagtttcttttccgcgactgtcggaatgtgagccagttttttcagaaaggtggagtcaaggaagcactaagtgagagagagctgtttaacgcagtgtccggcctgaacatcaccgcagataatgaggccgacttcctcgccgagattgaagctttggagaagatgaacgaggaccatgtgcagaagaacggacgaaaggctgcctccttccttaaggacgatggggaccccccccttctatatgacgagtag

SEQ ID NO: 141173 - DNA, 1560 bp, Artificial Sequence
  derived and/or modified sequence
atggacctggtgggcgtggccagccctgagcctggaacagctgctgcctggggccccagcaaatgtccctgggccatcccccagaacaccatcagctgcagcctggctgatgtgatgtctgagcagctggccaaggagctgcagctggaggaggaggccgctgtgtttcctgaggtggccgtggccgagggccccttcatcaccggggagaacatcgacaccagcagtgacctgatgctggcccagatgctgcagatggagtatgaccgggagtatgatgcccagctgcggcgggaggagaagaagttcaacggggacagcaaggtgtccatcagctttgagaactacaggaaggtgcacccctatgaagattctgacagcagtgaagatgaggtggactggcaggacaccagagatgacccctacagacctgccaagcctgtgcccacccccaagaagggcttcatcggcaagggcaaggacatcaccaccaagcatgatgaggtggtgtgtggcaggaagaacacagccaggatggagaactttgcccctgagttccaggtgggagatggcatcggcatggacctgaagctgagcaaccacgtgttcaatgccctgaagcagcacgcctacagcgaggagaggagaagtgcccggctgcacgagaagaaggagcacagcacagctgagaaggctgtggaccccaagacccggctgctgatgtacaagatggtgaacagcggcatgctggagaccatcaccggctgcatcagcacaggcaaggagagcgtggtgttccacgcctatggaggctccatggaggatgagaaggaggacagcaaggtgatccccacagaatgtgccatcaaggtgttcaagaccaccctgaatgagttcaagaacagagacaagtacatcaaggatgacttccgcttcaaggaccgcttcagcaagctgaaccccaggaagatcatccgcatgtgggccgagaaggagatgcacaacctggccaggatgcagagagctggcatcccctgccccaccgtggtgctgctgaagaagcacatcctggtgatgtccttcatcggccatgaccaggtgcctgcccccaagctgaaggaggtgaagctgaacagcgaggagatgaaggaggcctactaccagaccctgcacctgatgaggcagctgtaccatgaatgtaccctggtgcatgctgacctgtctgagtacaacatgctgtggcacgccggcaaggtgtggctgattgatgtgtcccagagcgtggagcccacccacccccacggcctggagttcctgttccgggactgcagaaatgtgtcccagttcttccagaagggcggcgtgaaggaggccctgtctgagcgggagctgttcaatgctgtgtctggcctgaacatcacagctgacaatgaagctgacttcctggccgagattgaggccctggagaagatgaatgaagatcatgtgcagaagaatggaaggaaggccgccagcttcctgaaggatgatggagacccccccctgctgtatgatgaatag

SEQ ID NO: 141174 - DNA, 1560 bp, Artificial Sequence
  derived and/or modified sequence
atggacctggtgggcgtggccagccccgagcccggcaccgccgccgcatggggaccttcaaagtgtccttgggccatcccccagaacaccatttcttgctcattggcggatgttatgtcggagcagttggctaaagaactgcagctagaagaggaggctgcggttttcccggaggttgctgtcgccgagggaccatttattacaggcgagaacatagataccagcagtgatttgatgttggcccagatgttgcaaatggagtacgaccgggagtatgatgcacaactgaggcgggaagagaagaaattcaatggagattctaaagtgtcaataagcttcgagaactaccgtaaggtccacccctacgaggacagcgacagctcggaggatgaagttgactggcaagatacacgtgacgatccctatcggcccgccaaaccggtaccaacacccaagaaggggtttataggaaaaggtaaggacattacaacaaagcacgatgaggtggtgtgcggccgaaaaaacacagcccgtatggaaaattttgctccggagtttcaggtgggtgacggtatcggtatggacctcaagctcagcaaccacgtgtttaacgcacttaaacagcacgcatattccgaggagcggcgatccgcacggttacacgagaagaaggagcatagcaccgccgagaaggctgtggacccgaagacacgattgcttatgtacaagatggtaaattcgggcatgcttgagacaataacaggctgcatcagtacaggaaaggagagcgtggtctttcatgcatacgggggcagcatggaggacgagaaagaagactccaaggtcatcccaaccgagtgtgccatcaaggtatttaagacgactctcaatgagtttaaaaacagggacaagtatatcaaagatgacttccgtttcaaagataggttttctaaattaaatccccgaaagatcattcggatgtgggcagaaaaggagatgcataaccttgctaggatgcagagagcaggcatcccctgccctaccgttgtgctcctgaaaaagcacattctcgtgatgtccttcataggacacgaccaggtgcctgcccctaagttgaaggaagtgaagctcaatagcgaagagatgaaggaggcctactatcaaacgttgcatctcatgagacagttgtaccacgaatgcacccttgtccatgcagatctcagcgaatacaacatgctgtggcatgcaggcaaggtgtggctcatcgacgtgagccaatctgtggaacctacccatccccatggcttagagttcttatttcgcgattgtcgcaacgtttcccagttctttcagaagggcggggtgaaggaggccctctccgaacgagagttgttcaatgcagtgtctggcctcaacattactgctgataacgaggccgactttctggcagagatcgaagcgttagaaaagatgaacgaggatcatgtgcagaagaacggacgaaaggcagcctctttccttaaggacgacggtgaccccccactgctgtatgacgaatag

SEQ ID NO: 141175 - DNA, 1560 bp, Artificial Sequence
  derived and/or modified sequence
atggaccttgttggagtggcgagcccggagcctggaactgccgcagcatgggggccatccaagtgtccatgggccattccacagaacaccatttcctgttcactggccgatgtgatgtctgaacaactcgctaaggagctgcagctcgaggaggaggcggctgtcttcccggaagtcgctgtcgccgagggcccttttatcacaggagagaatattgacacgtcaagtgacctcatgttagctcaaatgctacagatggagtatgaccgagagtatgatgctcagttgcgcagagaggagaagaagttcaacggggacagtaaagtaagcataagtttcgagaactaccgaaaagtgcatccatacgaggactccgactcttccgaggacgaggtcgactggcaagacaccagggacgatccgtataggcccgcaaagccagtgcctacacctaagaagggctttatcgggaaaggtaaagacattactaccaaacatgacgaggttgtctgtggtcgaaagaatacagccagaatggagaatttcgcccctgaattccaagtcggcgacggcattggaatggacctaaagttgtcgaatcatgtcttcaatgccctgaagcagcatgcatacagtgaggagcggaggtcggcgagactccacgagaaaaaggaacactctaccgctgagaaggcggtggaccccaaaactcggctgctgatgtacaaaatggttaattctggcatgctcgagacaattacagggtgcatcagtacagggaaagagagtgtggtctttcacgcctatggagggagcatggaggatgagaaagaggattctaaggtcattcctacagaatgtgctattaaggtctttaagaccactttaaatgaatttaagaacagagacaagtatatcaaggacgattttcgctttaaggaccgattttccaaattgaatccaagaaaaatcatccgcatgtgggcagaaaaagagatgcacaacctggctaggatgcaacgagcaggaattccttgtcccacagtggtgctgctgaagaagcacatattggtgatgtcctttatcgggcacgaccaggtgccagcacccaagctgaaggaagtgaaactgaatagcgaggaaatgaaagaagcttattatcagacgttgcacctgatgagacagctctaccatgaatgcactctggtgcatgccgacttaagcgagtacaatatgttatggcatgccggaaaggtttggctgattgacgtttcacagtctgtcgagccaacacatccacatggccttgaattcctgttccgcgactgccgtaacgtttcccagtttttccagaagggcggagtgaaggaagcactgagcgaacgcgaactgttcaatgctgtttctgggctgaatattactgctgacaacgaagcggattttcttgccgagattgaggctcttgaaaaaatgaacgaagaccatgtacagaagaatggacgcaaggccgcttcatttcttaaagatgatggtgacccacctttgctctatgacgagtag

SEQ ID NO: 141176 - DNA, 4038 bp, Artificial Sequence
  derived and/or modified sequence
aacaacaaccaccacaaactccgaccgtcctttccaggccctttccctctataaacctgccgttttctgtctcccaagtcatcccagtttagaactgctccaggaaataatgaatgaacagagagagcctagtttgtttatttatttacaatccactagtctaatctagtttagatccagcggcaatttttggggtgccaaggaggaaagaaggagatggcagtgcggggacagggcagagcctgggccaaaggaagccacacccagttcttgccctgccctgcccgacacaggcaacgtgaccccaagcgacagccagctgatgcttgcttctccgagcccggcggtcagcagccggaagtagcccgcccgggggcggggaaaggtgccttaaggaggagctaggggcgtgcggccaattgcaagcgactgtcctagcgaagagggcggaagaggagagatccagttccggacgcggccgccgccgtcgccgccatctgtcacctccactccggcatcagcagccagtcgcccgtgtcccgcctgtctcctcggcggagcctgctgcccgtcctgccacctctctgctctgttcttgtctctgccttcattcccgaatggatctggtaggagtggcatcgcctgagcccgggacggcagcggcctggggacccagcaagtgtccatgggctattcctcaaaatacaatatcttgttctttggctgatgtaatgagtgaacagctggccaaagaattgcagttagaagaagaagctgccgtttttcctgaagttgctgttgctgaaggaccatttattactggagaaaacattgatacttccagtgaccttatgctggctcagatgctacagatggaatatgacagagaatatgatgcacagcttaggcgtgaagaaaaaaaattcaatggagatagcaaagtttccatttcctttgaaaattatcgaaaagtgcatccttatgaagacagcgatagctctgaagatgaggttgactggcaggatactcgtgatgatccctacagaccagcaaaaccggttcccactcctaaaaagggctttattggaaaaggaaaagatatcaccaccaaacatgatgaagtagtatgtgggagaaagaacacagcaagaatggaaaattttgcacctgagtttcaggtaggagatggaattggaatggatttaaaactatcaaaccatgttttcaatgctttaaaacaacatgcctactcagaagaacgtcgaagtgcccgcctacatgagaaaaaggagcattctacagcagaaaaagcagttgatcctaagacacgtttacttatgtataaaatggtcaactctggaatgttggagacaatcactggctgtattagtacaggaaaggagtctgttgtctttcatgcatatggagggagcatggaggatgaaaaggaagatagtaaagttatacctacagaatgtgccatcaaggtatttaaaacaacccttaatgaatttaagaatcgtgacaaatatattaaagatgatttcaggtttaaagatcgcttcagtaaactaaatccacgtaagatcatccgcatgtgggcagaaaaagaaatgcacaatctcgcaagaatgcagagagctggaattccttgtccaacagttgtactactgaagaaacacattttagttatgtcttttattggccatgatcaagttccagcccctaaattaaaagaagtaaagctcaatagtgaagaaatgaaagaagcctactatcaaactcttcatttgatgcggcagttatatcatgaatgtacgcttgtccatgctgacctcagtgagtataacatgctgtggcatgctggaaaggtctggttgatcgatgtcagtcagtcagtagaacctacccaccctcacggcctggagttcttgttccgggactgcaggaatgtctcgcagtttttccagaaaggaggagtcaaggaagcccttagtgaacgagaactcttcaatgctgtttcaggcttaaacatcacagcagataatgaagctgattttttagctgagatagaagctttggagaaaatgaatgaagatcacgttcagaagaatggaaggaaagctgcttcatttttgaaagatgatggagacccaccactactatatgatgaatagcactaatacccactgcttcagtgttaacacagcagtgattgtcagctgccaatagcaaatgaagttatgggtgacttgaaataccaaaacctgaggagtgggcaatggtgcttctgtgcttttcccccttgtaacccatgtgccagatgtgtggaatttttagctcagcattgagagaataaaatgtcactacctctcatcttatgaacaggataatataattctttaacagctataggttatctggctgaagtagacctaattttatgtgacttgtggtgtaaaatgtcttgatgataatttttaaaacttgggtaacacttccaaatatgggaggaaaggacagatgtgtttacaagggaggattttacaacatacttgctttattcacctccctgttttgtgttgcgtctttccttgaatattttattggcccagagttagcctttctcaattatgtttccagactgtggccgtgattctaaaggaaaatgtgtgctctttagtgggtagaacaaatggaaatttggtttcagaatggctgacagaaatcgacataagtcatgtaatttttgttgatatatcatgaaaatgaacagaattctttttccatacttatatctaagaaaaggcatcataggtttctgaaagagataactatataacagctttttaactatccagtcaactttcagcttttctacatttaggtaaaatggttaggatataactcatggtgtggctaatctacatttatcaataaaatgtaaattatctgaaaggacagaatataagatttaaccatgtttgacgtattttaatttagttaatgaagcaaaattcagtttatatttcactagaactgtgtacttgattgattttcagagaaatatcacaaattagaaatattaaatctaaggatgaaaggtatatataaaacaatttgggggccaggcacgatggctcaaacctgtaatcccagcactttgggagaccaaggcgggtggatcacttgaggtcaggagttcaagaccagcctgggcaacatggcgaaaccctgtctctactaaaaatacaaaaattagccgggtgtggtggcacttctctgtaatctcagcttctcaggaggctgagacaggagaatcgcttgaacccgggaggcagaggttgcagtgagctgagatcatgccactgcactccggcctaggtgacagagggaaactccatctccaggaaaaaaaaaaaaaaacccaatttggataccaaattaatcaactaatttgagctatctggccttactcttagtagtttttagtacgtgctggacaccacttttaaaaagcaatcactgtgctagaaaagtatattggctttgttaggattaaagttcattaacttcaatgtaatcatgcctcctattactgaagtcagattggaaccactaaagatccaaactttctgtctggtaatagaaagtaaaaatctagacatcatttacatttgagaaagctgtttttaacattattttaaaatgccaaatatgttctttctagaaaaatatttatttttgtttttgttggatagcttttaattacatttcagagaggtgtaattttgggtagatgctcattacatttttgaaaggtttatgattccaaaataaagatttatatgactggtgatactggctttacagaaatttcagagaactaatttttaaaatctttagcatttaaaactttttttgttttgttttctgacatattctgacaaagagcagcaaaccactgctgtgtggcattcttggagtgtgctgtgaatgtgctttttaagaaattaaaaagagatcattttaaaattg

SEQ ID NO: 141177 - protein, 446 aa, Artificial Sequence
  derived and/or modified sequence
MERVVVSMQDPDQGVKMRSQRLLVTVIPHAVTGSDVVQWLAQKFCVSEEEALHLGAVLVQHGYIYPLRDPRSLMLRPDETPYRFQTPYFWTSTLRPAAELDYAIYLAKKNIRKRGTLVDYEKDCYDRLHKKINHAWDLVLMQAREQLRAAKQRSKGDRLVIACQEQTYWLVNRPPPGAPDVLEQGPGRGSCAASRVLMTKSADFHKREIEYFRKALGRTRVKSSVCLEAYLSFCGQRGPHDPLVSGCLPSNPWISDNDAYWVMNAPTVAAPTKLRVERWGFSFRELLEDPVGRAHFMDFLGKEFSGENLSFWEACEELRYGAQAQVPTLVDAVYEQFLAPGAAHWVNIDSRTMEQTLEGLRQPHRYVLDDAQLHIYMLMKKDSYPRFLKSDMYKALLAEAGIPLEMKRRVFPFTWRPRHSSPSPALLPTPVEPTAACGPGGGDGVA

SEQ ID NO: 141178 - protein, 674 aa, Artificial Sequence
  derived and/or modified sequence
MTIRHQGQQYRPRMAFLQKIEALVKDMQNPETGVRMQNQRVLVTSVPHAMTGSDVLQWIVQRLWISSLEAQNLGNFIVRYGYIYPLQDPKNLILKPDGSLYRFQTPYFWPTQQWPAEDTDYAIYLAKRNIKKKGILEEYEKENYNFLNQKMNYKWDFVIMQAKEQYRAGKERNKADRYALDCQEKAYWLVHRCPPGMDNVLDYGLDRVTNPNEVKVNQKQTVVAVKKEIMYYQQALMRSTVKSSVSLGGIVKYSEQFSSNDAIMSGCLPSNPWITDDTQFWDLNAKLVEIPTKMRVERWAFNFSELIRDPKGRQSFQYFLKKEFSGENLGFWEACEDLKYGDQSKVKEKAEEIYKLFLAPGARRWINIDGKTMDITVKGLKHPHRYVLDAAQTHIYMLMKKDSYARYLKSPIYKDMLAKAIEPQETTKKSSTLPFMRRHLRSSPSPVILRQLEEEAKAREAANTVDITQPGQHMAPSPHLTVYTGTCMPPSPSSPFSSSCRSPRKPFASPSRFIRRPSTTICPSPIRVALESSSGLEQKGECSGSMAPRGPSVTESSEASLDTSWPRSRPRAPPKARMALSFSRFLRRGCLASPVFARLSPKCPAVSHGRVQPLGDVGQQLPRLKSKRVANFFQIKMDVPTGSGTCLMDSEDAGTGESGDRATEKEVICPWESL

SEQ ID NO: 141179 - DNA, 2025 bp, Artificial Sequence
  derived and/or modified sequence
atgacgattagacaccaaggacaacaatacagacccaggatggctttcctccagaaaattgaagcccttgtcaaggacatgcaaaacccggaaactggagtccggatgcagaatcagcgcgtactggtgacgtctgtgccccatgctatgactggtagtgatgtacttcagtggatcgtgcagcgactgtggatcagctctctggaggctcaaaatcttgggaatttcatcgtccgatacgggtatatctatcctcttcaggatccaaagaacctaattctcaaacccgatgggtccctctaccgcttccagactccttacttctggcctactcagcagtggccagccgaggatacagactacgcgatttatctggctaaacggaatatcaaaaagaagggaattctggaggagtacgaaaaggaaaactataactttctcaaccagaagatgaactataaatgggatttcgtgatcatgcaagctaaagagcagtatagggcaggcaaagagagaaacaaggccgatcgatatgccctggattgtcaggaaaaagcttactggttggtgcatcgatgcccccccggtatggacaacgtgctcgattatggtctcgatcgtgtaaccaaccctaatgaagtgaaagtgaaccagaaacagactgtggtggccgtcaaaaaggaaattatgtactatcagcaggccctcatgaggtcaaccgtaaagtctagcgtgagtttgggaggaatcgttaaatactccgaacagttctcttccaatgacgctattatgtctgggtgtttgccgtctaacccttggatcaccgatgacactcagttttgggacctgaacgccaaattagtggagatcccaactaaaatgcgcgtcgaacgatgggccttcaatttcagtgagctcatccgtgatccaaaaggccgccaatcctttcaatactttctcaaaaaagagttctccggtgagaacttagggttctgggaagcctgcgaagacctaaagtacggagatcagtccaaagtgaaagagaaagcggaagaaatatataagctctttctggctccaggggccaggagatggatcaacattgatgggaaaacaatggatataacagtcaaggggttgaaacatcctcaccgatatgtcctcgacgccgcacagacgcatatctacatgctcatgaaaaaggactcgtatgcccgatacctcaagtcacctatttacaaggacatgctcgcaaaggccattgagccacaggaaacgaccaagaaaagcagtaccctccccttcatgcgccgacacctgagaagctccccctctccggtgattctccgccagcttgaggaagaggccaaggcacgggaagccgcaaatacagtcgacatcacccagcctgggcagcatatggcccctagcccgcatctgactgtgtatactggtacttgtatgccgccgtcaccttcttcgcccttttcttcatcctgccgctcaccgaggaagccattcgcatctccaagtcgtttcataaggcggccgagtaccaccatttgtccctccccaatcagagtcgcccttgagtcttcctcaggtctggagcagaaaggtgagtgctccggtagtatggccccacgaggaccgagcgtgaccgaaagctcggaagccagtctggatacatcatggcccagaagccgaccacgcgcacctccgaaggcccgaatggccctgtcatttagtcgattcctcagaagagggtgcctcgcctctccggtctttgcccgcctctcaccaaagtgcccagctgtgtcccacggtcgagtgcagccgctcggagatgtgggacagcagctgccacgtctgaagtccaagagggtcgcaaatttcttccaaattaaaatggacgttcctactggttctggcacttgcctgatggattctgaagatgccggcactggggagtcaggagacagggcgaccgagaaagaggttatttgtccttgggagagtttatag

SEQ ID NO: 141180 - DNA, 2025 bp, Artificial Sequence
  derived and/or modified sequence
atgaccatccgccaccagggccagcagtaccggcccaggatggccttcctgcagaagattgaggccctggtgaaggacatgcagaaccctgagaccggggtgaggatgcagaaccagagggtgctggtgacctctgtgccccacgccatgactggaagtgatgtgctgcagtggatcgtgcagaggctgtggatcagcagcctggaggcccagaacctgggcaacttcatcgtgcgctatggctacatctaccccctgcaggaccccaagaacctgatcctgaagccagatggcagcctgtaccgcttccagaccccctacttctggcccacccagcagtggccagctgaggacacagattatgccatctacctggccaagaggaacatcaagaagaagggcatcctggaggagtatgagaaggagaactacaacttcctgaaccagaagatgaactacaagtgggactttgtgatcatgcaggccaaggagcagtaccgggccggcaaggagaggaacaaggctgacagatatgccctggactgccaggagaaggcctactggctggtgcaccgctgccccccaggcatggacaacgtgctggactatggcctggacagagtgaccaaccccaatgaggtgaaggtgaaccagaagcagacagtggtggccgtgaagaaggagatcatgtactaccagcaggccctgatgaggagcacagtgaagagctctgtgtccctgggcggcatcgtgaagtacagcgagcagttcagcagcaatgatgccatcatgagcggctgcctgcccagcaacccctggatcacagatgacacccagttctgggacctgaatgccaagctggtggagatccccaccaagatgagggtggagcgctgggccttcaacttcagcgagctgatccgggaccccaagggccggcagagcttccagtacttcctgaagaaggagttctctggagagaacctgggcttctgggaggcctgtgaggacctgaagtacggggaccagagcaaggtgaaggagaaggccgaggagatctacaagctgttcctggcccctggggcccggcgctggatcaacattgatggcaagaccatggacatcaccgtgaagggcctgaagcacccccaccgctacgtgctggatgctgcccagacccacatctacatgctgatgaagaaggacagctatgcccgctacctgaagagccccatctacaaggacatgctggccaaggccatcgagccccaggagaccaccaagaagagcagcaccctgcccttcatgagaagacacctgcggagcagccccagccctgtgatcctgcggcagctggaggaggaggccaaggcccgggaggccgccaacacagtggacatcacccagcccggccagcacatggcccccagcccccacctgactgtgtacacaggcacctgcatgccacccagccccagcagccccttcagcagcagctgccgcagccccaggaagccctttgccagccccagccgcttcatcagaagacccagcaccaccatctgccccagccccatccgggtggccctggagagcagcagcggcctggagcagaagggagaatgttctggctccatggccccccggggccccagcgtgacagagagcagcgaggccagcctggacacctcctggcccaggagccggccccgggccccacccaaggccaggatggccctgtccttcagccgcttcctgcggcggggctgcctggccagccctgtgtttgcccggctgagccccaagtgcccagctgtgagccacggccgggtgcagcccctgggagatgtgggccagcagctgccccggctgaagagcaagagggtggccaacttcttccagatcaagatggatgtgcccactggaagtggcacctgcctgatggacagtgaagatgctggcactggagagagcggggaccgggccacagagaaggaggtgatctgcccctgggagagcctgtag

SEQ ID NO: 141181 - DNA, 2025 bp, Artificial Sequence
  derived and/or modified sequence
atgaccatccggcaccagggccagcagtaccggccccggatggcctttctccaaaagattgaagctctggtgaaggatatgcagaacccagagactggcgttagaatgcagaaccaaagggtactcgttacatccgttccccacgccatgactggttccgacgtgctgcagtggatagtgcaaagattgtggatcagttcgcttgaagcccagaacctgggaaacttcattgtgcgttacggctatatctaccccctgcaggacccaaaaaacttgatccttaagcccgacggctctttgtaccggtttcaaaccccatatttctggcccacccagcagtggcctgccgaagacacagactacgccatctacctcgcaaagagaaatataaagaagaagggtatcctagaggagtatgaaaaggaaaactacaattttctgaaccagaagatgaattacaaatgggatttcgtgattatgcaggctaaagagcagtacagagcggggaaggagcgtaataaggcagatagatacgccctggattgtcaagagaaagcatactggctggtccacagatgtcctccaggaatggataatgtgctcgattatggattggatcgcgtgaccaatccgaatgaggtcaaggtgaaccagaaacaaaccgtagtcgccgttaagaaggaaatcatgtactaccaacaggctctgatgagatcaacagtgaagtccagcgtgtccctcggcggcattgtgaagtacagcgagcagttttcgtcgaatgatgccatcatgagtggatgtctgccgtccaatccctggatcaccgatgatacgcagttctgggacctcaacgccaagctcgtagagatcccaaccaagatgcgggtggagaggtgggcgtttaatttctcggaattgatccgcgatcctaaagggcgtcagtctttccaatacttccttaaaaaagagtttagtggggagaacctggggttttgggaagcatgtgaagatttaaagtatggggatcagtcgaaagtgaaggagaaggctgaggagatatacaagctgtttctggcaccaggcgctcggaggtggatcaacatcgatggcaagactatggatattacagtcaaagggctgaagcacccacatcggtatgtgctggacgcagcacagacccacatttatatgctcatgaagaaagatagttatgcgcgctaccttaaaagcccaatctacaaggacatgctggccaaagctattgagcctcaggagacaactaagaaatctagcactctgccctttatgcgcagacacctgcggtcatcgccctcccctgtgatattgagacagttggaggaagaagccaaagcccgagaggcggctaataccgtcgacatcacccagcctggacagcatatggctcccagcccacacttgactgtatataccggaacctgtatgcccccttcccctagctctcctttctccagttcttgccgcagtccacgcaaacctttcgcatccccatcccgattcatccggcgacccagcacaactatttgtccttccccaatccgtgtcgccctggagtcttctagcggccttgagcagaagggcgagtgttcaggcagtatggcccctcgtggaccaagtgtaaccgagtctagtgaggcatctttggacaccagctggccccggagccggcccagggccccacccaaagcacgcatggcattaagcttttctcggttcctgaggaggggttgtttggcctccccagtgttcgcccgactttcgccaaaatgccccgccgtgtcccacgggcgtgtgcagcctctcggtgatgtggggcagcagctccccagactaaagtctaagcgcgttgctaacttttttcagattaaaatggacgtgccaacgggctccggcacctgtctgatggattccgaagatgccggcacgggcgagagcggggatagagcgaccgagaaggaggtaatctgtccctgggaatccctttag

SEQ ID NO: 141182 - DNA, 2025 bp, Artificial Sequence
  derived and/or modified sequence
atgaccattagacaccagggacagcagtatagacccagaatggcttttcttcagaagatcgaggccctagtcaaagacatgcagaaccctgagaccggagtgcgtatgcagaatcaacgggtcttggtaacatcggtcccacatgctatgactggtagcgacgtcctgcagtggatagtgcagcggctgtggatcagctcattggaagcccaaaatctggggaatttcatcgtaaggtatggctacatttatccactgcaagatcccaagaaccttattcttaagcctgacgggtctctgtatagatttcagactccatacttttggcccacccaacagtggccagccgaagacacagattatgcaatatatctggccaaacgcaatattaaaaagaagggcatcctggaagagtatgagaaagaaaattataatttcctgaatcagaagatgaactacaaatgggatttcgtgattatgcaagcgaaagagcagtatcgggctggtaaggaacggaataaggccgatagatacgccctggactgtcaagagaaagcctattggctagtccaccgctgtccacccggtatggacaacgtgctcgactacgggctggatagggtaactaaccctaatgaggtcaaggtgaaccaaaaacaaaccgtggttgcagtcaaaaaggaaattatgtactaccaacaggcacttatgcgtagcacggtaaagtcttccgtgagcctcggagggattgtgaagtattctgagcagttctcctccaatgacgccataatgagcggctgtcttccctccaacccctggatcaccgacgatacccagttttgggaccttaatgctaagctcgttgaaatccccactaagatgagggtcgagcgctgggcctttaattttagtgagctaattagggatcccaaaggaaggcaatcttttcagtactttttaaaaaaagaatttagcggcgagaatttaggcttctgggaggcctgtgaagacctaaaatacggcgatcaatcaaaggtgaaggaaaaagccgaagaaatttacaaattgttcctggctcctggtgccagacggtggatcaacatagatggcaagacaatggacatcactgtgaagggcttgaaacaccctcaccggtacgtgttagacgccgctcagactcatatatacatgttaatgaaaaaagactcttacgcaaggtacctcaaaagccctatatataaggacatgctagcaaaggccatcgagccacaggaaactactaagaaatcttctaccttaccttttatgcgcaggcacctgcgctcgagcccatccccggtcatactgaggcagctcgaagaagaggcaaaggctagagaagccgcaaataccgtagatatcacacagcccggacagcatatggctccttcccctcatctgaccgtttatacggggacttgtatgccaccatcacctagctcacctttttccagtagctgtaggagtcccagaaaaccattcgctagccctagccgctttattcgccgaccatctacaactatctgcccttctcctatcagagtggcactggagtctagctccgggctggagcaaaaaggtgagtgcagtggctccatggcaccgagagggccaagtgtcactgagagcagtgaggcgagcctcgatacgagctggccaaggagtaggcccagggccccaccgaaagctagaatggccttgtcattctcccggttcctgaggcgcggttgtctggcctcacccgtgttcgcccgattatcccccaagtgtcctgctgtctctcacgggcgagtgcagcccttaggagatgtgggtcagcagttgccaaggttgaagagtaagcgtgtggccaactttttccagattaaaatggacgtcccaactgggtccggcacgtgcctgatggattctgaagacgctgggaccggcgagtctggtgatcgagcaacagagaaggaagtcatctgtccctgggaatcgctttag

SEQ ID NO: 141183 - DNA, 2522 bp, Artificial Sequence
  derived and/or modified sequence
gattggctggcgcggattccagctgctttccaagtcagcggcgcctagtgagagtcaggggggcccggcccgcgccctccccgcccagccgcctccccgtcgacgcccagggctggggcgagccaggctgcctttcgaacttggggggcttctcctcttgtctcccactggtgctctggctgtgaatccatccaggggccaggatgacaatccgacaccaaggccagcagtacaggccgaggatggcatttctccaaaagattgaagcgctcgtgaaggacatgcagaacccagagacaggggtccgaatgcagaaccagagggtcctggtcaccagcgttcctcatgccatgacaggaagtgatgttctgcaatggatcgtccagcggctttggatctccagtctggaggcacagaacttgggcaactttattgtcaggtatggctacatttaccccctgcaagaccccaagaatctcattctcaagcctgatggcagcctctacagatttcagacaccgtatttctggcccacccagcagtggccagctgaagataccgattacgccatctatctggccaagcgaaatatcaaaaagaaagggattttggaagaatatgaaaaggaaaattacaatttcttgaaccaaaaaatgaactataagtgggactttgtcattatgcaggccaaagagcagtacagggctggaaaggagaggaacaaagcagacagatatgccctggactgccaggagaaggcatactggctggtgcaccgatgccctcctggaatggacaatgtgctggactacggcctggaccgagtgaccaatccgaatgaagtcaaggtaaaccagaaacaaacagtcgttgctgtcaaaaaagagatcatgtattaccaacaggccttgatgaggtccacagtgaagtcttctgtgtccctgggagggattgtgaaatacagtgagcagttctcatccaacgatgccatcatgtcaggctgcctccccagcaacccctggatcaccgatgacacccagttctgggacttaaatgccaaattggtggaaatcccaaccaagatgcgagtggaacgatgggccttcaacttcagcgaattgatccgagaccccaaaggtcgacagagcttccagtacttcctcaagaaagaattcagtggagagaatctgggattctgggaagcctgcgaggatctgaagtatggagatcagtccaaagtcaaggagaaagcagaggagatttacaagctgttcctggccccgggggcgaggcgctggatcaacatagatggcaaaaccatggacatcacagtgaaggggctgaagcacccccaccgctatgtgctggacgccgcacaaacccacatttacatgctcatgaagaaggattcttatgctcgctatttaaaatctccgatctataaggacatgctggccaaagctattgaacctcaggaaaccaccaagaaaagctccaccctcccttttatgcggcgtcacctgcgctccagcccaagccctgtcatcctgagacagctggaagaggaagccaaggcccgagaagcagccaacactgtggacatcacccagccgggccagcacatggctcccagcccccatctgaccgtgtacaccgggacctgcatgcccccgtctccttctagccccttctcctcctcctgccgctcccccaggaagcctttcgcctcacccagccgcttcatccggcgacccagcaccaccatctgcccctcacccatcagagtggccttggagagctcatcgggcttggagcagaaaggggagtgcagcgggtccatggccccccgtgggccctctgtcaccgagagcagcgaggcctccctcgacacctcctggcctcgcagccggcccagggcccctcctaaggcccgcatggctctgtccttcagcaggtttctgagacgaggctgtctggcctcacctgtctttgccaggctctcacccaagtgccctgctgtgtcccacgggagggtgcagcccctgggggacgtgggccagcagctgccacgattgaaatccaagagagtagcaaactttttccagatcaaaatggatgtgcccacggggagcgggacctgcttgatggactcggaggatgctggaacaggagagtcgggtgaccgggccacagaaaaggaggtcatctgcccctgggagagcctgtaaggaaagaggcaggctgagctgggggctctggaccaggaagatgctctgacagatgccatggtatgggccacaggacacacttgctcgagaaccaaagtgcatttgggtgacatttgaagattggggagacaagatggggtagattgtggcaaagaatgctctggctggttaccaggggccaactccttctcctcttcctgaccctccctcccctgggcagaagaaacgcatgtggaccagaagactttccctgctgccttaaaaccaataaaaggttaactttaagtttcttgg

SEQ ID NO: 141184 - DNA, 2025 bp, Artificial Sequence
  derived and/or modified sequence
atgaccatcagacaccagggccagcagtacagacccagaatggccttcctgcagaagatcgaggccctggtgaaggacatgcagaaccccgagaccggcgtgagaatgcagaaccagagagtgctggtgaccagcgtgccccacgccatgaccggcagcgacgtgctgcagtggatcgtgcagagactgtggatcagcagcctggaggcccagaacctgggcaacttcatcgtgagatacggctacatctaccccctgcaggaccccaagaacctgatcctgaagcccgacggcagcctgtacagattccagaccccctacttctggcccacccagcagtggcccgccgaggacaccgactacgccatctacctggccaagagaaacatcaagaagaagggcatcctggaggagtacgagaaggagaactacaacttcctgaaccagaagatgaactacaagtgggacttcgtgatcatgcaggccaaggagcagtacagagccggcaaggagagaaacaaggccgacagatacgccctggactgccaggagaaggcctactggctggtgcacagatgcccccccggcatggacaacgtgctggactacggcctggacagagtgaccaaccccaacgaggtgaaggtgaaccagaagcagaccgtggtggccgtgaagaaggagatcatgtactaccagcaggccctgatgagaagcaccgtgaagagcagcgtgagcctgggcggcatcgtgaagtacagcgagcagttcagcagcaacgacgccatcatgagcggctgcctgcccagcaacccctggatcaccgacgacacccagttctgggacctgaacgccaagctggtggagatccccaccaagatgagagtggagagatgggccttcaacttcagcgagctgatcagagaccccaagggcagacagagcttccagtacttcctgaagaaggagttcagcggcgagaacctgggcttctgggaggcctgcgaggacctgaagtacggcgaccagagcaaggtgaaggagaaggccgaggagatctacaagctgttcctggcccccggcgccagaagatggatcaacatcgacggcaagaccatggacatcaccgtgaagggcctgaagcacccccacagatacgtgctggacgccgcccagacccacatctacatgctgatgaagaaggacagctacgccagatacctgaagagccccatctacaaggacatgctggccaaggccatcgagccccaggagaccaccaagaagagcagcaccctgcccttcatgagaagacacctgagaagcagccccagccccgtgatcctgagacagctggaggaggaggccaaggccagagaggccgccaacaccgtggacatcacccagcccggccagcacatggcccccagcccccacctgaccgtgtacaccggcacctgcatgccccccagccccagcagccccttcagcagcagctgcagaagccccagaaagcccttcgccagccccagcagattcatcagaagacccagcaccaccatctgccccagccccatcagagtggccctggagagcagcagcggcctggagcagaagggcgagtgcagcggcagcatggcccccagaggccccagcgtgaccgagagcagcgaggccagcctggacaccagctggcccagaagcagacccagagccccccccaaggccagaatggccctgagcttcagcagattcctgagaagaggctgcctggccagccccgtgttcgccagactgagccccaagtgccccgccgtgagccacggcagagtgcagcccctgggcgacgtgggccagcagctgcccagactgaagagcaagagagtggccaacttcttccagatcaagatggacgtgcccaccggcagcggcacctgcctgatggacagcgaggacgccggcaccggcgagagcggcgacagagccaccgagaaggaggtgatctgcccctgggagagcctgtag

SEQ ID NO: 141185 - protein, 383 aa, Artificial Sequence
  derived and/or modified sequence
MTATEALLRVLLLLLAFGHSTYGAECFPACNPQNGFCEDDNVCRCQPGWQGPLCDQCVTSPGCLHGLCGEPGQCICTDGWDGELCDRDVRACSSAPCANNRTCVSLDDGLYECSCAPGYSGKDCQKKDGPCVINGSPCQHGGTCVDDEGRASHASCLCPPGFSGNFCEIVANSCTPNPCENDGVCTDIGGDFRCRCPAGFIDKTCSRPVTNCASSPCQNGGTCLQHTQVSYECLCKPEFTGLTCVKKRALSPQQVTRLPSGYGLAYRLTPGVHELPVQQPEHRILKVSMKELNKKTPLLTEGQAICFTILGVLTSLVVLGTVGIVFLNKCETWVSNLRYNHMLRKKKNLLLQYNSGEDLAVNIIFPEKIDMTTFSKEAGDEEI

SEQ ID NO: 141186 - protein, 97 aa, Artificial Sequence
  derived and/or modified sequence
MTATEALLRVLLLLLAFGHSTYGAECFPACNPQNGFCEDDNVCRCQPGWQGPLCDQCVTSPGCLHGLCGEPGQCICTDGWDGELCDRDVRACSSAPC

SEQ ID NO: 141187 - DNA, 1152 bp, Artificial Sequence
  derived and/or modified sequence
atgaccgcgacagaggctttgttgagagtcctcctgctcctcctagctttcggccattctacatatggagctgagtgtttccccgcgtgtaatccccagaatggcttctgtgaagatgataacgtctgcagatgccagccaggatggcaggggcccttgtgcgatcaatgtgttacaagccctggctgcctccatgggctttgcggcgaacccggtcagtgcatctgcactgacggttgggatggagaactttgtgaccgtgacgtccgggcttgttcatccgcgccttgcgcgaacaataggacatgcgtcagcctggacgacggcttgtacgaatgtagttgtgctcccggctacagcggaaaagactgccaaaaaaaggatggcccatgcgtgatcaacggctcaccttgtcaacacgggggcacttgcgtggacgatgaaggccgggcgagccacgctagctgcctgtgccccccaggattctccggcaacttctgcgagatagtggccaacagctgcaccccaaacccctgtgaaaacgacggggtttgtacggacattgggggtgacttccgttgcaggtgccccgccggattcatcgataaaacgtgttcacgcccagtcacgaactgtgctagctccccttgtcaaaacgggggtacatgcctccagcacactcaggtttcttacgagtgtctatgtaagcccgagttcaccggcctgacttgtgttaaaaaacgcgcgctcagcccccagcaggtgacaagattaccgagcggatatggcctcgcatatcgtctaacacccggtgtgcacgaactgcctgtgcagcagcctgagcatcggatattaaaagtaagtatgaaggagcttaacaaaaaaacaccactcctgaccgagggccaggctatatgctttacaattctcggagtcctgaccagcctcgtcgtcctgggcactgtgggaattgttttcttgaataagtgtgagacgtgggtgtcaaacctccggtataaccacatgttgcgtaagaaaaagaaccttcttttacagtacaattcgggggaagatctagcggtaaatataatctttccggaaaaaatcgatatgaccacctttagtaaagaagccggcgacgaagagatctag

SEQ ID NO: 141188 - DNA, 1152 bp, Artificial Sequence
  derived and/or modified sequence
atgacagccacagaggccctgctgcgggtgctgctgctgctgctggccttcggccacagcacctacggggctgagtgcttccctgcctgcaacccccagaatggcttctgtgaagatgacaacgtgtgccgctgccagcccggctggcagggccccctgtgtgaccagtgtgtgaccagccctggctgcctgcacggcctgtgtggggagcccggccagtgcatctgcacagatggctgggatggagagctgtgtgacagagatgtgcgggcctgcagcagcgccccctgtgccaacaacagaacctgtgtgtccctggatgatggcctgtatgagtgcagctgtgcccctggctacagcggcaaggactgccagaagaaggatggcccctgtgtgatcaatggcagcccctgccagcacggcggcacctgtgtggatgatgagggccgggccagccacgccagctgcctgtgccccccaggcttcagcggcaacttctgtgaaattgtggccaacagctgcacccccaacccctgtgaaaatgatggagtgtgcacagacatcggcggggacttccgctgccgctgcccagctggcttcatcgacaagacctgcagcaggcctgtgaccaactgtgccagcagcccctgccagaatggaggcacctgcctgcagcacacccaggtgtcctatgagtgcctgtgcaagccagagttcaccggcctgacctgtgtgaagaagagggccctgagcccccagcaggtgacccggctgcccagcggctacggcctggcctaccgcctgaccccaggagtgcatgagctgcctgtgcagcagcctgagcaccgcatcctgaaggtgtccatgaaggagctgaacaagaagacccccctgctgacagagggccaggccatctgcttcaccatcctgggcgtgctgaccagcctggtggtgctgggcaccgtgggcatcgtgttcctgaacaagtgtgagacctgggtgagcaacctgcgctacaaccacatgctgaggaagaagaagaacctgctgctgcagtacaacagcggggaggacctggccgtgaacatcatcttccctgagaagattgacatgaccaccttcagcaaggaggccggagatgaggagatctag

SEQ ID NO: 141189 - DNA, 1152 bp, Artificial Sequence
  derived and/or modified sequence
atgaccgccaccgaggccctgctgcgggtgctgctgctgctgctggcttttggccatagcacatatggcgcagagtgcttccccgcttgcaatccccagaatggtttctgcgaggatgacaatgtatgccgatgccagccaggatggcagggtcctctctgcgaccagtgcgtgacatcacccgggtgcctccatggtctgtgtggggaacccgggcaatgcatttgcaccgacggttgggacggggaactctgcgacagagatgtgcgggcatgctcgagcgctccctgcgccaataatcgaacctgcgtctcattagatgacggtctgtatgaatgctcatgcgctcctggatacagcggcaaggattgtcaaaagaaagatggcccctgcgtgatcaacggctcaccttgtcagcatggtggaacttgcgttgacgatgaaggtagagcaagccatgctagctgcctgtgccccccaggcttcagcggaaatttctgtgaaattgtggccaactcgtgtacccccaatccatgcgagaatgatggtgtatgtacagatataggaggcgattttaggtgcagatgcccagcagggtttatagataagacttgtagccgccccgtgaccaattgcgcctctagcccgtgtcagaacggagggacctgtctccaacacactcaggttagttatgagtgtctgtgtaaacccgaattcactggactgacatgcgtgaagaaaagggctctgagtcctcagcaggtgactaggttacctagcggttacggtcttgcatatcgcctgacaccaggggttcatgagttgccggttcagcagcccgagcatcgtatcctgaaagtgtcaatgaaggagttgaataagaaaacacctctgcttactgagggacaggctatttgcttcaccatcctgggagtgcttacttctttggttgtcttggggaccgtcggcatcgtgttcctgaacaaatgcgaaacttgggtgtcgaatcttagatacaaccacatgctgcgcaaaaaaaagaacctcttactgcaatacaatagcggagaggatttggcagtgaacattattttcccggagaaaattgacatgaccactttttcaaaagaggcaggagacgaggaaatctag

SEQ ID NO: 141190 - DNA, 1152 bp, Artificial Sequence
  derived and/or modified sequence
atgactgcgaccgaagccctgttacgcgtgctgttgcttctgctggcctttgggcattctacatatggtgccgaatgttttcccgcatgcaacccccaaaatggattttgtgaggacgacaacgtttgtcggtgtcagcccggttggcagggacccctctgtgaccagtgtgtaactagtcccggttgcctgcatggattatgcggcgagcccggacagtgtatttgcactgacggatgggacggcgagctctgtgacagggacgtgagagcttgtagctctgcgccttgtgcgaataatcgaacctgcgtgtctctagatgatggtctgtacgagtgcagctgcgcccctgggtattctggaaaagattgccagaaaaaagacggaccttgcgtaattaacggatccccatgccagcacggtgggacttgcgtggacgacgagggtagggctagccatgcctcttgcctctgcccgccaggtttcagcggtaatttttgtgagatcgtggccaatagctgtactcctaacccttgcgagaacgatggtgtgtgcaccgatatcggcggagactttcggtgcagatgccccgcaggatttattgacaagacttgctctaggcccgtgactaattgcgctagctctccatgccagaacgggggtacgtgcctgcagcatacccaggtgtcgtacgagtgtctatgcaagccggagttcacagggcttacgtgcgttaagaagagagccctttccccccagcaagtgacaagactgccgtcgggctatggattagcctaccggttgacgcctggtgtgcacgagcttcctgttcagcaaccagagcaccgaatactgaaagtctccatgaaagaacttaacaaaaaaacgccactgctgactgagggtcaggccatatgcttcacaatcttgggtgttcttacctctctggtggtactggggactgtgggcatcgtattcctaaacaagtgtgagacgtgggtgagtaacctgagatacaaccacatgttgagaaagaaaaaaaacctgttgttgcaatacaatagtggagaagatctcgcagtaaacatcatctttcccgagaagatcgacatgacaaccttttccaaagaagctggggatgaggagatctag

SEQ ID NO: 141191 - DNA, 1152 bp, Artificial Sequence
  derived and/or modified sequence
atgaccgccaccgaggccctgctgagagtgctgctgctgctgctggccttcggccacagcacctacggcgccgagtgcttccccgcctgcaacccccagaacggcttctgcgaggacgacaacgtgtgcagatgccagcccggctggcagggccccctgtgcgaccagtgcgtgaccagccccggctgcctgcacggcctgtgcggcgagcccggccagtgcatctgcaccgacggctgggacggcgagctgtgcgacagagacgtgagagcctgcagcagcgccccctgcgccaacaacagaacctgcgtgagcctggacgacggcctgtacgagtgcagctgcgcccccggctacagcggcaaggactgccagaagaaggacggcccctgcgtgatcaacggcagcccctgccagcacggcggcacctgcgtggacgacgagggcagagccagccacgccagctgcctgtgcccccccggcttcagcggcaacttctgcgagatcgtggccaacagctgcacccccaacccctgcgagaacgacggcgtgtgcaccgacatcggcggcgacttcagatgcagatgccccgccggcttcatcgacaagacctgcagcagacccgtgaccaactgcgccagcagcccctgccagaacggcggcacctgcctgcagcacacccaggtgagctacgagtgcctgtgcaagcccgagttcaccggcctgacctgcgtgaagaagagagccctgagcccccagcaggtgaccagactgcccagcggctacggcctggcctacagactgacccccggcgtgcacgagctgcccgtgcagcagcccgagcacagaatcctgaaggtgagcatgaaggagctgaacaagaagacccccctgctgaccgagggccaggccatctgcttcaccatcctgggcgtgctgaccagcctggtggtgctgggcaccgtgggcatcgtgttcctgaacaagtgcgagacctgggtgagcaacctgagatacaaccacatgctgagaaagaagaagaacctgctgctgcagtacaacagcggcgaggacctggccgtgaacatcatcttccccgagaagatcgacatgaccaccttcagcaaggaggccggcgacgaggagatctag

SEQ ID NO: 141192 - DNA, 1700 bp, Artificial Sequence
  derived and/or modified sequence
ggggcggggggcgggggccgcgaggggggaggcggtacgaaaagggcggcgcgcgcggcggcggcggcagctccccggcagcggcggtggagagcgcagcgcgcagcccggtgcagccctggctttcccctcgctgcgcgcccgcgccccctttcgcgtccgcaaccagaagcccagtgcggcgccaggagccggacccgcgcccgcaccgctcccgggaccgcgaccccggccgcccagagatgaccgcgaccgaagccctcctgcgcgtcctcttgctcctgctggctttcggccacagcacctatggggctgaatgcttcccggcctgcaacccccaaaatggattctgcgaggatgacaatgtttgcaggtgccagcctggctggcagggtcccctttgtgaccagtgcgtgacctctcccggctgccttcacggactctgtggagaacccgggcagtgcatttgcaccgacggctgggacggggagctctgtgatagagatgttcgggcctgctcctcggccccctgtgccaacaacaggacctgcgtgagcctggacgatggcctctatgaatgctcctgtgcccccgggtactcgggaaaggactgccagaaaaaggacgggccctgtgtgatcaacggctccccctgccagcacggaggcacctgcgtggatgatgagggccgggcctcccatgcctcctgcctgtgcccccctggcttctcaggcaatttctgcgagatcgtggccaacagctgcacccccaacccatgcgagaacgacggcgtctgcactgacattgggggcgacttccgctgccggtgcccagccggcttcatcgacaagacctgcagccgcccggtgaccaactgcgccagcagcccgtgccagaacgggggcacctgcctgcagcacacccaggtgagctacgagtgtctgtgcaagcccgagttcacaggtctcacctgtgtcaagaagcgcgcgctgagcccccagcaggtcacccgtctgcccagcggctatgggctggcctaccgcctgacccctggggtgcacgagctgccggtgcagcagccggagcaccgcatcctgaaggtgtccatgaaagagctcaacaagaaaacccctctcctcaccgagggccaggccatctgcttcaccatcctgggcgtgctcaccagcctggtggtgctgggcactgtgggtatcgtcttcctcaacaagtgcgagacctgggtgtccaacctgcgctacaaccacatgctgcggaagaagaagaacctgctgcttcagtacaacagcggggaggacctggccgtcaacatcatcttccccgagaagatcgacatgaccaccttcagcaaggaggccggcgacgaggagatctaagcagcgttcccacagccccctctagattcttggagttccgcagagcttactatacgcggtctgtcctaatctttgtggtgttcgctatctcttgtgtcaaatctggtgaacgctacgcttacatatattgtctttgtgctgctgtgtgacaaacgcaatgcaaaaacaatcctctttctctctcttaatgcatgatacagaataataataagaatttcatctttaaatgagtaagagaaataagtatgttattctaaaatctaaactcaaatgaaatttcaaaaaagaccaaaaaaaaacaaggca

SEQ ID NO: 141193 - protein, 339 aa, Artificial Sequence
  derived and/or modified sequence
MTDRSPFETDMLTLTRYVMEKGRQAKGTGELTQLLNSMLTAIKAISSAVRKAGLAHLYGIAGSVNVTGDEVKKLDVLSNSLVINMVQSSYSTCVLVSEENKDAIITAKEKRGKYVVCFDPLDGSSNIDCLASIGTIFAIYRKTSEDEPSEKDALQCGRNIVAAGYALYGSATLVALSTGQGVDLFMLDPALGEFVLVEKDVKIKKKGKIYSLNEGYAKYFDAATTEYVQKKKFPEDGSAPYGARYVGSMVADVHRTLVYGGIFLYPANQKSPKGKLRLLYECNPVAYIIEQAGGLATTGTQPVLDVKPEAIHQRVPLILGSPEDVQEYLTCVQKNQAGS

SEQ ID NO: 141194 - DNA, 1305 bp, Artificial Sequence
  derived and/or modified sequence
gctgcagccctcagaagtaagcaaggtttcctgccgggagaaaaggatttgaagcattccagccaaaatgacggacagaagccccttcgaaaccgacatgctcaccctgacccgctacgttatggaaaaggggcgtcaggccaaagggactggggagctcacccagctgctgaactcaatgctgacggccatcaaagccatctcctcggctgtgcgcaaggccggtctggcccacctgtatggaatcgcaggaagcgttaacgtgacgggagatgaggtgaagaaactggatgtgctatccaattccctggtgatcaacatggtccaatcctcctatagtacctgcgtcctggtctcagaagagaataaggacgccatcatcaccgccaaggagaagcgggggaaatacgtggtctgctttgacccactggatggatcttccaatattgactgcctggcctccatcggaaccatctttgccatctatagaaagacctcagaggatgagccttctgaaaaggatgccctgcagtgtggccgcaatattgtggccgcaggttatgcgctgtacggtagtgcaaccctggtggctctctccacagggcaaggcgtggacctcttcatgcttgacccggctcttggtgaatttgtcctggtggaaaaagatgtcaagattaagaagaaaggaaagatttacagcctgaatgagggctatgccaagtattttgatgcggccaccactgaatatgtgcagaaaaagaaattccctgaggatggcagtgctccctatggggccaggtatgtgggctccatggtggctgacgtgcaccgcaccctggtctatggaggaatcttcctgtacccagccaaccagaagagccctaagggcaagctccggctcctgtatgaatgcaatcccgtggcctacatcattgagcaggcaggaggcttggcgaccacggggacccagcctgtactggacgtgaagcccgaggcaattcaccagcgagtccccctcattctggggtcaccagaggatgtgcaggaatatctcacctgtgtgcagaaaaatcaggcaggcagctagcgagtttgaccccacatgccctcttctgtttgtcttgcaccttgtctaaggaccctaaatgaacgataaacagagatggtagctatgagtatacaaaaggtaaatccacttaatcacatacagaagagcaacaacaaactgcttacgacaggtttggaagccacaggcgattctatggtcaatgtgaaggactagaaataaaaacccacatgtggaaa

SEQ ID NO: 141195 - DNA, 1020 bp, Artificial Sequence
  derived and/or modified sequence
atgacagaccgcagccccttcgaaactgatatgcttaccctgacccggtacgtgatggagaagggcaggcaggccaaaggcactggggaacttacacagctcctcaatagtatgttaacagccattaaggccatttctagtgccgttagaaaagccggcctcgctcatctgtatggcatcgccggctctgtgaatgtaacaggagatgaagttaagaagttagacgtcctgtctaattctctagtgatcaatatggtgcagtcctcatatagcacctgtgtgctggttagtgaagaaaacaaggatgctatcatcaccgctaaggagaagcgcggcaaatacgttgtttgcttcgatccgctcgacgggtcttctaatatcgattgtctggcatctattggtaccatcttcgccatctataggaagacaagtgaagatgagccatctgagaaagatgccttgcagtgtggtcgcaacatcgtagctgctgggtacgctctatatggatctgcaaccctggttgcactgtccaccggacagggcgtcgatctgttcatgcttgaccctgcactgggagagttcgtgttagtcgagaaggatgtgaagataaaaaagaagggtaagatctattcccttaatgagggctatgcaaagtatttcgacgccgcgaccactgagtacgttcaaaagaaaaagttccctgaagacggtagcgccccctacggcgcaaggtacgtggggtctatggtggctgatgttcaccgaacattagtgtacggcggcatatttttataccctgcaaatcaaaaaagccccaagggcaaactcaggctgctgtatgagtgcaatcctgtggcctatattatcgagcaggccggcggactcgctaccacagggacccaacctgtgttggatgtgaaacccgaggcgatacatcagagagtgccccttattctgggctccccagaggacgttcaggaatacctgacatgcgtgcagaagaaccaggctgggtcgtag

SEQ ID NO: 141196 - DNA, 1020 bp, Artificial Sequence
  derived and/or modified sequence
atgacagacaggagcccctttgaaacagacatgctgaccctgaccaggtatgtgatggagaagggccggcaggccaagggcaccggggagctgacccagctgctgaacagcatgctgacagccatcaaggccatcagcagcgctgtgaggaaggccggcctggcccacctgtatggaattgctggctctgtgaatgtgactggagatgaggtgaagaagctggatgtgctgagcaacagcctggtgatcaacatggtgcagagcagctacagcacctgtgtgctggtgtctgaggagaacaaggatgccatcatcacagccaaggagaagaggggcaagtatgtggtgtgctttgaccccctggatggcagcagcaacatcgactgcctggccagcatcggcaccatctttgccatctacaggaagaccagtgaagatgagcccagcgagaaggatgccctgcagtgtggcaggaacatcgtggccgccggctacgccctgtatggcagcgccaccctggtggccctgagcacaggccagggcgtggacctcttcatgctggaccctgccctgggggagtttgtgctggtggagaaggatgtgaagatcaagaagaagggcaagatctacagcctgaatgaaggctacgccaagtactttgatgctgccaccacagaatatgtgcagaagaagaagttcccagaagatggcagcgccccctatggagcccgctacgtgggctccatggtggctgatgtgcacaggaccctggtgtatggaggcatcttcctgtacccagccaaccagaagagccccaagggcaagctgcggctgctgtatgagtgcaaccctgtggcctacatcatcgagcaggccggcggcctggccaccaccggcacccagcctgtgctggatgtgaagccagaggccatccaccagagggtgcccctcatcctgggcagcccagaagatgtgcaggagtacctgacctgtgtgcagaagaaccaggccggcagctag

SEQ ID NO: 141197 - DNA, 1020 bp, Artificial Sequence
  derived and/or modified sequence
atgaccgaccggagccccttcgagaccgacatgctgaccctgaccaggtacgtgatggaaaaaggtcggcaggctaagggcaccggcgagctgacccagctgcttaattccatgttaaccgccattaaggctatctctagtgccgtgaggaaagccggattggcccacttatacgggattgcaggctccgttaacgttaccggcgacgaagtgaaaaaactggatgtcctgagcaatagtctggtgatcaacatggtgcagagcagttatagcacctgcgtcctagtgtcagaggaaaataaagatgctattatcaccgcaaaggaaaagaggggcaagtatgtggtgtgcttcgacccactcgatgggagctcaaatattgattgcctggcatctatcggcaccatatttgcaatttatagaaaaactagcgaggacgagcctagcgagaaggatgccctgcagtgtgggcgcaacattgtcgcagctgggtacgccctatatggatcagccacactggtcgccctctccactggacaaggggtggatttattcatgctggaccccgcccttggcgagttcgtgctggtggaaaaggacgtaaagattaagaagaaaggcaagatctactctctgaacgaggggtatgctaagtatttcgacgccgcaaccacagagtatgtgcaaaaaaagaagttccctgaagatggctccgcaccttatggcgcgaggtatgttggctcaatggtggccgatgtgcacagaaccttagtctacggaggcatcttcctttatccagcaaaccagaagtcaccgaagggaaagctcagattactgtacgaatgtaatcccgtggcgtatattatcgaacaggccgggggcctggctacaaccggaacgcagcccgttctggacgttaaacctgaggccattcatcagcgcgttcctctcattctcgggtcccctgaggacgtgcaagaatacctgacgtgcgtccagaaaaatcaggctgggtcatag

SEQ ID NO: 141198 - DNA, 1020 bp, Artificial Sequence
  derived and/or modified sequence
atgacagacagatctccctttgagaccgatatgctgactttaacacgatatgtcatggagaaaggcaggcaggcaaaggggacaggcgagctgacccagctgctgaacagcatgctaacggcgattaaagccatcagcagtgccgtgcggaaagcaggattggcacatttatacggcatagccggatctgtcaatgttacaggggatgaggtgaagaagctagatgtcctctctaatagcctggttatcaatatggtgcagtcgtcctactccacctgcgtgcttgtgtccgaggaaaataaggacgccatcataaccgctaaggaaaagaggggcaagtacgtggtgtgttttgatccactcgatggatcttccaacatcgactgtcttgctagtatcgggacaatcttcgccatttacaggaaaacaagcgaggatgaacctagtgaaaaggatgccttacaatgcggacgcaacatcgtagcagctgggtatgcactgtacggcagcgcaactttggtggccctgtctactggacagggcgtcgacctatttatgctcgacccagctctaggagagttcgtacttgtggagaaagacgtgaaaatcaagaagaagggcaaaatttattctctaaatgaaggatacgcaaagtacttcgatgcagctactaccgaatatgtgcagaaaaagaaattcccagaggacggttctgctccttatggagcaaggtacgtgggctcaatggtggccgatgtgcaccgaaccttggtgtatggcggtatattcttatatcccgcaaatcagaagtcgccgaaaggcaaattacggctactgtacgaatgtaaccctgtagcatacattatcgagcaagccggtggcttggcgactacaggcactcagcccgttctcgatgtgaagccagaggctattcatcagcgtgttcctctgatcctgggatcccccgaagacgtacaggaatacctcacgtgcgtccaaaagaatcaagcagggtcctag

SEQ ID NO: 141199 - DNA, 1020 bp, Artificial Sequence
  derived and/or modified sequence
atgaccgacagaagccccttcgagaccgacatgctgaccctgaccagatacgtgatggagaagggcagacaggccaagggcaccggcgagctgacccagctgctgaacagcatgctgaccgccatcaaggccatcagcagcgccgtgagaaaggccggcctggcccacctgtacggcatcgccggcagcgtgaacgtgaccggcgacgaggtgaagaagctggacgtgctgagcaacagcctggtgatcaacatggtgcagagcagctacagcacctgcgtgctggtgagcgaggagaacaaggacgccatcatcaccgccaaggagaagagaggcaagtacgtggtgtgcttcgaccccctggacggcagcagcaacatcgactgcctggccagcatcggcaccatcttcgccatctacagaaagaccagcgaggacgagcccagcgagaaggacgccctgcagtgcggcagaaacatcgtggccgccggctacgccctgtacggcagcgccaccctggtggccctgagcaccggccagggcgtggacctgttcatgctggaccccgccctgggcgagttcgtgctggtggagaaggacgtgaagatcaagaagaagggcaagatctacagcctgaacgagggctacgccaagtacttcgacgccgccaccaccgagtacgtgcagaagaagaagttccccgaggacggcagcgccccctacggcgccagatacgtgggcagcatggtggccgacgtgcacagaaccctggtgtacggcggcatcttcctgtaccccgccaaccagaagagccccaagggcaagctgagactgctgtacgagtgcaaccccgtggcctacatcatcgagcaggccggcggcctggccaccaccggcacccagcccgtgctggacgtgaagcccgaggccatccaccagagagtgcccctgatcctgggcagccccgaggacgtgcaggagtacctgacctgcgtgcagaagaaccaggccggcagctag

SEQ ID NO: 141200 - protein, 616 aa, Artificial Sequence
  derived and/or modified sequence
MAPRARRRRPLFALLLLCALLARLQVALQIAPPCTSEKHYEHLGRCCNKCEPGKYMSSKCTTTSDSVCLPCGPDEYLDSWNEEDKCLLHKVCDTGKALVAVVAGNSTTPRRCACTAGYHWSQDCECCRRNTECAPGLGAQHPLQLNKDTVCKPCLAGYFSDAFSSTDKCRPWTNCTFLGKRVEHHGTEKSDAVCSSSLPARKPPNEPHVYLPGLIILLLFASVALVAAIIFGVCYRKKGKALTANLWHWINEACGRLSGDKESSGDSCVSTHTANFGQQGACEGVLLLTLEEKTFPEDMCYPDQGGVCQGTCVGGGPYAQGEDARMLSLVSKTEIEEDSFRQMPTEDEYMDRPSQPTDQLLFLTEPGSKSTPPFSEPLEVGENDSLSQCFTGTQSTVGSESCNCTEPLCRTDWTPMSSENYLQKEVDSGHCPHWAASPSPNWADVCTGCRNPPGEDCEPLVGSPKRGPLPQCAYGMGLPPEEEASRTEARDQPEDGADGRLPSSARAGAGSGSSPGGQSPASGNVTGNSNSTFISSGQVMNFKGDIIVVYVSQTSQEGAAAAAEPMGRPVQEETLARRDSFAGNGPRFPDPCGGPEGLREPEKASRPVQEQGGAKA

SEQ ID NO: 141201 - DNA, 1851 bp, Artificial Sequence
  derived and/or modified sequence
atggcccccagagccagaagaagaagacccctgttcgccctgctgctgctgtgcgccctgctggccagactgcaggtggccctgcagatcgcccccccctgcaccagcgagaagcactacgagcacctgggcagatgctgcaacaagtgcgagcccggcaagtacatgagcagcaagtgcaccaccaccagcgacagcgtgtgcctgccctgcggccccgacgagtacctggacagctggaacgaggaggacaagtgcctgctgcacaaggtgtgcgacaccggcaaggccctggtggccgtggtggccggcaacagcaccacccccagaagatgcgcctgcaccgccggctaccactggagccaggactgcgagtgctgcagaagaaacaccgagtgcgcccccggcctgggcgcccagcaccccctgcagctgaacaaggacaccgtgtgcaagccctgcctggccggctacttcagcgacgccttcagcagcaccgacaagtgcagaccctggaccaactgcaccttcctgggcaagagagtggagcaccacggcaccgagaagagcgacgccgtgtgcagcagcagcctgcccgccagaaagccccccaacgagccccacgtgtacctgcccggcctgatcatcctgctgctgttcgccagcgtggccctggtggccgccatcatcttcggcgtgtgctacagaaagaagggcaaggccctgaccgccaacctgtggcactggatcaacgaggcctgcggcagactgagcggcgacaaggagagcagcggcgacagctgcgtgagcacccacaccgccaacttcggccagcagggcgcctgcgagggcgtgctgctgctgaccctggaggagaagaccttccccgaggacatgtgctaccccgaccagggcggcgtgtgccagggcacctgcgtgggcggcggcccctacgcccagggcgaggacgccagaatgctgagcctggtgagcaagaccgagatcgaggaggacagcttcagacagatgcccaccgaggacgagtacatggacagacccagccagcccaccgaccagctgctgttcctgaccgagcccggcagcaagagcaccccccccttcagcgagcccctggaggtgggcgagaacgacagcctgagccagtgcttcaccggcacccagagcaccgtgggcagcgagagctgcaactgcaccgagcccctgtgcagaaccgactggacccccatgagcagcgagaactacctgcagaaggaggtggacagcggccactgcccccactgggccgccagccccagccccaactgggccgacgtgtgcaccggctgcagaaacccccccggcgaggactgcgagcccctggtgggcagccccaagagaggccccctgccccagtgcgcctacggcatgggcctgccccccgaggaggaggccagcagaaccgaggccagagaccagcccgaggacggcgccgacggcagactgcccagcagcgccagagccggcgccggcagcggcagcagccccggcggccagagccccgccagcggcaacgtgaccggcaacagcaacagcaccttcatcagcagcggccaggtgatgaacttcaagggcgacatcatcgtggtgtacgtgagccagaccagccaggagggcgccgccgccgccgccgagcccatgggcagacccgtgcaggaggagaccctggccagaagagacagcttcgccggcaacggccccagattccccgacccctgcggcggccccgagggcctgagagagcccgagaaggccagcagacccgtgcaggagcagggcggcgccaaggcctag

SEQ ID NO: 141202 - DNA, 1851 bp, Artificial Sequence
  derived and/or modified sequence
atggcccccagggcccgcagaagaaggcctctctttgccctgctgctgctctgtgctctgttggctaggttgcaggtggcactgcaaatcgccccaccctgcactagtgagaaacactatgagcatctcggacgctgctgcaacaaatgtgagcccggcaaatacatgtcctccaagtgtactactacttccgattccgtctgccttccttgtgggccagacgaatacctggacagttggaatgaggaagacaaatgccttttgcacaaggtgtgcgacactggtaaggccctggtggctgtagtggctggaaattccaccacacccaggcggtgtgcgtgcactgcagggtaccattggtcacaggactgtgaatgttgccgccgcaacacggaatgtgcccctggattgggggcccaacaccctctgcagttaaacaaggataccgtgtgcaagccatgcctggccggatacttttccgatgctttctcctccactgataagtgccggccatggacaaattgtacattcctggggaagagagttgaacaccacggcaccgaaaaaagcgatgccgtttgttcctcttccctgcctgctcgcaaaccacccaacgagccacatgtttacctgcctggtctcatcattctcttactctttgcctccgtggccctggtggccgctattatattcggcgtttgttataggaaaaagggcaaggcactgactgccaacctctggcactggatcaacgaagcctgtggcagacttagcggcgacaaggaatcctctggagattcttgcgtgagcacccacactgccaacttcggacaacaaggcgcatgtgaaggcgtgctcctgcttaccctggaagagaaaaccttccctgaagatatgtgttaccccgatcagggtggagtgtgccagggcacatgcgtcgggggaggtccctatgctcaaggtgaggacgctaggatgcttagcctggtttccaagacagagatagaagaggactctttcagacagatgccgaccgaagatgaatacatggatcgacctagccagcccacagatcagctcctctttttaacagagcccggctccaagtccacaccaccattctcggagcccttggaagtaggagaaaacgacagcctctctcaatgctttactgggactcagtcgacggttggatccgaatcttgtaattgcaccgagcctctttgtaggactgactggactcccatgagctcagagaactacctccagaaagaagtagattctgggcactgcccacattgggccgcctcgcctagccccaactgggccgatgtgtgtacaggatgcaggaaccctcccggggaggactgtgaacccctggtgggttccccaaagagaggccccctgccacagtgcgcttacggcatggggttgcccccagaggaagaggcttctcggaccgaggccagagatcagccggaagatggagccgacggacgcctgccttcttctgccagggccggagcaggctcgggttccagccctggcggccagagtccagcttcaggtaacgttacgggtaactccaacagcacttttatttcctcaggccaggtaatgaatttcaaaggcgatattatcgtggtgtacgtttcccaaaccagccaggagggcgcagccgcagctgcagagccgatgggtagacccgtgcaggaggaaacgctggcaaggagagacagtttcgccggaaacgggcccagattccccgatccatgtggaggtcccgagggactgcgcgagccagagaaagcgtcaaggccagtgcaggaacagggaggagccaaggcctag

SEQ ID NO: 141203 - DNA, 1851 bp, Artificial Sequence
  derived and/or modified sequence
atggcccctcgcgcaaggagacgacgaccccttttcgcgttgctcttattatgcgcccttctggcccggctgcaggttgccctacagatcgcccccccgtgtacctcagaaaagcactatgagcacctgggtagatgttgtaacaaatgcgaaccaggaaagtacatgtcgagcaaatgtaccactacttctgatagcgtgtgtctcccctgtggccctgacgagtacctggattcctggaatgaggaagacaagtgtttactccacaaggtgtgcgataccggtaaagcgctggtggctgtcgtggccggaaactccacaacccctaggcggtgtgcctgcaccgcaggttatcattggagtcaagattgtgaatgctgccgacgcaacacagagtgcgctcccggactgggggcccaacaccctctgcagcttaacaaggacacagtgtgcaagccttgcctcgctggctatttttccgacgccttttcgtctaccgacaaatgtcgcccatggaccaactgtacctttttgggcaagcgggtcgagcaccacgggacagaaaagtctgatgcggtgtgtagcagctctcttccagcccgaaagccaccaaacgaaccacatgtgtatctgcccggcctcataatcctgctgctgtttgcaagtgtcgccctcgtggcggcaataatcttcggagtgtgttacagaaagaagggaaaggccttaactgccaatctctggcactggatcaatgaagcatgcggaaggttgtcaggcgacaaagagtcttctggtgattcatgcgtttccactcacaccgctaacttcggtcagcagggagcatgcgagggtgtgctgttgctcacactggaggagaaaacattccccgaggatatgtgctacccagatcaggggggtgtctgccagggcacctgtgtagggggcggaccatatgctcagggcgaagacgccaggatgttgagcctggtgagcaagacggagatcgaagaggattccttcagacagatgcctacagaggatgaatatatggacagaccttcccaaccgacagatcagctgttgttcctgacagagcccggatctaaatctacccctccttttagcgaacctctggaagtcggggagaacgatagtctgtcccagtgcttcacaggaacccagtccaccgtgggcagcgagtcctgtaattgtaccgaaccactctgccggactgattggacacctatgtcctccgaaaactacttgcaaaaggaggtagatagtggccattgcccccattgggctgcctctccttctccgaactgggctgatgtttgcaccggttgtaggaatcctcctggtgaggattgcgagccgctggtgggctcccctaaacgcggccctctgcctcagtgcgcatacgggatgggtttgcccccagaagaggaggcctcacggacagaagccagagatcagcccgaggatggagctgatggaaggctcccatcaagcgcccgggcgggggccggcagcgggtcctctccaggtggccaaagcccagcaagtggaaatgtgaccggtaatagcaactcgacttttatatccagtggtcaggttatgaactttaagggcgacattatcgtcgtctatgttagccaaactagtcaggagggagctgccgccgccgcggaaccaatgggtagaccagttcaggaagagacactggcccggcgagattcatttgccgggaacggtcccaggttcccggatccttgtgggggccctgaggggttgagagagcccgaaaaggcatctaggcccgttcaggagcagggaggcgccaaggcctag

SEQ ID NO: 141204 - DNA, 1851 bp, Artificial Sequence
  derived and/or modified sequence
atggccccccgggccaggagaagaagacccctgtttgccctgctgctgctgtgtgccctgctggcccggctgcaggtggccctgcagatcgccccaccctgcaccagcgagaagcactatgagcacctgggccgctgctgcaacaagtgtgagcccgggaagtacatgagcagcaagtgcaccaccaccagtgacagcgtgtgcctgccctgtggcccagatgagtacctggacagctggaatgaggaggacaagtgcctgctgcacaaggtgtgtgacaccgggaaggccctggtggccgtggtggccggcaacagcaccaccccccggcgctgtgcctgcacagctggctaccactggagccaggactgtgagtgctgcagaagaaacacagaatgtgcccctggcctgggcgcccagcaccccctgcagctgaacaaggacacagtgtgcaagccctgcctggccggctacttcagtgatgccttcagcagcacagacaagtgccggccctggaccaactgcaccttcctgggcaagagggtggagcaccacggcacagagaagagtgatgctgtgtgcagcagcagcctgcctgccaggaagcccccaaatgagccccacgtgtacctgcccggcctcatcatcctgctgctgtttgcctctgtggccctggtggccgccatcatctttggagtgtgctacaggaagaagggcaaggccctgacagccaacctgtggcactggatcaatgaggcctgtggccgcctgagcggggacaaggagagcagcggggacagctgtgtgtccacccacacagccaactttggccagcagggcgcctgtgagggcgtgctgctgctgaccctggaggagaagaccttccctgaggacatgtgctacccagaccagggcggcgtgtgccagggcacctgtgtgggcggcggcccctatgcccagggagaagatgccaggatgctgagcctggtgtccaagacagaaattgaagaagattccttccggcagatgcccacagaagatgagtacatggaccggcccagccagcccacagaccagctgctcttcctgacagagcccggcagcaagagcaccccacccttcagcgagcccctggaggtgggggagaatgacagcctgagccagtgcttcaccggcacccagagcacagtgggcagcgagagctgcaactgcacagagcccctgtgcaggacagactggacccccatgagcagcgagaactacctgcagaaggaggtggacagcggccactgcccccactgggccgccagccccagccccaactgggcagatgtgtgcaccggctgcaggaaccccccaggagaggactgtgagcccctggtgggcagccccaagaggggccccctgccccagtgtgcctacggcatgggcctgcccccagaggaggaggccagcaggacagaggcccgggaccagccagaagatggagcagatggccgcctgcccagcagcgcccgggccggggccggcagcggcagcagccctgggggccagagccctgccagcggaaatgtgacaggcaacagcaacagcaccttcatcagcagcggccaggtgatgaacttcaagggggacatcatcgtggtgtatgtgtcccagaccagccaggagggcgctgctgctgctgctgagcccatgggccggcctgtgcaggaggagaccctggcccggcgggacagctttgctggaaatggcccccgcttcccagacccctgtggcggccctgagggcctgcgggagcctgagaaggccagcaggcctgtgcaggagcagggcggggccaaggcctag

SEQ ID NO: 141205 - DNA, 1851 bp, Artificial Sequence
  derived and/or modified sequence
atggccccccgggcccggcggcggcggcccctgttcgccctgctgctgctctgcgccttattggcccgactccaggttgcgttgcaaatcgcaccaccctgcacttcggaaaagcactacgagcacctcggacggtgctgcaacaagtgcgagccaggcaagtacatgtcaagcaagtgtacaacgaccagcgatagtgtgtgcctgccctgtgggccagatgaatatctggatagttggaatgaggaggataagtgcctgctgcataaggtgtgtgacaccggcaaagcactggtggcggtcgtcgcaggaaacagcaccacccctaggaggtgtgcttgcactgcgggttaccattggtcccaggactgcgaatgctgccgccggaacaccgagtgtgcccctgggctgggagctcagcatccactgcagctcaacaaggataccgtgtgtaagccctgcctggccggttacttttccgacgccttttctagcactgacaagtgtagaccatggaccaactgcacattcctggggaagagggtcgaacatcatggaaccgagaagagtgacgccgtctgcagctccagccttccagctcgcaaacctcctaatgagccccacgtttatctgcctggcttgatcatcctgttactctttgcctctgtagcattggtcgctgccattatcttcggcgtttgttaccgaaaaaaggggaaggccttaactgccaacctctggcactggatcaatgaggcttgtggacggttaagcggagacaaggagtcctccggggactcttgtgtgtcgactcacacggcaaattttggacaacaaggcgcatgtgagggtgtgttgctcctgacccttgaagagaaaactttccccgaagatatgtgttatccagaccagggtggtgtgtgccagggaacttgcgtgggaggcggcccttatgcccagggcgaggacgctcgtatgctgtcacttgtgagtaaaaccgagatagaggaagattcttttaggcagatgccaaccgaagacgaatacatggatcggccttctcaacccacagatcagctgcttttcctgaccgaacccggttctaaatcaacgcccccattttctgaacccctggaggtgggggagaacgatagcctgtcccagtgcttcaccggtactcagtctaccgtggggagcgaatcatgcaactgcactgaacccctctgtagaaccgactggacgcccatgagcagtgaaaactatctccagaaagaagtcgactccggccactgtccacattgggccgcgtccccatcaccgaactgggccgatgtttgcaccgggtgtcgtaacccccccggcgaggattgtgaacctctggtcggaagcccgaagagaggacctcttcctcagtgcgcctatggcatggggttgccacctgaagaggaagcctcaaggacagaggccagggaccagcctgaggatggggctgacggtagactgccctcctctgcccgggcaggggccggatccggtagttccccgggaggacagagtcctgcctctggaaacgtgacgggaaatagtaattctacgttcatctcttccggacaggtgatgaacttcaagggcgatatcatagtagtgtatgttagtcagacctcccaggagggggccgccgccgcagccgaacctatgggccggccagtgcaggaggagactctcgcccgacgcgactcttttgctggtaatggtcctcgttttcccgatccatgcgggggccccgagggattgcgggagcctgaaaaagccagcagaccagttcaggagcagggtggagcaaaggcgtag

SEQ ID NO: 141206 - DNA, 1851 bp, Artificial Sequence
  derived and/or modified sequence
atggccccccgggcccggcggcggcggcccctgttcgccctgctgctgctctgcgccctattggcaaggttgcaggtagccctgcagatagcaccgccatgcactagcgagaaacattacgaacacctcggcaggtgttgcaacaagtgtgaacccgggaagtacatgtcaagcaaatgtactactaccagtgattccgtctgtttgccatgcggtcccgacgaatatctggactcttggaatgaagaagataagtgccttctgcataaagtttgtgataccggaaaagcactggtggccgtggtggctggcaatagtacaaccccgaggcgatgcgcctgtaccgccgggtaccattggagccaggattgcgaatgttgtagaaggaacacggagtgtgccccgggtctgggagcgcagcatcctctccagcttaataaggatactgtgtgcaaaccgtgccttgctggatacttttctgatgctttttcctcaacagataaatgtcggccttggaccaactgcacgtttctcggcaaacgagtcgagcaccacggaactgagaagtcagatgctgtctgctcatcaagcttgccagctaggaaacctccaaacgaaccacatgtgtacctccccggcctcatcattctgttgttatttgcgagcgtcgcactggtcgccgccattatcttcggagtgtgttatcggaagaagggcaaggcattaactgctaacctctggcactggattaatgaggcttgtggtcgcctctcaggcgacaaagagtcgagcggggactcctgtgtttccacccacactgccaactttggacagcaaggggcttgtgagggcgttctgctgttgactctggaagagaaaaccttccctgaagatatgtgttacccagaccagggtggagtgtgccagggaacctgcgtggggggaggtccatacgcgcagggggaagatgcaaggatgttgagcctggtgtccaagaccgagattgaggaagactctttccgacagatgcctacagaggacgaatacatggatcgcccgtcacagcctactgaccagttgctgttcctgaccgagcctggaagcaagagcaccccgcctttttctgaaccactcgaggtgggagaaaacgacagcctctcccagtgtttcaccggtacccagagtactgtcggcagcgaaagttgcaactgcaccgaacccctttgccgcaccgactggacccctatgtcttctgaaaattacctccagaaagaagtcgatagcggacactgcccccactgggcggcaagtccgagtcccaattgggcagacgtgtgcactgggtgtcgtaacccacccggggaggactgtgaacctctcgtaggcagtccaaagcgcggaccattaccacagtgcgcttatggcatggggttgccccctgaggaggaggctagtcggaccgaagcacgtgaccagcctgaggacggagccgatggcaggttgcccagcagtgctcgagctggcgcaggatctggatcctcaccaggcggccaatcacctgctagtgggaatgtgacgggtaacagtaacagcacgttcattagctccggccaggttatgaatttcaagggtgacatcattgtggtgtacgttagccagacgagtcaagaaggcgctgctgcagcagctgagcccatgggacgtcctgtgcaggaggagactctcgctagaagagacagtttcgctggaaacggaccccggttccccgatccttgcggcggccctgagggcctgcgagagcctgagaaggcctctcgccctgtgcaggagcagggcggggcaaaagcatag

SEQ ID NO: 141207 - DNA, 1851 bp, Artificial Sequence
  derived and/or modified sequence
atggcccctagagctcgtcgtcggagaccactctttgcactgcttctcctgtgtgcgttacttgctagattgcaggtcgccctccagatagctcctccctgtactagcgagaaacactacgagcatctgggcaggtgttgtaacaaatgtgagcccggaaaatatatgagttccaaatgcactacgacctcagatagtgtgtgtctcccatgtgggccagatgaataccttgactcatggaatgaggaggataagtgtctcttgcacaaagtttgtgacactggaaaagcacttgtcgccgttgtggccggaaacagcacaactccacgtagatgtgcttgcacagcaggataccactggagccaggattgcgagtgctgccgcagaaacacagagtgcgctcccggtctgggggctcagcaccctctacagctaaacaaagatactgtgtgcaaaccatgtctcgctgggtactttagcgatgctttctcctcgacagataagtgcagaccctggacaaactgcacgtttctgggaaagagagtagaacatcatggcaccgaaaaatctgacgctgtgtgttcttccagcttaccggctcgcaagcctcctaacgagccccacgtgtacttgcccggactgattatcctcctgctgttcgcgtctgtagccctggtcgcagccattattttcggcgtgtgctataggaaaaaaggcaaggctctgaccgccaatctgtggcactggatcaacgaggcatgtggacgcttgagcggcgataaggagtcgtccggcgactcctgtgttagcacacataccgccaatttcggccaacagggcgcatgcgagggggtgttactcctgaccctcgaagagaagaccttccccgaggatatgtgttatccagatcagggcggagtgtgccaggggacttgcgtgggcggtgggccttatgcacagggggaagacgctcgtatgttaagtctggtaagcaagacagagatcgaagaagactctttccgtcagatgcccaccgaggacgagtatatggaccgtccatcacaacccacagatcaactgctttttcttaccgagccgggatcgaagtccaccccccctttcagcgagccccttgaggtgggcgaaaacgactctctatcccagtgttttacgggaactcagtcgaccgttggcagcgagtcttgcaactgcaccgaaccactctgcagaacagattggaccccaatgtcttcagagaattatctgcagaaagaagtcgattctggacattgccctcattgggccgcatcccccagccccaattgggccgatgtgtgtactggatgtcgaaacccaccaggcgaagattgtgagcctttggtggggtccccaaaacgtgggccactcccccagtgtgcttacggcatggggttgccacctgaggaggaggcctcacgtacggaagcacgcgatcagccggaagatggtgccgatggcagactcccgagctcagctagggccggtgcaggatcgggctccagcccgggtggtcaaagcccagcctccgggaatgtcacggggaactccaactccaccttcattagttcaggtcaggtcatgaattttaagggagacatcatcgtggtctatgtaagtcaaacatcacaagagggtgccgcagcggctgcggagcctatgggccgtcctgtgcaagaggagaccctcgctcggagggatagcttcgctggcaatggcccaagattccccgatccctgcgggggtcctgaaggactgagggaaccagaaaaggcaagcaggccggtacaggagcagggcggtgccaaggcatag

SEQ ID NO: 141208 - DNA, 1851 bp, Artificial Sequence
  derived and/or modified sequence
atggccccacgggctcggaggcgaaggcctctgttcgcccttctgctactttgtgctcttttagccaggttacaggtggccctgcagatcgctcccccttgtaccagcgagaagcattacgaacacctgggacgctgctgcaataagtgtgaaccagggaagtacatgtctagcaaatgcacgacaacgtctgatagtgtgtgtttgccctgtggaccagatgaatatctcgacagttggaatgaagaggacaaatgtctgctacacaaggtgtgtgacacgggcaaggcccttgttgctgtcgtggctggcaactcaactacccccagacggtgtgcctgtacggccggataccattggagccaggactgcgagtgttgcaggcggaatacagagtgtgccccaggcctgggagcccagcatccccttcagctgaataaggacacagtgtgtaagccatgtttagccggatacttttccgacgcattcagcagtacagacaagtgtagaccatggaccaattgtacttttctgggcaaaagagtcgagcatcacggtacagagaaaagcgacgccgtgtgttcctcctcactgccagccagaaagccaccgaacgaacctcacgtgtatcttcctggcctaatcatattactgctgtttgcgtctgtggccctggtggctgcaattatctttggcgtgtgctatcgtaagaaagggaaggctttaactgctaatctgtggcattggattaacgaagcatgcgggaggctatccggggataaagagtcatctggcgattcctgtgtgtccacccacaccgccaatttcggacagcaaggtgcctgcgagggcgtgctgctcctcaccctagaggaaaaaacctttccagaagacatgtgttatcctgaccaaggcggtgtgtgtcagggaacttgcgtgggcggagggccatatgcgcaaggagaagacgcgcgtatgctatcacttgtgagcaaaacagaaatagaagaggacagttttaggcaaatgcctacggaggatgagtacatggacaggcctagccaaccgaccgaccagctactgttcctcacggagccgggttccaagagcaccccaccattctcagagcccctggaggtcggagagaatgactctctgtcgcaatgttttaccggaacgcagtcaacggtcgggtcagagagttgcaactgtactgagccactctgcaggaccgactggaccccaatgtcaagcgagaattatctccagaaggaggtggactccgggcactgtccccactgggctgcatctccgagcccaaattgggcggatgtttgtacggggtgccgaaatcctccaggggaggattgtgagcccttggtgggctcccctaaaagaggaccgttgccacaatgcgcctatgggatgggacttcccccagaagaggaagcctctagaaccgaagcgagggaccagccggaggacggcgctgatggcagactgccgtccagcgccagagctggcgcaggcagtggatccagcccaggtgggcagagtcccgcttctgggaacgtgactggaaatagcaacagcactttcatttcatccggtcaggttatgaactttaaaggagatatcatcgttgtgtacgtttcccagacatctcaggagggtgcggctgcagctgctgaacccatggggagacccgtacaggaagaaactttggccagacgcgattccttcgcgggaaatggccctcgcttcccagacccctgcggcggacccgagggactgagagagccagagaaagcctctaggcctgtgcaggagcagggaggtgcgaaagcatag

SEQ ID NO: 141209 - DNA, 8138 bp, Artificial Sequence
  derived and/or modified sequence
ccgctgaggccgcggcgcccgccagcctgtcccgcgccatggccccgcgcgcccggcggcgccgcccgctgttcgcgctgctgctgctctgcgcgctgctcgcccggctgcaggtggctttgcagatcgctcctccatgtaccagtgagaagcattatgagcatctgggacggtgctgtaacaaatgtgaaccaggaaagtacatgtcttctaaatgcactactacctctgacagtgtatgtctgccctgtggcccggatgaatacttggatagctggaatgaagaagataaatgcttgctgcataaagtttgtgatacaggcaaggccctggtggccgtggtcgccggcaacagcacgaccccccggcgctgcgcgtgcacggctgggtaccactggagccaggactgcgagtgctgccgccgcaacaccgagtgcgcgccgggcctgggcgcccagcacccgttgcagctcaacaaggacacagtgtgcaaaccttgccttgcaggctacttctctgatgccttttcctccacggacaaatgcagaccctggaccaactgtaccttccttggaaagagagtagaacatcatgggacagagaaatccgatgcggtttgcagttcttctctgccagctagaaaaccaccaaatgaaccccatgtttacttgcccggtttaataattctgcttctcttcgcgtctgtggccctggtggctgccatcatctttggcgtttgctataggaaaaaagggaaagcactcacagctaatttgtggcactggatcaatgaggcttgtggccgcctaagtggagataaggagtcctcaggtgacagttgtgtcagtacacacacggcaaactttggtcagcagggagcatgtgaaggtgtcttactgctgactctggaggagaagacatttccagaagatatgtgctacccagatcaaggtggtgtctgtcagggcacatgtgtaggaggtggtccctacgcacaaggcgaagatgccaggatgctctcattggtcagcaagaccgagatagaggaagacagcttcagacagatgcccacagaagatgaatacatggacaggccctcccagcccacagaccagttactgttcctcactgagcctggaagcaaatccacacctcctttctctgaacccctggaggtgggggagaatgacagtttaagccagtgcttcacggggacacagagcacagtgggttcagaaagctgcaactgcactgagcccctgtgcaggactgattggactcccatgtcctctgaaaactacttgcaaaaagaggtggacagtggccattgcccgcactgggcagccagccccagccccaactgggcagatgtctgcacaggctgccggaaccctcctggggaggactgtgaacccctcgtgggttccccaaaacgtggacccttgccccagtgcgcctatggcatgggccttccccctgaagaagaagccagcaggacggaggccagagaccagcccgaggatggggctgatgggaggctcccaagctcagcgagggcaggtgccgggtctggaagctcccctggtggccagtcccctgcatctggaaatgtgactggaaacagtaactccacgttcatctccagcgggcaggtgatgaacttcaagggcgacatcatcgtggtctacgtcagccagacctcgcaggagggcgcggcggcggctgcggagcccatgggccgcccggtgcaggaggagaccctggcgcgccgagactccttcgcggggaacggcccgcgcttcccggacccgtgcggcggccccgaggggctgcgggagccggagaaggcctcgaggccggtgcaggagcaaggcggggccaaggcttgagcgccccccatggctgggagcccgaagctcggagccagggctcgcgagggcagcaccgcagcctctgccccagccccggccacccagggatcgatcggtacagtcgaggaagaccacccggcattctctgcccactttgccttccaggaaatgggcttttcaggaagtgaattgatgaggactgtccccatgcccacggatgctcagcagcccgccgcactggggcagatgtctcccctgccactcctcaaactcgcagcagtaatttgtggcactatgacagctatttttatgactatcctgttctgtgggggggggggtctgttttccccccatatttgtattccttttcataacttttcttgatatctttcctccctcttttttaatgtaaaggttttctcaaaaattctcctaaaggtgagggtctctttcttttctcttttccttttttttttctttttttggcaacctggctctggcccaggctagagtgcagtggtgcgattatagcccggtgcagcctctaactcctgggctcaagcaatccaagtgatcctcccacctcaaccttcggagtagctgggatcacagctgcaggccacgcccagcttcctccccccgactccccccccagagacacggtcccaccatgttacccagcctggtctcaaactccccagctaaagcagtcctccagcctcggcctcccaaagtactgggattacaggcgtgagcccccacgctggcctgctttacgtattttcttttgtgcccctgctcacagtgttttagagatggctttcccagtgtgtgttcattgtaaacacttttgggaaagggctaaacatgtgaggcctggagatagttgctaagttgctaggaacatgtggtgggactttcatattctgaaaaatgttctatattctcatttttctaaaagaaagaaaaaaggaaacccgatttatttctcctgaatctttttaagtttgtgtcgttccttaagcagaactaagctcagtatgtgaccttacccgctaggtggttaatttatccatgctggcagaggcactcaggtacttggtaagcaaatttctaaaactccaagttgctgcagcttggcattcttcttattctagaggtctctctggaaaagatggagaaaatgaacaggacatggggctcctggaaagaaagggcccgggaagttcaaggaagaataaagttgaaattttaatttgcattttttttgtctagataagaatagcgtgaatagatcctcttttattcgtaaataatcgtgcatctgtgggttagccttgtagaagtggaaaacattccattttccaatgcatttaaatgtaaagccaaatctgcatgttgtgaatttaagaaaacttattatcctaaaggtgcctttctcttggcatcatcccgcttgtgagaagcctagaggacgctccaggtggaaggaaatcccctgggtggttttatcttttgttacccagtgagcactggttccccgcaaatactggggaaaagcaaaaatacacaagcaagttaaaattaattttgcacatctgggaggttataaaagaaagcactaatagtagtcactgcccagactttactggccacaaatgcccagctgaagagcatgactgtggatcactggtttttccctcctgctggaaatgctggggtggtagcggtcgattaggattttcagtggagaagcacaggacagttctgtaatttatgggactccttagccaacataaagaactgcaggaaataactgcacagccaggaggatccgttggtgggaatttaccgtcattcctgcccttttatttaacatcatccacagagagatgttatacaaatggaggaaaccattataccttttgatatggaatatattacagagttacagttcacaaagtagaatgctgagctgaaaacccgagtttctgctgtgactgtcatctcactgagcacttcgcttttctttgcttttattttttccttctataaaaaggcaataatgataatttataatagtttccctacccagagatattagaagtatgctacagtgaatgttaaagtaccttgagatccttaaatcaaaggtgctatatacataagtaagactctactttcagaaaaaggtaatattatttcctgcactgatccctactaattctatattgatccaaaggcaactcaatgctaaaaaatgtatagaaaatataagtctgtgtctgtgtactgtagagatgtatgtgacaagtgtaaacaaaatgaactgaagcagtaatgaacagttattagggggaacatgataaagagattatattaagcttatgtttcaccataaaatcctttttatggcttactaaaaccgagctcactgtaaaatcatgatccaacttattgctaatctttatgatatgcttattcctaatctttatggtatggtgtcaaccgttcatttgtatcttattgctcattccctggaccacagactagggacagaaaatacttgctttaataatatatatgctgttgatttcacaaaaatttattaaaatacagcctgggtacccagtgaaagagctgaaatggaaatggagtatcatgtttcctactcacattttactcagctgtcggaaggaagaatgaatttctcaagagcagtttgaatgtgttagatcagaaccttcatgtggtggggaaaatgggattatttcagtgtaacaaaccacccaaagacttagtggcttaaaatagtcaccattggccaggcacagcggttcatgcctcccagtgctttgggaggccaaggcaggaggatcacttgaggacagtagttagagatcaaactgggcaatggagtgagacctcgtctctacaaaaaatacaaaacttatctgggcacggtggtgtgcacctgcagtcctggctactcaggaggctgaggcaggaggatgcttgagtccaggagttcaaggttactgtgagctttgattgggtcagtgcactccagtgtaaaaaaacaaaaataaaaaccaccacttatttagctcccaattctatgggttggatcagcttgggtggttcttcaggcctggtccctcctggcctggtttgcttacccatttacaatgacccggctagttggccgggccaggctgtgtgctctccacctgtctcccatccttccagccacctagctgggcatgctctcatggtggtgtcgagcctgagaacaagcagaaacctgccaggcttcttgaggcctaggctctaactggcatgctgtcacttctgccacattctgtgggccaaagcaggtcacaaaggcagcccagatccaagggatgggggagcagcatatccccccatgggaagagttgcggaatgagagggtagggggtggacacacagaggggaagatggcccccttgccatctgtccaccacagggcactgcgtggagtaaaatgctgcagagaagagtgcattctgggaaaaaaagaggaacatatcccagcccctaaccagtgagtagctccttctctggtgattgaattcccttaatgcacagcactatagattcccacaatgaaagggacacccacgttcatatttaagtgctgtgtcaaaattctttccagagccaaatataggtgatttgggaattgagcctactgtactgcttccacattcctttggcacagaaaactgaaaagtcacaacttctaaaatcaagaaaactggtgagataccttggggtagagaaacctgcatataaacagataaaagatcgagtgttcacccttcacctcagctcaacaaacaaactcttgttacgattatacaagggtgagcttgagcaaaggtgctgtctttggtggaagaaacgtagttttgagttgtttgctctttgacagtctctgatggcatgtgagtctggtgcattgctgtgggctgcgctgggcacaagttgcataacccgcttttggaagaggagacaaagcattcaaagccctaaacactctgttggtgaatcatcatgtttattgagtgtgcttttagtggcagggccctgagcacctgggaaaggagatgaggagcgctggagggttcggagcagagaagacgagacaatgctctgctccaagcgccagaggaggcttctgggaaggggctgtctgtggaatttctgacccccagagccctgctggtgaagtcttgcaaccactaaagctttgccagagaagaggagggacctgacactgggcagtggcggtgccagcagtgagcacaggcggggtctaggtgggatcactgaagccaagccaagtggtgcagggggagccgccctggaccaacacccccatggctgccccactgcggaactgcctactgcggcaaaacaatcctatgtcccccaaggtttcaacaaagaggaggaccgaataaatgtcccagtgggcaggcacacccacaagacttgctgctcctcctgacccacccgcatggctctgcacagctgtgagtccagttttctctcttcctacctccctcttacccagttatcctgaccccagggtgaggttgaaactcatgctaggctaacatctctttccttcatcccattcataaaactggcatacaggaatgttttaaaaaaatctttaagattaccaggagtataaaagttaaaatgacaaaattacaggcctgttaccagatcttcgtactaaccaaggagctggtgacactaccctcttccctgtgtgatagaaaatgcagacgttttgcaggcagacctggttcatgactcagcgctgtgacttgtggacttatcttgtgcagctacatcacttcttagccttgttttcaacatgcgtaagcagaaggtactaatattagtctttagggctggtttgaggatgacgtgagatgagagacaaccaagcactcactggcagttcctagaagattccagtagtagagatctgactgtcctacactactttccctccctgtctctgacacttgttcattcctgggctcaggagccatctcagtcatcatgtcggaccacgtaactataaccaagctctgctgcccacctgggacaccttcccactctttgcaactaggtcggagggacgcaccttctccacagttgacaggactgttatggttgacccaaaagttgtcatcttctgacatgacacactgagggaagtagacttacccaatataacttcacattatactgtcttaaaagactatgattaaaatgggcatcagtgtaggcaacatgtagggcgcaaagaatagccagatgtgaaggttgaaaggctatgtgggctagtttgtcatggtattcctggtgcctctccccgtttgggaagaataacacattgaccaccggctcagaggaggtggcattataggtccaggccccttcaggagggcactggagtcaatgaaagcttttgctctcacccaggctcttggtttctcacgggcaggggtagcccaggaaacaaaggctgtatagactttaagtcgtgagaaaaacgacattcttatggtgaggctcttagagactgtctccatttaagcagcagcagtaaaacatcttaccctaaaatgaagaagcaaatccatttttattggcttttatagcctctctctttcaatgacaaagaaaccattaaaatgaatgtttaaagttcttagaagagctttctctaaatatttactctgtcagtggaaaaataaacattttttacatcgggtctattgagtttgttatatacagtaaaattcaccctttttagatatatagttttatgagttttaacaaaaatacatagttgtgtaaccaccaccatcacaatcaagatatagaatatttcaacatcccaaagttcccatttcccttttcagtcaatcccttccccactacccctagcccctggcaaccattatctgttctctcttcccatagtttcaccttttccaatttgtcgtgtagagttacacagctcatagccatttgagtctggcttctttccacataatgtccttgagatccatcggtgggtacaccagtagttccattttttttctgagtagtagtccattgtatggatgtactgcggtttattcaccaacatatgggttctttcctgtttggggagattacaaataaagctactat

SEQ ID NO: 141210 - DNA, 4521 bp, Artificial Sequence
  derived and/or modified sequence
ccgctgaggccgcggcgcccgccagcctgtcccgcgccatggccccgcgcgcccggcggcgccgcccgctgttcgcgctgctgctgctctgcgcgctgctcgcccggctgcaggtggctttgcagatcgctcctccatgtaccagtgagaagcattatgagcatctgggacggtgctgtaacaaatgtgaaccaggaaagtacatgtcttctaaatgcactactacctctgacagtgtatgtctgccctgtggcccggatgaatacttggatagctggaatgaagaagataaatgcttgctgcataaagtttgtgatacaggcaaggccctggtggccgtggtcgccggcaacagcacgaccccccggcgctgcgcgtgcacggctgggtaccactggagccaggactgcgagtgctgccgccgcaacaccgagtgcgcgccgggcctgggcgcccagcacccgttgcagctcaacaaggacacagtgtgcaaaccttgccttgcaggctacttctctgatgccttttcctccacggacaaatgcagaccctggaccaactgtaccttccttggaaagagagtagaacatcatgggacagagaaatccgatgcggtttgcagttcttctctgccagctagaaaaccaccaaatgaaccccatgtttacttgcccggtttaataattctgcttctcttcgcgtctgtggccctggtggctgccatcatctttggcgtttgctataggaaaaaagggaaagcactcacagctaatttgtggcactggatcaatgaggcttgtggccgcctaagtggagataaggagtcctcaggtgacagttgtgtcagtacacacacggcaaactttggtcagcagggagcatgtgaaggtgtcttactgctgactctggaggagaagacatttccagaagatatgtgctacccagatcaaggtggtgtctgtcagggcacatgtgtaggaggtggtccctacgcacaaggcgaagatgccaggatgctctcattggtcagcaagaccgagatagaggaagacagcttcagacagatgcccacagaagatgaatacatggacaggccctcccagcccacagaccagttactgttcctcactgagcctggaagcaaatccacacctcctttctctgaacccctggaggtgggggagaatgacagtttaagccagtgcttcacggggacacagagcacagtgggttcagaaagctgcaactgcactgagcccctgtgcaggactgattggactcccatgtcctctgaaaactacttgcaaaaagaggtggacagtggccattgcccgcactgggcagccagccccagccccaactgggcagatgtctgcacaggctgccggaaccctcctggggaggactgtgaacccctcgtgggttccccaaaacgtggacccttgccccagtgcgcctatggcatgggccttccccctgaagaagaagccagcaggacggaggccagagaccagcccgaggatggggctgatgggaggctcccaagctcagcgagggcaggtgccgggtctggaagctcccctggtggccagtcccctgcatctggaaatgtgactggaaacagtaactccacgttcatctccagcgggcaggtgatgaacttcaagggcgacatcatcgtggtctacgtcagccagacctcgcaggagggcgcggcggcggctgcggagcccatgggccgcccggtgcaggaggagaccctggcgcgccgagactccttcgcggggaacggcccgcgcttcccggacccgtgcggcggccccgaggggctgcgggagccggagaaggcctcgaggccggtgcaggagcaaggcggggccaaggcttgagcgccccccatggctgggagcccgaagctcggagccagggctcgcgagggcagcaccgcagcctctgccccagccccggccacccagggatcgatcggtacagtcgaggaagaccacccggcattctctgcccactttgccttccaggaaatgggcttttcaggaagtgaattgatgaggactgtccccatgcccacggatgctcagcagcccgccgcactggggcagatgtctcccctgccactcctcaaactcgcagcagtaatttgtggcactatgacagctatttttatgactatcctgttctgtgggggggggggtctgttttccccccatatttgtattccttttcataacttttcttgatatctttcctccctcttttttaatgtaaaggttttctcaaaaattctcctaaaggtgagggtctctttcttttctcttttccttttttttttctttttttggcaacctggctctggcccaggctagagtgcagtggtgcgattatagcccggtgcagcctctaactcctgggctcaagcaatccaagtgatcctcccacctcaaccttcggagtagctgggatcacagctgcaggccacgcccagcttcctccccccgactccccccccagagacacggtcccaccatgttacccagcctggtctcaaactccccagctaaagcagtcctccagcctcggcctcccaaagtactgggattacaggcgtgagcccccacgctggcctgctttacgtattttcttttgtgcccctgctcacagtgttttagagatggctttcccagtgtgtgttcattgtaaacacttttgggaaagggctaaacatgtgaggcctggagatagttgctaagttgctaggaacatgtggtgggactttcatattctgaaaaatgttctatattctcatttttctaaaagaaagaaaaaaggaaacccgatttatttctcctgaatctttttaagtttgtgtcgttccttaagcagaactaagctcagtatgtgaccttacccgctaggtggttaatttatccatgctggcagaggcactcaggtacttggtaagcaaatttctaaaactccaagttgctgcagcttggcattcttcttattctagaggtctctctggaaaagatggagaaaatgaacaggacatggggctcctggaaagaaagggcccgggaagttcaaggaagaataaagttgaaattttaatttgcattttttttgtctagataagaatagcgtgaatagatcctcttttattcgtaaataatcgtgcatctgtgggttagccttgtagaagtggaaaacattccattttccaatgcatttaaatgtaaagccaaatctgcatgttgtgaatttaagaaaacttattatcctaaaggtgcctttctcttggcatcatcccgcttgtgagaagcctagaggacgctccaggtggaaggaaatcccctgggtggttttatcttttgttacccagtgagcactggttccccgcaaatactggggaaaagcaaaaatacacaagcaagttaaaattaattttgcacatctgggaggttataaaagaaagcactaatagtagtcactgcccagactttactggccacaaatgcccagctgaagagcatgactgtggatcactggtttttccctcctgctggaaatgctggggtggtagcggtcgattaggattttcagtggagaagcacaggacagttctgtaatttatgggactccttagccaacataaagaactgcaggaaataactgcacagccaggaggatccgttggtgggaatttaccgtcattcctgcccttttatttaacatcatccacagagagatgttatacaaatggaggaaaccattataccttttgatatggaatatattacagagttacagttcacaaagtagaatgctgagctgaaaacccgagtttctgctgtgactgtcatctcactgagcacttcgcttttctttgcttttattttttccttctataaaaaggcaataatgataatttataatagtttccctacccagagatattagaagtatgctacagtgaatgttaaagtaccttgagatccttaaatcaaaggtgctatatacataagtaagactctactttcagaaaaaggtaatattatttcctgcactgatccctactaattctatattgatccaaaggcaactcaatgctaaaaaatgtatagaaaatataagtctgtgtctgtgtactgtagagatgtatgtgacaagtgtaaacaaaatgaactgaagcagtaatgaacagttattagggggaacatgataaagagattatattaagcttatgtttcaccataaaatcctttttatggcttactaaaaccgagctcactgtaaaatcatgatccaacttattgctaatctttatgatatgcttattcctaatctttatggtatggtgtcaaccgttcatttgtatcttattgctcattccctggaccacagactagggacagaaaatacttgctttaataatatatatgctgttgatttcacaaaaatttattaaaatacagcctgggtacccagtgaaagagctgaaatgga

SEQ ID NO: 141211 - protein, 386 aa, Artificial Sequence
  derived and/or modified sequence
MGLWGQSVPTASSARAGRYPGARTASGTRPWLLDPKILKFVVFIVAVLLPVRVDSATIPRQDEVPQQTVAPQQQRRSLKEEECPAGSHRSEYTGACNPCTEGVDYTIASNNLPSCLLCTVCKSGQTNKSSCTTTRDTVCQCEKGSFQDKNSPEMCRTCRTGCPRGMVKVSNCTPRSDIKCKNESAASSTGKTPAAEETVTTILGMLASPYHYLIIIVVLVIILAVVVVGFSCRKKFISYLKGICSGGGGGPERVHRVLFRRRSCPSRVPGAEDNARNETLSNRYLQPTQVSEQEIQGQELAELTGVTVELPEEPQRLLEQAEAEGCQRRRLLVPVNDADSADISTLLDASATLEEGHAKETIQDQLVGSEKLFYEEDEAGSATSCL

SEQ ID NO: 141212 - DNA, 1161 bp, Artificial Sequence
  derived and/or modified sequence
atgggcctgtggggccagagcgtgcccaccgccagcagcgccagagccggcagataccccggcgccagaaccgccagcggcaccagaccctggctgctggaccccaagatcctgaagttcgtggtgttcatcgtggccgtgctgctgcccgtgagagtggacagcgccaccatccccagacaggacgaggtgccccagcagaccgtggccccccagcagcagagaagaagcctgaaggaggaggagtgccccgccggcagccacagaagcgagtacaccggcgcctgcaacccctgcaccgagggcgtggactacaccatcgccagcaacaacctgcccagctgcctgctgtgcaccgtgtgcaagagcggccagaccaacaagagcagctgcaccaccaccagagacaccgtgtgccagtgcgagaagggcagcttccaggacaagaacagccccgagatgtgcagaacctgcagaaccggctgccccagaggcatggtgaaggtgagcaactgcacccccagaagcgacatcaagtgcaagaacgagagcgccgccagcagcaccggcaagacccccgccgccgaggagaccgtgaccaccatcctgggcatgctggccagcccctaccactacctgatcatcatcgtggtgctggtgatcatcctggccgtggtggtggtgggcttcagctgcagaaagaagttcatcagctacctgaagggcatctgcagcggcggcggcggcggccccgagagagtgcacagagtgctgttcagaagaagaagctgccccagcagagtgcccggcgccgaggacaacgccagaaacgagaccctgagcaacagatacctgcagcccacccaggtgagcgagcaggagatccagggccaggagctggccgagctgaccggcgtgaccgtggagctgcccgaggagccccagagactgctggagcaggccgaggccgagggctgccagagaagaagactgctggtgcccgtgaacgacgccgacagcgccgacatcagcaccctgctggacgccagcgccaccctggaggagggccacgccaaggagaccatccaggaccagctggtgggcagcgagaagctgttctacgaggaggacgaggccggcagcgccaccagctgcctgtag

SEQ ID NO: 141213 - DNA, 1161 bp, Artificial Sequence
  derived and/or modified sequence
atggggctgtggggtcaatcagtgcctaccgctagtagtgcaagggctggacggtatcctggagcccgaacagctagcggtactcgtccatggttgctggaccctaagatcctcaagtttgtggtgtttatagtggctgttcttctgccggtgagagttgactctgctactatcccgaggcaggacgaggtaccacagcagaccgtcgccccacaacagcagaggcgcagcctcaaagaggaagaatgccctgccggttcgcaccgtagtgagtatactggcgcctgtaatccatgtacagagggcgttgactacacaatcgcttctaacaatctgccctcctgcctcctttgtactgtttgtaaatcaggccagacaaataagtcttcttgcaccactactagagatactgtctgccagtgtgaaaaagggtcttttcaagacaagaactctccagagatgtgccgcacctgccgcactggctgcccgagggggatggtcaaagtatcaaactgtacccccagatccgatatcaagtgtaagaacgagagtgctgccagcagtacagggaaaacccccgccgccgaagagactgttacgacgatattgggaatgttagcgagcccataccactacctaataatcatagtcgtattagttatcatactggctgtagtggtggtggggttctcatgtcggaaaaagttcatctcttacctcaaaggaatctgtagtggaggcggcggagggcctgagcgcgtgcatagggttctcttcagacgacggtcgtgtccaagtcgtgtccccggagctgaagataatgcccggaatgaaaccttgtcaaaccgttacttacagcctacacaggtgtctgaacaggagatccaaggacaggagctggctgagctgaccggagtgacagtcgagctcccagaagagccccagcgtttgttggagcaggcggaggcggaggggtgtcaaagacgccggctcctggtgccagtcaatgatgctgattctgcggacatctccacgctgctcgacgcaagcgcgacgctagaggaaggccatgccaaggaaacgatacaagatcagttggtggggagtgaaaagttgttttatgaggaggacgaggccggctccgccacatcatgtctctag

SEQ ID NO: 141214 - DNA, 1161 bp, Artificial Sequence
  derived and/or modified sequence
atgggcctgtggggccagagcgtgcccacagccagcagcgcccgggccggccgctacccaggggccaggacagccagcggcacccggccctggctgctggaccccaagatcctgaagtttgtggtgttcatcgtggccgtgctgctgcctgtgcgggtggacagcgccaccatcccccggcaggatgaggtgccccagcagacagtggccccccagcagcagaggaggagcctgaaggaggaggagtgcccagctggcagccacaggtctgagtacacaggagcctgcaacccctgcacagagggcgtggactacaccatcgccagcaacaacctgcccagctgcctgctgtgcaccgtgtgcaagagcggccagaccaacaagagcagctgcaccaccacccgggacacagtgtgccagtgtgagaagggcagcttccaggacaagaacagccctgagatgtgcaggacctgcaggacaggctgcccccggggcatggtgaaggtgagcaactgcacccccaggagtgacatcaagtgcaagaatgaatctgctgccagcagcacaggcaagaccccagctgctgaggagaccgtgaccaccatcctgggcatgctggccagcccctaccactacctgatcatcatcgtggtgctggtgatcatcctggccgtggtggtggtgggcttcagctgcaggaagaagttcatctcctacctgaagggcatctgcagcggcggcggcggcggccctgagcgggtgcaccgggtgctcttcagaagaagaagctgccccagccgggtgcctggagctgaggacaatgccagaaatgagaccctgagcaaccgctacctgcagcccacccaggtgtctgagcaggagatccagggccaggagctggccgagctgactggagtgacagtggagctgcctgaggagccccagaggctgctggagcaggccgaggccgagggctgccagaggcggcggctgctggtgcctgtgaatgatgctgacagcgctgacatcagcaccctgctggatgccagcgccaccctggaggagggccacgccaaggagaccatccaggaccagctggtgggcagcgagaagctgttctatgaggaggatgaagctggcagcgccaccagctgcctgtag

SEQ ID NO: 141215 - DNA, 1161 bp, Artificial Sequence
  derived and/or modified sequence
atgggcctgtggggccagagcgtgcccaccgccagcagcgcccgggcaggtaggtaccctggcgctaggacagcttcaggtacccgaccgtggctattagatcctaaaattctgaaattcgtagtttttattgtcgcggtgcttctacccgtccgtgttgacagtgccactatcccacgacaagacgaggtgccacaacagacagtggctccccaacagcagcggagaagcctaaaagaggaggagtgccccgcaggatctcacagatcagagtataccggagcatgcaatccatgcacggagggggtcgattacacgattgcctctaataaccttccttcctgtctcttgtgtacagtctgcaaatccggacagacaaacaaatcatcttgcacaactaccagggataccgtgtgccagtgtgaaaagggtagcttccaggacaagaattcacccgaaatgtgccgcacctgccggacaggctgtccaaggggtatggtcaaggtgagcaactgcacgcccagatccgacattaagtgcaagaatgagagcgctgcaagcagtactgggaagacccccgccgctgaggaaactgttacaaccatactggggatgttagcttccccctatcactatcttataatcatcgtcgtgctggtgatcatcctggccgtcgtggtcgtcggattttcctgtcgtaagaagtttataagctacctgaagggaatctgcagcggcggaggcgggggacccgagcgcgtccaccgagtactcttcaggcggcggagctgtccctcacgagttccaggcgctgaggataatgcccgcaatgaaacgctgtccaataggtatctgcaaccaactcaggtatctgaacaggagattcaggggcaagaattggccgaactgacaggtgtgactgtggagcttcccgaagagccccagcgcctacttgaacaagccgaagctgagggatgccagcgcaggcgcctgcttgtgccggtgaatgacgctgactcagccgacatctccactcttctggatgccagcgctaccctggaagagggccatgccaaagaaacgatccaagaccaactagtcggatcggagaagctcttttatgaggaggatgaggccgggtctgccactagctgtctgtag

SEQ ID NO: 141216 - DNA, 1161 bp, Artificial Sequence
  derived and/or modified sequence
atgggcctctggggacagagcgtaccaaccgcctctagtgccagagcagggagataccctggtgccagaacagcatccggaactaggccctggctgctggatcctaagattcttaaatttgtggtattcatagtcgcagtgctgctccctgtccgggtagattctgcaacaatccctcgccaagacgaggtgccccagcagactgttgccccacagcaacagagacgatccctcaaggaggaggagtgtcctgctggctcgcaccggagcgaatacaccggagcctgcaacccatgcacagagggcgtggattacaccatagcatccaacaacttaccctcctgcctgctgtgcaccgtgtgcaagtcgggacaaacaaacaaatcctcttgcacaaccactagggacacggtgtgtcagtgcgagaagggctcttttcaggacaagaactctccggagatgtgtcggacctgcaggactggatgcccaaggggaatggtgaaggtctctaattgcacgccacggtccgacatcaaatgtaagaatgaatccgcggctagctcaaccggcaagacgccagcagctgaggaaaccgttaccacaatcctgggtatgttagcaagtccgtaccattacttaattattatagtcgtcctggtgataatcttggccgtcgtagtcgtggggttttcatgcagaaaaaagttcatttcctacctcaagggtatctgctccggaggcggtggtggcccagagagggttcacagggtgttgtttcgcagacggagttgcccttcccgtgtgccaggggcagaggacaatgctcggaacgagacactgtccaacaggtatctccagcccacccaagtctcagaacaggaaatccagggacaggagctggccgagctgactggagtgaccgtcgaactgccagaagagccccagagattgcttgagcaagccgaggccgaggggtgccaacgcagacggctgctcgttcctgtgaatgacgccgatagcgccgacataagcacccttttggatgcgtccgccactcttgaggaggggcatgccaaggaaaccatccaggatcagcttgtgggttcggagaagcttttctacgaagaagacgaagccggttccgccacatcctgcctctag

SEQ ID NO: 141217 - DNA, 3538 bp, Artificial Sequence
  derived and/or modified sequence
ggcagtgtagctgcgagaacctttgcacgcgcacaaactacggggacgatttctgattgatttttggcgctttcgatccaccctcctcccttctcatgggactttggggacaaagcgtcccgaccgcctcgagcgctcgagcagggcgctatccaggagccaggacagcgtcgggaaccagaccatggctcctggaccccaagatccttaagttcgtcgtcttcatcgtcgcggttctgctgccggtccgggttgactctgccaccatcccccggcaggacgaagttccccagcagacagtggccccacagcaacagaggcgcagcctcaaggaggaggagtgtccagcaggatctcatagatcagaatatactggagcctgtaacccgtgcacagagggtgtggattacaccattgcttccaacaatttgccttcttgcctgctatgtacagtttgtaaatcaggtcaaacaaataaaagttcctgtaccacgaccagagacaccgtgtgtcagtgtgaaaaaggaagcttccaggataaaaactcccctgagatgtgccggacgtgtagaacagggtgtcccagagggatggtcaaggtcagtaattgtacgccccggagtgacatcaagtgcaaaaatgaatcagctgccagttccactgggaaaaccccagcagcggaggagacagtgaccaccatcctggggatgcttgcctctccctatcactaccttatcatcatagtggttttagtcatcattttagctgtggttgtggttggcttttcatgtcggaagaaattcatttcttacctcaaaggcatctgctcaggtggtggaggaggtcccgaacgtgtgcacagagtccttttccggcggcgttcatgtccttcacgagttcctggggcggaggacaatgcccgcaacgagaccctgagtaacagatacttgcagcccacccaggtctctgagcaggaaatccaaggtcaggagctggcagagctaacaggtgtgactgtagagttgccagaggagccacagcgtctgctggaacaggcagaagctgaagggtgtcagaggaggaggctgctggttccagtgaatgacgctgactccgctgacatcagcaccttgctggatgcctcggcaacactggaagaaggacatgcaaaggaaacaattcaggaccaactggtgggctccgaaaagctcttttatgaagaagatgaggcaggctctgctacgtcctgcctgtgaaagaatctcttcaggaaaccagagcttccctcatttaccttttctcctacaaagggaagcagcctggaagaaacagtccagtacttgacccatgccccaacaaactctactatccaatatggggcagcttaccaatggtcctagaactttgttaacgcacttggagtaatttttatgaaatactgcgtgtgataagcaaacgggagaaatttatatcagattcttggctgcatagttatacgattgtgtattaagggtcgttttaggccacatgcggtggctcatgcctgtaatcccagcactttgataggctgaggcaggtggattgcttgagctcgggagtttgagaccagcctcatcaacacagtgaaactccatctcaatttaaaaagaaaaaaagtggttttaggatgtcattctttgcagttcttcatcatgagacaagtctttttttctgcttcttatattgcaagctccatctctactggtgtgtgcatttaatgacatctaactacagatgccgcacagccacaatgctttgccttatagttttttaactttagaacgggattatcttgttattacctgtattttcagtttcggatatttttgacttaatgatgagattatcaagacgtagccctatgctaagtcatgagcatatggacttacgagggttcgacttagagttttgagctttaagataggattattggggcttacccccaccttaattagagaaacatttatattgcttactactgtaggctgtacatctcttttccgatttttgtataatgatgtaaacatggaaaaactttaggaaatgcacttattaggctgtttacatgggttgcctggatacaaatcagcagtcaaaaatgactaaaaatataactagtgacggagggagaaatcctccctctgtgggaggcacttactgcattccagttctccctcctgcgccctgagactggaccagggtttgatggctggcagcttctcaaggggcagcttgtcttacttgttaattttagaggtatatagccatatttatttataaataaatatttatttatttatttataagtagatgtttacatatgcccaggattttgaagagcctggtatctttgggaagccatgtgtctggtttgtcgtgctgggacagtcatgggactgcatcttccgacttgtccacagcagatgaggacagtgagaattaagttagatccgagactgcgaagagcttctctttcaagcgccattacagttgaacgttagtgaatcttgagcctcatttgggctcagggcagagcaggtgtttatctgccccggcatctgccatggcatcaagagggaagagtggacggtgcttgggaatggtgtgaaatggttgccgactcaggcatggatgggcccctctcgcttctggtggtctgtgaactgagtccctgggatgccttttagggcagagattcctgagctgcgttttagggtacagattccctgtttgaggagcttggcccctctgtaagcatctgactcatctcagagatatcaattcttaaacactgtgacaacaggatctaaaatggctgacacatttgtccttgtgtcacgttccattattttatttaaaaacctcagtaatcgttttagcttctttccagcaaactcttctccacagtagcccagtcgtggtaggataaattacggatatagtcattctaggggtttcagtcttttccatctcaaggcattgtgtgttttgttccgggactggtttggctgggacaaagttagaactgcctgaagttcgcacattcagattgttgtgtccatggagttttaggaggggatggcctttccggtcttcgcacttccatcctctcccacttccatctggcgtcccacaccttgtcccctgcacttctggatgacacagggtgctgctgcctcctagtctttgcctttgctgggccttctgtgcaggagacttggtctcaaagctcagagagagccagtccggtcccagctcctttgtcccttcctcagaggccttccttgaagatgcatctagactaccagccttatcagtgtttaagcttattcctttaacataagcttcctgacaacatgaaattgttggggttttttggcgttggttgatttgtttaggttttgctttatacccgggccaaatagcacataacacctggttatatatgaaatactcatatgtttatgaccaaaataaatatgaaacctcatattaaaaa

SEQ ID NO: 141218 - protein, 259 aa, Artificial Sequence
  derived and/or modified sequence
MARIPKTLKFVVVIVAVLLPVLAYSATTARQEEVPQQTVAPQQQRHSFKGEECPAGSHRSEHTGACNPCTEGVDYTNASNNEPSCFPCTVCKSDQKHKSSCTMTRDTVCQCKEGTFRNENSPEMCRKCSRCPSGEVQVSNCTSWDDIQCVEEFGANATVETPAAEETMNTSPGTPAPAAEETMNTSPGTPAPAAEETMTTSPGTPAPAAEETMTTSPGTPAPAAEETMITSPGTPASSHYLSCTIVGIIVLIVLLIVFV

SEQ ID NO: 141219 - protein, 157 aa, Artificial Sequence
  derived and/or modified sequence
MTRDTVCQCKEGTFRNENSPEMCRKCSRCPSGEVQVSNCTSWDDIQCVEEFGANATVETPAAEETMNTSPGTPAPAAEETMNTSPGTPAPAAEETMTTSPGTPAPAAEETMTTSPGTPAPAAEETMITSPGTPASSHYLSCTIVGIIVLIVLLIVFV

SEQ ID NO: 141220 - protein, 277 aa, Artificial Sequence
  derived and/or modified sequence
MARIPKTLKFVVVIVAVLLPVLAYSATTARQEEVPQQTVAPQQQRHSFKGEECPAGSHRSEHTGACNPCTEGVDYTNASNNEPSCFPCTVCKSDQKHKSSCTMTRDTVCQCKEGTFRNENSPEMCRKCSRCPSGEVQVSNCTSWDDIQCVEEFGANATVETPAAEETMNTSPGTPAPAAEETMNTSPGTPAPAAEETMTTSPGTPAPAAEETMTTSPGTPAPAAEETMITSPGTPASSHYLSCTIVGIIVLIVLLIVPYLKKKKKKKLKKKQKRKSK

SEQ ID NO: 141221 - DNA, 780 bp, Artificial Sequence
  derived and/or modified sequence
atggccagaatccccaagaccctgaagttcgtggtggtgatcgtggccgtgctgctgcccgtgctggcctacagcgccaccaccgccagacaggaggaggtgccccagcagaccgtggccccccagcagcagagacacagcttcaagggcgaggagtgccccgccggcagccacagaagcgagcacaccggcgcctgcaacccctgcaccgagggcgtggactacaccaacgccagcaacaacgagcccagctgcttcccctgcaccgtgtgcaagagcgaccagaagcacaagagcagctgcaccatgaccagagacaccgtgtgccagtgcaaggagggcaccttcagaaacgagaacagccccgagatgtgcagaaagtgcagcagatgccccagcggcgaggtgcaggtgagcaactgcaccagctgggacgacatccagtgcgtggaggagttcggcgccaacgccaccgtggagacccccgccgccgaggagaccatgaacaccagccccggcacccccgcccccgccgccgaggagaccatgaacaccagccccggcacccccgcccccgccgccgaggagaccatgaccaccagccccggcacccccgcccccgccgccgaggagaccatgaccaccagccccggcacccccgcccccgccgccgaggagaccatgatcaccagccccggcacccccgccagcagccactacctgagctgcaccatcgtgggcatcatcgtgctgatcgtgctgctgatcgtgttcgtgtag

SEQ ID NO: 141222 - DNA, 474 bp, Artificial Sequence
  derived and/or modified sequence
atgaccagagacaccgtgtgccagtgcaaggagggcaccttcagaaacgagaacagccccgagatgtgcagaaagtgcagcagatgccccagcggcgaggtgcaggtgagcaactgcaccagctgggacgacatccagtgcgtggaggagttcggcgccaacgccaccgtggagacccccgccgccgaggagaccatgaacaccagccccggcacccccgcccccgccgccgaggagaccatgaacaccagccccggcacccccgcccccgccgccgaggagaccatgaccaccagccccggcacccccgcccccgccgccgaggagaccatgaccaccagccccggcacccccgcccccgccgccgaggagaccatgatcaccagccccggcacccccgccagcagccactacctgagctgcaccatcgtgggcatcatcgtgctgatcgtgctgctgatcgtgttcgtgtag

SEQ ID NO: 141223 - DNA, 834 bp, Artificial Sequence
  derived and/or modified sequence
atggccagaatccccaagaccctgaagttcgtggtggtgatcgtggccgtgctgctgcccgtgctggcctacagcgccaccaccgccagacaggaggaggtgccccagcagaccgtggccccccagcagcagagacacagcttcaagggcgaggagtgccccgccggcagccacagaagcgagcacaccggcgcctgcaacccctgcaccgagggcgtggactacaccaacgccagcaacaacgagcccagctgcttcccctgcaccgtgtgcaagagcgaccagaagcacaagagcagctgcaccatgaccagagacaccgtgtgccagtgcaaggagggcaccttcagaaacgagaacagccccgagatgtgcagaaagtgcagcagatgccccagcggcgaggtgcaggtgagcaactgcaccagctgggacgacatccagtgcgtggaggagttcggcgccaacgccaccgtggagacccccgccgccgaggagaccatgaacaccagccccggcacccccgcccccgccgccgaggagaccatgaacaccagccccggcacccccgcccccgccgccgaggagaccatgaccaccagccccggcacccccgcccccgccgccgaggagaccatgaccaccagccccggcacccccgcccccgccgccgaggagaccatgatcaccagccccggcacccccgccagcagccactacctgagctgcaccatcgtgggcatcatcgtgctgatcgtgctgctgatcgtgccctacctgaagaagaagaagaagaagaagctgaagaagaagcagaagagaaagagcaagtag

SEQ ID NO: 141224 - DNA, 780 bp, Artificial Sequence
  derived and/or modified sequence
atggcaagaattcctaagacgctgaagtttgtggtggtgattgtggctgtgctgctcccagtgctcgcgtattcagccaccaccgctcgacaagaggaggtgccacaacagaccgtggccccccagcaacaaagacactccttcaagggtgaggagtgccctgccggaagccacaggagcgagcacactggagcttgtaatccttgcacagagggtgtcgactacactaacgcatctaataatgagccaagctgcttcccctgtactgtttgcaaatccgatcagaagcataaaagttcatgcaccatgacaagagacactgtctgtcagtgcaaggagggcaccttcaggaatgaaaactcgcctgagatgtgtaggaagtgctcaaggtgcccctctggtgaagttcaggtgtctaactgcacgtcttgggacgacattcagtgtgtagaagaatttggcgctaacgcgactgtggaaacccccgctgccgaagagacgatgaacacctcacccggtactcctgctcccgcggccgaggaaaccatgaataccagtccgggaaccccggcccccgccgcagaggaaaccatgaccacatcgcctggcacccctgctcctgccgctgaggagactatgacaacgtctcctggaacacccgctcctgccgcggaagaaactatgattacatcaccaggcactcccgcatcttctcactatctgtcatgtaccatcgtgggtatcattgtcctgattgtgctgcttatcgtctttgtttag

SEQ ID NO: 141225 - DNA, 474 bp, Artificial Sequence
  derived and/or modified sequence
atgacaagagacacagtgtgtcaatgtaaggagggcacctttcgcaacgaaaactcccctgaaatgtgccgaaagtgctcacgttgtccctcaggtgaggtgcaggtctcgaattgtacatcttgggacgacattcagtgcgtggaggagtttggggccaatgctacagtggagacccccgcagcagaggagactatgaacacctcccctgggacccccgcaccagccgccgaggaaacaatgaacacctcccccggaacccccgctccagccgccgaggagaccatgaccactagtcctggcactcccgcacccgctgctgaggaaactatgaccacctcaccaggaacccctgcgcccgctgcggaggaaaccatgatcacctctccaggcacacccgcatctagccattacctcagctgtacgatagtcggcattattgtactaattgtccttctgatagtgttcgtgtag

SEQ ID NO: 141226 - DNA, 834 bp, Artificial Sequence
  derived and/or modified sequence
atggcccggattcccaagaccctgaaattcgtggtggttatcgtggcggtgctgttgccagtcttggcctactccgcaaccaccgcacgccaggaggaagtacctcagcagactgtggcccctcagcagcaacggcactcatttaagggggaagagtgtccggccggtagtcatcggtcagagcacaccggcgcctgtaatccatgcacagagggagtggattacaccaacgctagcaataatgagccgagttgtttcccctgtaccgtctgtaagagtgatcaaaaacacaagtcttcatgcaccatgacgagagacactgtgtgtcaatgcaaggagggaactttcagaaatgagaattctcctgaaatgtgtcggaaatgctcccgttgtcctagcggcgaggtccaagttagcaattgcacaagttgggacgatatccaatgtgtggaagaatttggcgccaacgcaactgtggagacacctgcggcagaggagaccatgaacacctcccccgggactcccgcgccagcagcagaggagaccatgaacacgtctcccgggacacctgctcccgctgctgaagaaaccatgaccacatcaccagggactccggctccagcagcggaagagactatgacgacaagccctggcacacctgcccccgcagccgaagagaccatgattacatcccccggcacacccgcttcctcacactacctgtcctgcacgattgttggaattatcgttcttatcgtcttgctgattgtcccctatttgaaaaagaaaaaaaagaaaaaactcaagaagaagcaaaagcgaaagagcaagtag

SEQ ID NO: 141227 - DNA, 780 bp, Artificial Sequence
  derived and/or modified sequence
atggcccgcatccccaagaccctgaagtttgtggtggtgattgtggccgtgctgctgcctgtgctggcctacagcgccaccacagcccggcaggaggaggtgccccagcagacagtggccccccagcagcagaggcacagcttcaagggggaggagtgcccagctggcagccacaggtctgagcacactggagcctgcaacccctgcacagagggcgtggactacaccaatgccagcaacaatgagcccagctgcttcccctgcaccgtgtgcaagagtgaccagaagcacaagagcagctgcaccatgacccgggacacagtgtgccagtgcaaggagggcaccttcagaaatgaaaacagccctgagatgtgcaggaagtgcagccgctgccccagcggggaggtgcaggtgagcaactgcacctcctgggatgacatccagtgtgtggaggagtttggagccaatgccaccgtggagaccccagctgctgaggagaccatgaacaccagccctggcaccccagccccagctgctgaggagaccatgaacaccagccctggcaccccagccccagctgctgaggagaccatgaccaccagccctggcaccccagccccagctgctgaggagaccatgaccaccagccctggcaccccagccccagctgctgaggagaccatgatcaccagccctggcaccccagccagcagccactacctgagctgcaccatcgtgggcatcatcgtgctgattgtgctgctgattgtgtttgtgtag

SEQ ID NO: 141228 - DNA, 474 bp, Artificial Sequence
  derived and/or modified sequence
atgacccgggacacagtgtgccagtgcaaggagggcaccttcagaaatgaaaacagccctgagatgtgcaggaagtgcagccgctgccccagcggggaggtgcaggtgagcaactgcacctcctgggatgacatccagtgtgtggaggagtttggagccaatgccaccgtggagaccccagctgctgaggagaccatgaacaccagccctggcaccccagccccagctgctgaggagaccatgaacaccagccctggcaccccagccccagctgctgaggagaccatgaccaccagccctggcaccccagccccagctgctgaggagaccatgaccaccagccctggcaccccagccccagctgctgaggagaccatgatcaccagccctggcaccccagccagcagccactacctgagctgcaccatcgtgggcatcatcgtgctgattgtgctgctgattgtgtttgtgtag

SEQ ID NO: 141229 - DNA, 834 bp, Artificial Sequence
  derived and/or modified sequence
atggcccgcatccccaagaccctgaagtttgtggtggtgattgtggccgtgctgctgcctgtgctggcctacagcgccaccacagcccggcaggaggaggtgccccagcagacagtggccccccagcagcagaggcacagcttcaagggggaggagtgcccagctggcagccacaggtctgagcacactggagcctgcaacccctgcacagagggcgtggactacaccaatgccagcaacaatgagcccagctgcttcccctgcaccgtgtgcaagagtgaccagaagcacaagagcagctgcaccatgacccgggacacagtgtgccagtgcaaggagggcaccttcagaaatgaaaacagccctgagatgtgcaggaagtgcagccgctgccccagcggggaggtgcaggtgagcaactgcacctcctgggatgacatccagtgtgtggaggagtttggagccaatgccaccgtggagaccccagctgctgaggagaccatgaacaccagccctggcaccccagccccagctgctgaggagaccatgaacaccagccctggcaccccagccccagctgctgaggagaccatgaccaccagccctggcaccccagccccagctgctgaggagaccatgaccaccagccctggcaccccagccccagctgctgaggagaccatgatcaccagccctggcaccccagccagcagccactacctgagctgcaccatcgtgggcatcatcgtgctgattgtgctgctgattgtgccctacctgaagaagaagaagaagaagaagctgaagaagaagcagaagaggaagagcaagtag

SEQ ID NO: 141230 - DNA, 780 bp, Artificial Sequence
  derived and/or modified sequence
atggcccggatccccaagaccctgaagttcgtggtggtgatcgtggccgtgttactgccggtccttgcttactccgcaacaaccgcccgccaggaagaagtgccgcagcagacagtggccccccaacagcaacgtcatagttttaagggcgaggagtgtccggccggttcccacaggagcgagcacaccggagcttgtaatccctgcaccgaaggggtagactacactaatgcttccaataatgaaccaagttgcttcccttgtactgtctgtaagtcagatcagaagcataagagctcgtgcactatgactagagatacagtgtgccagtgcaaggaggggacttttaggaatgagaatagtcctgagatgtgtcggaaatgctctcggtgtccttccggtgaggtgcaggtcagtaactgcacgtcttgggacgacatccagtgcgtagaggaattcggcgccaacgccaccgtcgaaactcccgctgcggaagagaccatgaataccagccccggcacccctgccccagcggcggaggagaccatgaatacgtcccctggcaccccagcgcccgccgccgaggagacaatgaccactagcccaggcacgccggcgccagcggctgaagagaccatgacaacaagcccaggaactcccgcccctgcagcggaagagaccatgatcacatccccaggtacgccggcaagctcacactatctctcttgtacaatcgtcggcatcatcgtgctcatcgttttgttgattgtcttcgtgtag

SEQ ID NO: 141231 - DNA, 474 bp, Artificial Sequence
  derived and/or modified sequence
atgacccgggacaccgtgtgccagtgcaaggagggcaccttccggaatgagaatagcccggaaatgtgtcgcaagtgctcaaggtgtccttctggcgaggtgcaggttagcaattgcacctcttgggacgacatccagtgtgtggaggagttcggcgcgaatgcaaccgtggaaactccagccgctgaagagaccatgaatacctctccaggcacgccagcgcccgccgccgaggagacgatgaacacaagccctgggaccccagcccccgctgccgaagagactatgacaacgtctccgggtacccctgcaccagccgctgaagagactatgaccacctcccccggtactcccgcccccgcggctgaagaaacaatgatcacgtccccgggcactcccgcgtcatcgcactacctgagctgcaccatcgtgggaataatagtactcatcgtgctgctcattgtgtttgtttag

SEQ ID NO: 141232 - DNA, 834 bp, Artificial Sequence
  derived and/or modified sequence
atggcccggatccccaagaccctgaagttcgtggtggtgatcgtggctgtattgttgcccgtgctagcctactctgccacaaccgccaggcaggaggaggttccccaacagaccgttgccccgcagcagcagcggcactccttcaagggagaggagtgccccgcaggttcacataggtccgagcacacaggcgcctgcaacccatgtaccgagggcgtggactacacgaatgcgtccaataatgagccctcctgttttccttgtaccgtctgtaagagcgatcagaaacacaagagtagttgtactatgactcgggataccgtgtgtcagtgtaaggaaggaacattccggaacgaaaactcacccgaaatgtgccgcaaatgctcaaggtgcccgtcaggggaggtccaggtctccaattgtacgtcctgggatgatatccagtgcgtggaggaattcggagccaacgcaactgtagagaccccggccgccgaggagacgatgaacacgtccccggggaccccagctcctgccgccgaggagacaatgaataccagccccggcactcctgctcccgccgcagaggaaacaatgacaaccagcccaggcaccccggccccggccgcagaagaaaccatgacgacatcacccggaacaccagcccccgcagccgaagaaaccatgattacttcccccgggacgccagctagctctcactatctgtcttgtaccatagtgggaataatagttctgatcgtgctcctaatcgtgccctacctcaagaagaaaaaaaagaaaaaacttaagaaaaaacagaaaaggaagtctaagtag

SEQ ID NO: 141233 - DNA, 780 bp, Artificial Sequence
  derived and/or modified sequence
atggcgaggataccgaaaacgttgaaattcgtggtggtgattgtagccgtcttgctgccagtcttagcctactctgcgacaaccgcaaggcaggaagaggttcctcagcaaactgttgccccacaacagcagcgacacagctttaagggcgaagaatgccctgcaggctcacacaggtctgagcacaccggcgcatgcaatccatgtactgaaggcgtagattatacaaatgcatctaataatgaaccatcctgctttccatgcacagtgtgtaagtccgatcagaagcacaagtccagctgcactatgaccagggacacagtttgtcagtgtaaagagggaacttttcgtaacgagaactcacccgaaatgtgccggaaatgttctcggtgcccctccggagaggttcaggtgagcaactgcacaagctgggatgacatccaatgcgtggaggagttcggggctaatgccaccgtggagaccccagcagctgaggaaactatgaacacttctcccggaacccccgctccagccgcagaggaaactatgaacacttcccccggtacaccagcccctgcagccgaggagacaatgactacaagccccggaacccccgcacctgcagcagaggaaacaatgacgactagccctgggacaccggcacccgcagccgaagaaactatgatcacctccccgggaacgccagcctcgagccactatctgtcatgcaccattgtgggtatcattgtgttgattgtcttacttatagtgttcgtgtag

SEQ ID NO: 141234 - DNA, 474 bp, Artificial Sequence
  derived and/or modified sequence
atgactcgagataccgtgtgccagtgtaaggaaggtaccttcagaaatgaaaatagccctgagatgtgccgtaaatgcagccggtgtccctcaggcgaagtgcaggtgagtaattgtacatcctgggatgacatacagtgtgtggaagaattcggtgccaacgcgaccgtcgaaacccccgcagctgaggagaccatgaacacaagcccaggtactccagctcccgcagccgaggaaactatgaacacctcccctggaactcctgcccctgcagccgaagaaacaatgacaacttctcccggtactccagctcccgcagcagaggagacaatgactacttccccgggaacacccgctcctgccgctgaggagactatgatcacaagcccgggtacccctgcttccagccattatctttcctgtaccatagttggtatcatcgtactgatcgtcctgctgattgtgtttgtctag

SEQ ID NO: 141235 - DNA, 834 bp, Artificial Sequence
  derived and/or modified sequence
atggccaggatccctaagacgttaaagttcgtcgtcgtgattgtggccgtcctgctcccagtcctggcatatagcgcaacaaccgccagacaggaagaggtgccccaacagactgttgcacctcagcagcagaggcacagcttcaagggggaagaatgccctgctggatctcatcgaagcgaacataccggagcgtgtaacccctgcactgagggggtggattataccaatgcttcaaataacgagccatcatgcttcccttgtaccgtctgcaagtcagatcagaaacacaaatctagctgcacaatgaccagggatacggtgtgccaatgtaaagagggcacttttcgcaatgaaaatagtcccgagatgtgcagaaaatgttccaggtgtccttctggtgaagtgcaggtgagtaactgcacctcctgggatgacattcaatgtgtcgaagagttcggagccaatgctaccgtggagacccctgccgctgaagagaccatgaatacctcccccggaacacccgctccagcggcagaagaaactatgaacacctctccaggaactcccgctcccgcagcggaggagaccatgacgacatccccagggaccccagcacccgcagctgaggaaacaatgaccacaagccccggtaccccagcgcctgctgcagaggaaacaatgatcacaagccccggaacaccagcttcttcccattacctcagttgcaccattgtgggcattattgtgctcatcgtgctgctcatcgtgccgtatctgaagaagaaaaaaaagaaaaaactgaagaagaaacagaagaggaaaagcaagtag

SEQ ID NO: 141236 - DNA, 1718 bp, Artificial Sequence
  derived and/or modified sequence
ggagcaggctcaggatgggcctccagtgcctcctctggagctcactacccagactacagcagcgcagtgggcagcgcctcagctccttccccttctgctgcctacagcctggacaggacccggaatcaaaccgcaggccctgggtcaccgctgccggaaagagccagttcctgtccgtccatgcacccaccaccaaaacccaggccttcctggaggtgctaggggaggccatgccccttttctgagtgcttggaagtgactgctgcaagtgacaagtgaccacgccttttcccccgcgggtataaattcagaggcgctgcgctccgattctggcagtgcagctgtgggaacctctccacgcgcacgaactcagccaacgatttctgatagatttttgggagtttgaccagagatgcaaggggtgaaggagcgcttcctaccgttagggaactctggggacagagcgccccggccgcctgatggccgaggcagggtgcgacccaggacccaggacggcgtcgggaaccataccatggcccggatccccaagaccctaaagttcgtcgtcgtcatcgtcgcggtcctgctgccagtcctagcttactctgccaccactgcccggcaggaggaagttccccagcagacagtggccccacagcaacagaggcacagcttcaagggggaggagtgtccagcaggatctcatagatcagaacatactggagcctgtaacccgtgcacagagggtgtggattacaccaacgcttccaacaatgaaccttcttgcttcccatgtacagtttgtaaatcagatcaaaaacataaaagttcctgcaccatgaccagagacacagtgtgtcagtgtaaagaaggcaccttccggaatgaaaactccccagagatgtgccggaagtgtagcaggtgccctagtggggaagtccaagtcagtaattgtacgtcctgggatgatatccagtgtgttgaagaatttggtgccaatgccactgtggaaaccccagctgctgaagagacaatgaacaccagcccggggactcctgccccagctgctgaagagacaatgaacaccagcccggggactcctgccccagctgctgaagagacaatgaccaccagcccggggactcctgccccagctgctgaagagacaatgaccaccagcccggggactcctgccccagctgctgaagagacaatgatcaccagcccggggactcctgcctcttctcattacctctcatgcaccatcgtagggatcatagttctaattgtgcttctgattgtgtttgtttgaaagacttcactgtggaagaaattccttccttacctgaaaggttcaggtaggcgctggctgagggcggggggcgctggacactctctgccctgcctccctctgctgtgttcccacagacagaaacgcctgcccctgccccaagtcctggtgtctccagcctggctctatcttcctccttgtgatcgtcccatccccacatcccgtgcaccccccaggaccctggtctcatcagtccctctcctggagctgggggtccacacatctcccagccaagtccaagagggcagggccagttcctcccatcttcaggcccagccaggcagggggcagtcggctcctcaactgggtgacaagggtgaggatgagaagtggtcacgggatttattcagccttggtcagagcagaa

SEQ ID NO: 141237 - DNA, 894 bp, Artificial Sequence
  derived and/or modified sequence
ggcagtgcagctgtgggaacctctccacgcgcacgaactcagccaacgatttctgatagatttttgggagtttgaccagagatgcaaggggtgaaggagcgcttcctaccgttagggaactctggggacagagcgccccggccgcctgatggccgaggcagggtgcgacccaggacccaggacggcgtcgggaaccataccatggcccggatccccaagaccctaaagttcgtcgtcgtcatcgtcgcggtcctgctgccagatctcatagatcagaacatactggagcctgtaacccgtgcacagagggtgtggattacaccaacgcttccaacaatgaaccttcttgcttcccatgtacagtttgtaaatcagatcaaaaacataaaagttcctgcaccatgaccagagacacagtgtgtcagtgtaaagaaggcaccttccggaatgaaaactccccagagatgtgccggaagtgtagcaggtgccctagtggggaagtccaagtcagtaattgtacgtcctgggatgatatccagtgtgttgaagaatttggtgccaatgccactgtggaaaccccagctgctgaagagacaatgaacaccagcccggggactcctgccccagctgctgaagagacaatgaacaccagcccggggactcctgccccagctgctgaagagacaatgaccaccagcccggggactcctgccccagctgctgaagagacaatgaccaccagcccggggactcctgccccagctgctgaagagacaatgatcaccagcccggggactcctgcctcttctcattacctctcatgcaccatcgtagggatcatagttctaattgtgcttctgattgtgtttgtttgaaagacttcactgtggaaga

SEQ ID NO: 141238 - DNA, 1023 bp, Artificial Sequence
  derived and/or modified sequence
gctgtgggaacctctccacgcgcacgaactcagccaacgatttctgatagatttttgggagtttgaccagagatgcaaggggtgaaggagcgcttcctaccgttagggaactctggggacagagcgccccggccgcctgatggccgaggcagggtgcgacccaggacccaggacggcgtcgggaaccataccatggcccggatccccaagaccctaaagttcgtcgtcgtcatcgtcgcggtcctgctgccagtcctagcttactctgccaccactgcccggcaggaggaagttccccagcagacagtggccccacagcaacagaggcacagcttcaagggggaggagtgtccagcaggatctcatagatcagaacatactggagcctgtaacccgtgcacagagggtgtggattacaccaacgcttccaacaatgaaccttcttgcttcccatgtacagtttgtaaatcagatcaaaaacataaaagttcctgcaccatgaccagagacacagtgtgtcagtgtaaagaaggcaccttccggaatgaaaactccccagagatgtgccggaagtgtagcaggtgccctagtggggaagtccaagtcagtaattgtacgtcctgggatgatatccagtgtgttgaagaatttggtgccaatgccactgtggaaaccccagctgctgaagagacaatgaacaccagcccggggactcctgccccagctgctgaagagacaatgaacaccagcccggggactcctgccccagctgctgaagagacaatgaccaccagcccggggactcctgccccagctgctgaagagacaatgaccaccagcccggggactcctgccccagctgctgaagagacaatgatcaccagcccggggactcctgcctcttctcattacctctcatgcaccatcgtagggatcatagttctaattgtgcttctgattgtaccctatctcaaaaaaaaaaaaaaaaaaaaactaaagaaaaaacaaaaacgaaagagcaag

SEQ ID NO: 141239 - protein, 440 aa, Artificial Sequence
  derived and/or modified sequence
MEQRGQNAPAASGARKRHGPGPREARGARPGPRVPKTLVLVVAAVLLLVSAESALITQQDLAPQQRAAPQQKRSSPSEGLCPPGHHISEDGRDCISCKYGQDYSTHWNDLLFCLRCTRCDSGEVELSPCTTTRNTVCQCEEGTFREEDSPEMCRKCRTGCPRGMVKVGDCTPWSDIECVHKESGTKHSGEVPAVEETVTSSPGTPASPCSLSGIIIGVTVAAVVLIVAVFVCKSLLWKKVLPYLKGICSGGGGDPERVDRSSQRPGAEDNVLNEIVSILQPTQVPEQEMEVQEPAEPTGVNMLSPGESEHLLEPAEAERSQRRRLLVPANEGDPTETLRQCFDDFADLVPFDSWEPLMRKLGLMDNEIKVAKAEAAGHRDTLYTMLIKWVNKTGRDASVHTLLDALETLGERLAKQKIEDHLLSSGKFMYLEGNADSAMS

SEQ ID NO: 141240 - DNA, 1323 bp, Artificial Sequence
  derived and/or modified sequence
atggagcagagaggccagaacgcccccgccgccagcggcgccagaaagagacacggccccggccccagagaggccagaggcgccagacccggccccagagtgcccaagaccctggtgctggtggtggccgccgtgctgctgctggtgagcgccgagagcgccctgatcacccagcaggacctggccccccagcagagagccgccccccagcagaagagaagcagccccagcgagggcctgtgcccccccggccaccacatcagcgaggacggcagagactgcatcagctgcaagtacggccaggactacagcacccactggaacgacctgctgttctgcctgagatgcaccagatgcgacagcggcgaggtggagctgagcccctgcaccaccaccagaaacaccgtgtgccagtgcgaggagggcaccttcagagaggaggacagccccgagatgtgcagaaagtgcagaaccggctgccccagaggcatggtgaaggtgggcgactgcaccccctggagcgacatcgagtgcgtgcacaaggagagcggcaccaagcacagcggcgaggtgcccgccgtggaggagaccgtgaccagcagccccggcacccccgccagcccctgcagcctgagcggcatcatcatcggcgtgaccgtggccgccgtggtgctgatcgtggccgtgttcgtgtgcaagagcctgctgtggaagaaggtgctgccctacctgaagggcatctgcagcggcggcggcggcgaccccgagagagtggacagaagcagccagagacccggcgccgaggacaacgtgctgaacgagatcgtgagcatcctgcagcccacccaggtgcccgagcaggagatggaggtgcaggagcccgccgagcccaccggcgtgaacatgctgagccccggcgagagcgagcacctgctggagcccgccgaggccgagagaagccagagaagaagactgctggtgcccgccaacgagggcgaccccaccgagaccctgagacagtgcttcgacgacttcgccgacctggtgcccttcgacagctgggagcccctgatgagaaagctgggcctgatggacaacgagatcaaggtggccaaggccgaggccgccggccacagagacaccctgtacaccatgctgatcaagtgggtgaacaagaccggcagagacgccagcgtgcacaccctgctggacgccctggagaccctgggcgagagactggccaagcagaagatcgaggaccacctgctgagcagcggcaagttcatgtacctggagggcaacgccgacagcgccatgagctag

SEQ ID NO: 141241 - DNA, 1323 bp, Artificial Sequence
  derived and/or modified sequence
atggaacagagaggccaaaacgcccctgctgcatcgggcgctcgaaaacggcatggccctggaccaagggaggcgcggggggcacgccctggtccacgtgttcccaagaccttggtcctcgtggtggctgcagtgcttctcttggtatctgccgagagtgcccttattacccagcaggatctggctccccagcaacgcgctgccccccagcaaaaacggtcttcaccctcggaaggactttgtccccctggccaccacatctccgaggacgggcgcgattgcatttcatgcaagtatggacaggactactccactcactggaatgacctgctcttttgccttaggtgtacccggtgtgattctggtgaagtcgagttaagcccctgtacaaccacgagaaacacggtatgtcagtgcgaagagggaacttttcgcgaagaagatagccccgagatgtgtcggaagtgtcggactggatgtcctcgcggcatggttaaagttggggactgcaccccatggagcgacatagagtgtgtccacaaggaatctgggactaagcacagcggagaggtgcctgccgtggaggagaccgtcacgtcttctcctggcacccctgccagcccgtgctccctctctgggattattatcggtgtcaccgtggccgctgtcgtcctgattgtcgctgtgtttgtgtgtaagtcccttctctggaagaaggtgttgccgtacctgaagggcatctgttcaggtggcggcggagatcctgaaagagtggatagatccagccagcgcccaggggccgaggataacgtgcttaacgaaatcgtgagcattctgcagcccacacaggtgccagagcaagaaatggaggtccaggagccagctgaacccaccggtgtgaacatgttgtcccccggtgaaagcgagcatctgctcgaacccgccgaggccgagcgctcacagcggagaagactccttgtgcccgctaatgagggggaccctacagagaccttgcggcaatgttttgatgatttcgccgacctggtgccatttgattcttgggaacctctgatgagaaagttaggcctaatggacaatgagattaaagtcgccaaagcagaagctgcaggccatcgagatacgctgtacacaatgctgataaaatgggtgaacaaaaccggcagggacgccagtgttcacaccttgctggatgccttggagaccctgggggaacgcctggccaagcagaagatcgaagatcacctgctgtctagcggcaaattcatgtatcttgaagggaacgctgatagcgctatgtcttag

SEQ ID NO: 141242 - DNA, 1323 bp, Artificial Sequence
  derived and/or modified sequence
atggagcagaggggccagaatgccccagctgccagcggggccaggaagagacatggccctggcccccgggaggcccggggggcccggcccggcccccgggtgcccaagaccctggtgctggtggtggccgctgtgctgctgctggtgtctgctgagagcgccctgatcacccagcaggacctggccccccagcagagagctgccccccagcagaagaggagcagccccagcgagggcctgtgccccccaggccaccacatcagtgaagatggccgggactgcatcagctgcaagtatggccaggactacagcacccactggaatgacctgctcttctgcctgcgctgcacccgctgtgacagcggggaggtggagctgagcccctgcaccaccaccaggaacacagtgtgccagtgtgaggagggcaccttccgggaggaggacagccctgagatgtgcaggaaatgtagaacaggctgcccccggggcatggtgaaggtgggggactgcaccccctggagcgacattgaatgtgtgcacaaggagagcggcaccaagcacagcggggaggtgcctgctgtggaggagaccgtgaccagcagccctggcaccccagccagcccctgcagcctgagcggcatcatcatcggcgtgacagtggccgctgtggtgctgattgtggccgtgtttgtgtgcaagagcctgctgtggaagaaggtgctgccctacctgaagggcatctgcagcggcggcggcggggaccctgagcgggtggacaggagcagccagaggcctggagctgaggacaacgtgctgaatgaaattgtgtccatcctgcagcccacccaggtgcctgagcaggagatggaggtgcaggagcctgctgagcccaccggggtgaacatgctgagccctggagagagcgagcacctgctggagcctgctgaggccgagaggagccagaggcggcggctgctggtgcctgccaatgaaggagaccccacagagaccctgcggcagtgctttgatgactttgctgacctggtgccctttgacagctgggagcccctgatgaggaagctgggcctgatggacaatgagatcaaggtggccaaggccgaggccgccggccaccgggacaccctgtacaccatgctgatcaagtgggtgaacaagacaggaagagatgcctctgtgcacaccctgctggatgccctggagaccctgggggagcggctggccaagcagaagattgaggaccacctgctgagcagcggcaagttcatgtacctggagggcaatgctgacagcgccatgtcctag

SEQ ID NO: 141243 - DNA, 1323 bp, Artificial Sequence
  derived and/or modified sequence
atggagcagcggggccagaacgcccccgccgccagcggcgcccggaagcggcacgggcccgggccgagagaagctcggggcgccaggcccggcccgagagttcccaaaactttagtgcttgttgtcgccgccgtactcctactcgtgtcagccgagagcgccctgataacccagcaggatctggcccctcagcaaagggccgcaccacagcagaagcgatccagtcccagcgaggggctctgcccccccggccaccacatctctgaagatggccgcgactgcatcagctgcaaatatgggcaggattatagtacccattggaacgatttgctgttctgtctgcggtgcacacgctgcgactccggggaggttgagttgtcaccctgtaccaccacccgtaacacagtgtgccagtgtgaggaaggcacattccgagaagaggacagccccgagatgtgcagaaagtgcagaaccgggtgccctcgcggcatggtgaaggtgggggattgtactccctggtctgatattgaatgtgtacacaaggagtcaggcacaaaacacagcggggaggttcccgcagtggaggagacggtgacttcgtctccgggaacccccgccagtccctgcagtctgagcggaattatcatcggtgtgacagttgccgcggtcgtgctcatcgtcgccgtgtttgtatgtaagagcctcttatggaagaaggtgttgccttaccttaaggggatttgttctggcggtggaggagatccggagcgagtagacaggtcctcacagagacctggagccgaggataacgtccttaacgaaatagtgagcatcttgcagcctacccaggtacccgaacaggaaatggaggttcaggaaccagctgaaccaactggcgtgaatatgctaagccctggagagtccgaacacctgcttgaaccagcagaagcggagagatcccagaggcgtagactcctggtccctgctaatgaaggggaccctaccgagactctcaggcagtgctttgacgactttgctgatctggtcccgtttgattcctgggagcctctaatgcgtaagctgggactgatggataatgagatcaaagttgccaaggctgaggcagccggccatcgggacaccctctatactatgctgataaaatgggtgaacaaaaccggacgcgacgcatctgtgcacactttgctggacgccctggagacccttggagaacgacttgctaagcaaaagattgaggatcacttgctgtctagcggcaagttcatgtatctcgagggaaatgcagattctgcgatgagctag

SEQ ID NO: 141244 - DNA, 1323 bp, Artificial Sequence
  derived and/or modified sequence
atggagcagcgagggcagaatgctcctgccgcttccggtgccaggaaaagacatgggccagggcctagagaagctaggggtgccaggccgggtccccgagtgccgaaaaccctggtgctcgtcgtggcggcagtgctcctgctggttagcgccgagtcagctttaattacacaacaggacctggcccctcagcagagagctgcccctcagcagaaacggtctagtccctctgaaggtctttgcccgcctgggcaccacatcagcgaagatggtcgggactgcatctcttgtaaatatggacaggactactctacccattggaacgacctccttttttgtctgcgttgtacccggtgtgactcgggtgaggtcgaactgtccccttgtacgacgacccggaatacagtctgccagtgtgaggaaggaacatttagagaagaggacagcccagaaatgtgtcgcaagtgcagaactgggtgcccaagaggaatggttaaggtcggggactgcacaccgtggagcgatattgaatgcgtgcataaagagtcaggaaccaaacatagcggagaggtccccgctgtagaggaaactgtaacttcctccccaggtactcctgcatcaccgtgttccctgtcaggaattatcatcggcgttacggtggccgctgtggtccttattgtggccgtttttgtgtgcaaatccctcctttggaagaaggtgctaccctaccttaaggggatctgtagtggtgggggtggagatcccgagcgggtggataggtctagccagcgccctggggctgaagataacgtgctaaatgagattgtgtccatcttgcagccaacccaggtgccagagcaagaaatggaggtgcaggagccggcagagcctactggcgtcaatatgctgagtcccggtgagtccgaacacttactagaaccagccgaagccgaaaggagccagcgtagaagattgcttgtgcccgcaaacgaaggcgaccctacagagaccctccggcaatgttttgacgatttcgcggacctggtgccattcgactcgtgggagcctctgatgcggaaactgggattaatggataacgaaataaaggtagcgaaagcagaggccgctggtcaccgtgatacactgtacacaatgttgatcaaatgggtcaataagactgggagggacgcctccgtacataccctgcttgatgctcttgaaactctgggagaaagactggcaaaacagaaaattgaagaccacctcctcagctccgggaaattcatgtacctagagggcaatgcggatagtgctatgagctag

SEQ ID NO: 141245 - DNA, 4146 bp, Artificial Sequence
  derived and/or modified sequence
gcgcttgcggaggattgcgttgacgagactcttatttattgtcaccaacctgtggtggaatttgcagttgcacattggatctgattcgccccgccccgaatgacgcctgcccggaggcagtgaaagtacagccgcgccgccccaagtcagcctggacacataaatcagcacgcggccggagaaccccgcaatctctgcgcccacaaaatacaccgacgatgcccgatctactttaagggctgaaacccacgggcctgagagactataagagcgttccctaccgccatggaacaacggggacagaacgccccggccgcttcgggggcccggaaaaggcacggcccaggacccagggaggcgcggggagccaggcctgggccccgggtccccaagacccttgtgctcgttgtcgccgcggtcctgctgttggtctcagctgagtctgctctgatcacccaacaagacctagctccccagcagagagcggccccacaacaaaagaggtccagcccctcagagggattgtgtccacctggacaccatatctcagaagacggtagagattgcatctcctgcaaatatggacaggactatagcactcactggaatgacctccttttctgcttgcgctgcaccaggtgtgattcaggtgaagtggagctaagtccctgcaccacgaccagaaacacagtgtgtcagtgcgaagaaggcaccttccgggaagaagattctcctgagatgtgccggaagtgccgcacagggtgtcccagagggatggtcaaggtcggtgattgtacaccctggagtgacatcgaatgtgtccacaaagaatcaggtacaaagcacagtggggaagtcccagctgtggaggagacggtgacctccagcccagggactcctgcctctccctgttctctctcaggcatcatcataggagtcacagttgcagccgtagtcttgattgtggctgtgtttgtttgcaagtctttactgtggaagaaagtccttccttacctgaaaggcatctgctcaggtggtggtggggaccctgagcgtgtggacagaagctcacaacgacctggggctgaggacaatgtcctcaatgagatcgtgagtatcttgcagcccacccaggtccctgagcaggaaatggaagtccaggagccagcagagccaacaggtgtcaacatgttgtcccccggggagtcagagcatctgctggaaccggcagaagctgaaaggtctcagaggaggaggctgctggttccagcaaatgaaggtgatcccactgagactctgagacagtgcttcgatgactttgcagacttggtgccctttgactcctgggagccgctcatgaggaagttgggcctcatggacaatgagataaaggtggctaaagctgaggcagcgggccacagggacaccttgtacacgatgctgataaagtgggtcaacaaaaccgggcgagatgcctctgtccacaccctgctggatgccttggagacgctgggagagagacttgccaagcagaagattgaggaccacttgttgagctctggaaagttcatgtatctagaaggtaatgcagactctgccatgtcctaagtgtgattctcttcaggaagtcagaccttccctggtttaccttttttctggaaaaagcccaactggactccagtcagtaggaaagtgccacaattgtcacatgaccggtactggaagaaactctcccatccaacatcacccagtggatggaacatcctgtaacttttcactgcacttggcattatttttataagctgaatgtgataataaggacactatggaaatgtctggatcattccgtttgtgcgtactttgagatttggtttgggatgtcattgttttcacagcacttttttatcctaatgtaaatgctttatttatttatttgggctacattgtaagatccatctacacagtcgttgtccgacttcacttgatactatatgatatgaaccttttttgggtggggggtgcggggcagttcactctgtctcccaggctggagtgcaatggtgcaatcttggctcactatagccttgacctctcaggctcaagcgattctcccacctcagccatccaaatagctgggaccacaggtgtgcaccaccacgcccggctaattttttgtattttgtctagatataggggctctctatgttgctcagggtggtctcgaattcctggactcaagcagtctgcccacctcagactcccaaagcggtggaattagaggcgtgagcccccatgcttggccttacctttctacttttataattctgtatgttattattttatgaacatgaagaaactttagtaaatgtacttgtttacatagttatgtgaatagattagataaacataaaaggaggagacatacaatgggggaagaagaagaagtcccctgtaagatgtcactgtctgggttccagccctccctcagatgtactttggcttcaatgattggcaacttctacaggggccagtcttttgaactggacaaccttacaagtatatgagtattatttataggtagttgtttacatatgagtcgggaccaaagagaactggatccacgtgaagtcctgtgtgtggctggtccctacctgggcagtctcatttgcacccatagcccccatctatggacaggctgggacagaggcagatgggttagatcacacataacaatagggtctatgtcatatcccaagtgaacttgagccctgtttgggctcaggagatagaagacaaaatctgtctcccacgtctgccatggcatcaagggggaagagtagatggtgcttgagaatggtgtgaaatggttgccatctcaggagtagatggcccggctcacttctggttatctgtcaccctgagcccatgagctgccttttagggtacagattgcctacttgaggaccttggccgctctgtaagcatctgactcatctcagaaatgtcaattcttaaacactgtggcaacaggacctagaatggctgacgcattaaggttttcttcttgtgtcctgttctattattgttttaagacctcagtaaccatttcagcctctttccagcaaacccttctccatagtatttcagtcatggaaggatcatttatgcaggtagtcattccaggagtttttggtcttttctgtctcaaggcattgtgtgttttgttccgggactggtttgggtgggacaaagttagaattgcctgaagatcacacattcagactgttgtgtctgtggagttttaggagtggggggtgacctttctggtctttgcacttccatcctctcccacttccatctggcatcccacgcgttgtcccctgcacttctggaaggcacagggtgctgctgcctcctggtctttgcctttgctgggccttctgtgcaggacgctcagcctcagggctcagaaggtgccagtccggtcccaggtcccttgtcccttccacagaggccttcctagaagatgcatctagagtgtcagccttatcagtgtttaagatttttcttttatttttaatttttttgagacagaatctcactctctcgcccaggctggagtgcaacggtacgatcttggctcagtgcaacctccgcctcctgggttcaagcgattctcgtgcctcagcctccggagtagctgggattgcaggcacccgccaccacgcctggctaatttttgtatttttagtagagacggggtttcaccatgttggtcaggctggtctcgaactcctgacctcaggtgatccaccttggcctccgaaagtgctgggattacaggcgtgagccaccagccaggccaagctattcttttaaagtaagcttcctgacgacatgaaataattgggggttttgttgtttagttacattaggctttgctatatccccaggccaaatagcatgtgacacaggacagccatagtatagtgtgtcactcgtggttggtgtcctttcatgcttctgccctgtcaaaggtccctatttgaaatgtgttataatacaaacaaggaagcacattgtgtacaaaatacttatgtatttatgaatccatgaccaaattaaatatgaaaccttatataaaaa

SEQ ID NO: 141246 - protein, 468 aa, Artificial Sequence
  derived and/or modified sequence
MAPPPARVHLGAFLAVTPNPGSAASGTEAAAATPSKVWGSSAGRIEPRGGGRGALPTSMGQHGPSARARAGRAPGPRPAREASPRLRVHKTFKFVVVGVLLQVVPSSAATIKLHDQSIGTQQWEHSPLGELCPPGSHRSEHPGACNRCTEGVGYTNASNNLFACLPCTACKSDEEERSPCTTTRNTACQCKPGTFRNDNSAEMCRKCSRGCPRGMVKVKDCTPWSDIECVHKESGNGHNIWVILVVTLVVPLLLVAVLIVCCCIGSGCGGDPKCMDRVCFWRLGLLRGPGAEDNAHNEILSNADSLSTFVSEQQMESQEPADLTGVTVQSPGEAQCLLGPAEAEGSQRRRLLVPANGADPTETLMLFFDKFANIVPFDSWDQLMRQLDLTKNEIDVVRAGTAGPGDALYAMLMKWVNKTGRNASIHTLLDALERMEERHAREKIQDLLVDSGKFIYLEDGTGSAVSLE

SEQ ID NO: 141247 - DNA, 2714 bp, Artificial Sequence
  derived and/or modified sequence
actccgaatgcgaagttctgtcttgtcatagccaagcacgctgcttcttggattgacctggcaggatggcgccaccaccagctagagtacatctaggtgcgttcctggcagtgactccgaatcccgggagcgcagcgagtgggacagaggcagccgcggccacacccagcaaagtgtggggctcttccgcggggaggattgaaccacgaggcgggggccgaggagcgctccctacctccatgggacagcacggacccagtgcccgggcccgggcagggcgcgccccaggacccaggccggcgcgggaagccagccctcggctccgggtccacaagaccttcaagtttgtcgtcgtcggggtcctgctgcaggtcgtacctagctcagctgcaaccatcaaacttcatgatcaatcaattggcacacagcaatgggaacatagccctttgggagagttgtgtccaccaggatctcatagatcagaacatcctggagcctgtaaccggtgcacagagggtgtgggttacaccaatgcttccaacaatttgtttgcttgcctcccatgtacagcttgtaaatcagatgaagaagagagaagtccctgcaccacgaccaggaacacagcatgtcagtgcaaaccaggaactttccggaatgacaattctgctgagatgtgccggaagtgcagcagagggtgccccagagggatggtcaaggtcaaggattgtacgccctggagtgacatcgagtgtgtccacaaagaatcaggcaatggacataatatatgggtgattttggttgtgactttggttgttccgttgctgttggtggctgtgctgattgtctgttgttgcatcggctcaggttgtggaggggaccccaagtgcatggacagggtgtgtttctggcgcttgggtctcctacgagggcctggggctgaggacaatgctcacaacgagattctgagcaacgcagactcgctgtccactttcgtctctgagcagcaaatggaaagccaggagccggcagatttgacaggtgtcactgtacagtccccaggggaggcacagtgtctgctgggaccggcagaagctgaagggtctcagaggaggaggctgctggttccagcaaatggtgctgaccccactgagactctgatgctgttctttgacaagtttgcaaacatcgtgccctttgactcctgggaccagctcatgaggcagctggacctcacgaaaaatgagatcgatgtggtcagagctggtacagcaggcccaggggatgccttgtatgcaatgctgatgaaatgggtcaacaaaactggacggaacgcctcgatccacaccctgctggatgccttggagaggatggaagagagacatgcaagagagaagattcaggacctcttggtggactctggaaagttcatctacttagaagatggcacaggctctgccgtgtccttggagtgaaagactctttttaccagaggtttcctcttaggtgttaggagttaatacatattaggttttttttttttttaacatgtatacaaagtaaattcttagccaggtgtagtggctcatgcctgtaatcccagcactttgggaggctgaggcgggtggatcacttgaggtcagaagttcaagaccagcctgaccaacatcgtgaaatgccgtctttacaaaaaaatacaaaaattaactggatgtgatggtgtgtgcatatattctcggctactcgggaggctgaggcaggagaatcacttgaacccacgaggcagtgagctgagattgcaccactgcactccagcctgggacacagagcaagactctgtctcaagataaaataaaataaacttgaaagaattattgcccgactgaggctcacatgccaaaggaaaatctggttctcccctgagctggcctccgtgtgtttccttatcatggtggtcaattggaggtgttaatttgaatggattaaggaacacctagaacactggtaaggcattatttctgggacattatttctgggcatgtcttcgagggtgtttccagaggggattggcatgcgatcgggtggactgagtggaaaagacctacccttaatttgggggggcaccgtccgacagactggggagcaagatagaagaaaacaaaaaaaaaaggaaaagcaaatccatctgatctcctggagctgggacactcttctgcctgtggacatcagagtctaggatttctagcccttggactccagggcatacaccagtggcctcccgaaggatctaaggattttggccttgaactaagaattacaccatcggcttccctgggtcttaggtttttgggctggattaagtcctgcttccagcatttcagggtctctgctgtgcagatggcctgttgtggaacttctcaacctccattatcagatgcattaattcctccaataagtcccatttcatatatagtcatttaccccacaacatttcagtcaagggaacagcatataagatggtggccgtccagtaagctaaggttaatttattaattatttaatttatttaccttgagttcaagtcacaattaaagtacatatacctttggaaatttggacttttgtatataaaagtacttttttttggcgggggcagtgggcagctctcatcctaaacaaatgtgttatttggtacctatgcaaagatttggttaaaa

SEQ ID NO: 141248 - DNA, 1407 bp, Artificial Sequence
  derived and/or modified sequence
atggcccctcccccagcccgagtccacttgggagctttcctggcagtcaccccaaatccaggctccgcagcttcaggaacagaggctgccgctgccaccccgagcaaggtgtggggatcttctgccggtcgcatcgagccccgcggcggcggcaggggcgccctaccaacctccatgggtcaacatgggccctccgctcgagccagagctgggcgggctcccgggcccaggccggcgcgagaagcttcccccagactaagagtgcacaaaacgttcaagttcgtggtggtcggagtcttactgcaggtggtcccatcgtctgcagcaacaattaaactgcatgatcagtccattggcacacaacagtgggagcatagcccactaggcgagctctgccctccaggcagtcaccgctccgagcacccaggtgcatgtaacagatgtacagaaggggtcggctacaccaatgcgagcaataacctctttgcttgcctcccctgcaccgcctgtaaaagtgacgaagaggagagatcaccatgcactacaactaggaatacagcctgccagtgtaaacccggcactttcaggaacgacaactccgcggaaatgtgtcggaagtgttcacgaggctgtcccaggggcatggtcaaagtgaaagactgtacaccctggtcagacatagaatgcgtccataaagagtccggcaacggccacaatatttgggtcatactcgtagtaacactcgttgtaccactgttactggtggcagtgctgatcgtctgttgctgcattggcagcgggtgcggcggtgaccccaagtgtatggatagggtttgcttctggcggttagggctgctcagggggcctggcgcagaggataacgcccataacgaaatcctgtctaatgctgattcattgtccacattcgtcagcgagcagcagatggagtcccaggagcccgctgatctcactggggtgaccgtgcagagccctggagaggcacaatgtctgcttggccctgcggaagcagagggatctcagaggaggcggttgctcgtccctgctaatggcgctgatccaaccgagacactgatgctgttctttgataagtttgctaacattgtgccatttgattcctgggaccagctgatgcgacagttggatctgacgaaaaatgaaatagacgtggttagagcgggtactgcaggccccggagacgccctctacgccatgctgatgaagtgggttaataagacaggtcgtaacgcctcaattcacaccctgcttgacgcactggagcggatggaagagcggcatgccagggagaagatacaggatctcttagtagacagcggtaaatttatttatctcgaagacgggactggctctgccgtgagccttgaatag

SEQ ID NO: 141249 - DNA, 1407 bp, Artificial Sequence
  derived and/or modified sequence
atggcccctcctccagcccgggtgcacctgggcgccttcctggccgtgacccccaaccctggcagcgctgccagcggcacagaagctgctgctgccacccccagcaaggtgtggggcagcagcgctggaagaattgagccccggggcggcggccgcggggccctgcccacctccatgggccagcacggccccagcgcccgggcccgggccggccgggcccctggccccaggcctgcccgggaggccagcccccggctgcgggtgcacaagaccttcaagtttgtggtggtgggcgtgctgctgcaggtggtgcccagcagcgctgccaccatcaagctgcatgaccagagcatcggcacccagcagtgggagcacagccccctgggggagctgtgccccccaggcagccacaggtctgagcaccctggggcctgcaaccgctgcacagaaggagtgggctacaccaatgccagcaacaacctgtttgcctgcctgccctgcacagcctgcaagagtgatgaggaggagaggagcccctgcaccaccaccaggaacacagcctgccagtgcaagccaggcaccttcagaaatgacaacagcgctgagatgtgcaggaagtgcagccggggctgcccccggggcatggtgaaggtgaaggactgcaccccctggagcgacattgaatgtgtgcacaaggagagcggaaatggccacaacatctgggtgatcctggtggtgaccctggtggtgcccctgctgctggtggccgtgctgattgtgtgctgctgcatcggcagcggctgcggcggggaccccaagtgcatggacagagtgtgcttctggaggctgggcctgctgcggggccctggagctgaggacaatgcccacaatgagatcctgagcaatgctgacagcctgagcacctttgtgtctgagcagcagatggagagccaggagcctgctgacctgactggagtgacagtgcagagccctggagaggcccagtgcctgctgggccctgctgaggccgagggcagccagaggcggcggctgctggtgcctgccaacggggctgaccccacagagaccctgatgctgttctttgacaagtttgccaacatcgtgccctttgacagctgggaccagctgatgaggcagctggacctgaccaagaatgaaattgatgtggtgcgggccggcacagctggccctggagatgccctgtatgccatgctgatgaagtgggtgaacaagacaggaagaaatgccagcatccacaccctgctggatgccctggagaggatggaggagagacatgcccgggagaagatccaggacctgctggtggacagcggcaagttcatctacctggaggatggcactggatctgctgtgtccctggagtag

SEQ ID NO: 141250 - DNA, 1407 bp, Artificial Sequence
  derived and/or modified sequence
atggcccccccccccgcccgggtgcacctgggcgccttcctggccgtaacacccaacccgggcagcgctgccagcggcacagaagccgccgccgccactccatccaaggtttggggatcttctgcaggtcgtattgagccccggggtggtggacgcggtgccttgcccacatccatggggcagcacggtccaagcgctcgtgcccgcgcaggccgagcccctggcccccgcccagctagagaggcttccccgaggctgagagtccacaagacatttaagttcgtggtggtgggagtgcttctgcaagtcgtgccgagctcagccgcaaccataaaactgcacgaccagagcatcgggacccagcagtgggagcattcaccactaggagagctgtgtcctccaggcagccatcgctctgagcacccaggggcttgtaatcggtgtaccgaaggggtgggttacaccaacgcctccaacaatctctttgcatgtcttccatgtacagcatgcaagtctgatgaagaggaaaggagtccatgtactaccacaagaaatacagcttgccagtgtaagcctgggacatttcgtaatgataacagcgccgagatgtgccggaaatgttcacggggatgcccacgcgggatggtgaaggtgaaagactgcactccctggagtgacatagagtgcgtgcataaggagagtggcaacggccataacatctgggttatccttgtggttactctcgttgtgccgctcctcctggtcgcggtcctgattgtgtgctgctgcattggctctggatgcgggggcgacccgaagtgcatggaccgagtttgcttttggcgactgggtctcctgagaggacccggcgcggaagataacgcccataatgagatattgagcaatgcggacagcctctccactttcgtgtccgagcagcagatggagagtcaggaacccgccgatctaacgggagtaacagtacagagccctggcgaagcacagtgcttgctgggcccagctgaagctgagggatcacaaaggcgaaggctgctggtccctgcaaacggtgcagatcctaccgagacgctgatgctctttttcgataagttcgcgaacattgtaccgtttgattcctgggaccagcttatgaggcagcttgatttgacgaaaaatgagattgacgtggtgcgagcaggcacggccggtccaggtgatgccctgtacgcgatgttgatgaaatgggtcaataagaccggaaggaacgcaagtatccacaccttactcgacgccttggaacggatggaagagcgccacgcccgggaaaagatccaggacctgttggtggatagtggtaagttcatctatctggaagatgggacaggctcagccgtcagtttggaatag

SEQ ID NO: 141251 - DNA, 1407 bp, Artificial Sequence
  derived and/or modified sequence
atggctccacccccagccagagtccacctcggcgctttcttggctgtcacccccaaccccggtagcgccgctagcggaaccgaggctgctgctgcaacacccagcaaggtgtggggctctagtgccggtaggatagaaccacgcggtggaggaagaggggctttgcctacctctatgggccagcacggacccagtgcccgtgcgcgagcaggcagggcccctggaccacgacctgctagagaagctagtccgcgtctgcgagtgcacaaaactttcaagtttgtcgtggtaggagtgcttctacaggtcgtccctagttcagcggctacgatcaagctgcacgaccaaagcatcggaacacagcagtgggaacactcacccctaggagagctttgccccccaggttctcacagatccgaacacccaggagcttgtaataggtgtaccgagggagtcggctacactaatgcctctaacaacctgttcgcctgtctgccttgcaccgcctgtaaatctgatgaggaagagagatccccttgtactaccacccgaaacaccgcctgccagtgcaagcctgggaccttccgcaacgacaatagtgccgagatgtgtcgtaagtgtagtcggggatgccccagagggatggtcaaagtgaaggattgcaccccctggtccgacatcgaatgtgtgcataaggagtcgggcaacgggcacaatatctgggtgatacttgtcgtgaccctggtggtaccactgctcctggtcgccgtgctcattgtttgttgttgtatcggaagtggctgtggcggtgaccccaaatgcatggatcgagtatgtttctggcgcttggggcttctacgtggcccaggggcagaagacaacgcccataatgagatcctgagcaatgcggacagcctgagtacattcgtgtccgagcagcagatggagtcccaggaaccagctgatctgacgggtgtgacggtgcagagccccggagaggcacagtgcctgttagggccagcagaagctgagggctcccagagaagacgactgctggtgccggcaaacggggctgatccaaccgagacattgatgctgtttttcgacaagttcgcaaacatcgttccatttgatagctgggaccaacttatgcgccagttggacttgacaaagaatgaaatagatgtcgttagagcgggtaccgccggacccggagacgcactgtatgccatgcttatgaagtgggttaataaaaccggtcgtaacgctagcattcacacgcttctggacgccttggagcgcatggaagagcggcatgcccgagagaaaatccaggaccttctcgtcgacagcggtaaattcatctaccttgaggacgggacgggcagtgctgtgtcactggagtag

SEQ ID NO: 141252 - DNA, 1407 bp, Artificial Sequence
  derived and/or modified sequence
atggcccccccccccgccagagtgcacctgggcgccttcctggccgtgacccccaaccccggcagcgccgccagcggcaccgaggccgccgccgccacccccagcaaggtgtggggcagcagcgccggcagaatcgagcccagaggcggcggcagaggcgccctgcccaccagcatgggccagcacggccccagcgccagagccagagccggcagagcccccggccccagacccgccagagaggccagccccagactgagagtgcacaagaccttcaagttcgtggtggtgggcgtgctgctgcaggtggtgcccagcagcgccgccaccatcaagctgcacgaccagagcatcggcacccagcagtgggagcacagccccctgggcgagctgtgcccccccggcagccacagaagcgagcaccccggcgcctgcaacagatgcaccgagggcgtgggctacaccaacgccagcaacaacctgttcgcctgcctgccctgcaccgcctgcaagagcgacgaggaggagagaagcccctgcaccaccaccagaaacaccgcctgccagtgcaagcccggcaccttcagaaacgacaacagcgccgagatgtgcagaaagtgcagcagaggctgccccagaggcatggtgaaggtgaaggactgcaccccctggagcgacatcgagtgcgtgcacaaggagagcggcaacggccacaacatctgggtgatcctggtggtgaccctggtggtgcccctgctgctggtggccgtgctgatcgtgtgctgctgcatcggcagcggctgcggcggcgaccccaagtgcatggacagagtgtgcttctggagactgggcctgctgagaggccccggcgccgaggacaacgcccacaacgagatcctgagcaacgccgacagcctgagcaccttcgtgagcgagcagcagatggagagccaggagcccgccgacctgaccggcgtgaccgtgcagagccccggcgaggcccagtgcctgctgggccccgccgaggccgagggcagccagagaagaagactgctggtgcccgccaacggcgccgaccccaccgagaccctgatgctgttcttcgacaagttcgccaacatcgtgcccttcgacagctgggaccagctgatgagacagctggacctgaccaagaacgagatcgacgtggtgagagccggcaccgccggccccggcgacgccctgtacgccatgctgatgaagtgggtgaacaagaccggcagaaacgccagcatccacaccctgctggacgccctggagagaatggaggagagacacgccagagagaagatccaggacctgctggtggacagcggcaagttcatctacctggaggacggcaccggcagcgccgtgagcctggagtag

SEQ ID NO: 141253 - protein, 247 aa, Artificial Sequence
  derived and/or modified sequence
MDAFTRFTNQTQGRDRLFRATQYTCMLLRYLLEPKAGKEKVVMKLKKLESSVSTGRKWFRLGNVVHAIQATEQSIHATDLVPRLCLTLANLNRVIYFICDTILWVRSVGLTSGINKEKWRTRAAHHYYYSLLLSLVRDLYEISLQMKRVTCDRAKKEKSASQDPLWFSVAEEETEWLQSFLLLLFRSLKQHPPLLLDTVKNLCDILNPLDQLGIYKSNPGIIGLGGLVSSIAGMITVAYPQMKLKTR

SEQ ID NO: 141254 - DNA, 744 bp, Artificial Sequence
  derived and/or modified sequence
atggacgcatttacgagatttactaaccagacacaaggccgggatcgcctgtttcgtgccacacagtacacatgcatgctgctccgttatctgctcgagcccaaggccggcaaagagaaagtcgtgatgaaactcaaaaaactggaaagcagcgtgagcactggacgtaagtggtttaggcttggcaatgtcgtccacgccatacaagctaccgaacagagcattcatgccaccgacttagtccctcgcctttgcctgaccttggccaacttgaaccgggtcatttacttcatctgcgacactatcctgtgggtgcgatccgtcggcttgaccagtggaatcaacaaggagaagtggagaaccagagcggcccatcattactactatagcctgctgctgtccctggtcagggacctctatgaaatctctctgcagatgaaacgcgtgacgtgcgaccgggccaagaaggaaaaaagtgcttcccaagaccccctgtggttcagtgtcgccgaggaagagacagagtggctccagtccttcctcctgctgcttttccggtcgctgaagcagcacccaccacttctactggacacagtgaagaacctttgtgacattctcaatccccttgaccagctgggcatatacaagagcaatcctggtattatcggccttggcggtctcgtctcctccatagcaggcatgattactgtggcttatcctcagatgaagctgaagacacggtag

SEQ ID NO: 141255 - DNA, 744 bp, Artificial Sequence
  derived and/or modified sequence
atggatgccttcacccgcttcaccaaccagacccagggccgggacaggctcttccgggccacccagtacacctgcatgctgctgcgctacctgctggagcccaaggccggcaaggagaaggtggtgatgaagctgaagaagctggagagctctgtgtccacaggcaggaagtggttccggctgggcaatgtggtgcacgccatccaggccacagagcagagcatccacgccacagacctggtgccccggctgtgcctgaccctggccaacctgaacagagtcatctacttcatctgtgacaccatcctgtgggtgcgctctgtgggcctgaccagcggcatcaacaaggagaagtggaggaccagggctgcccaccactactactacagcctgctgctgagcctggtgcgggacctgtatgagatcagcctgcagatgaagagggtgacctgtgaccgggccaagaaggagaagagcgccagccaggaccccctgtggttctctgtggccgaggaggagacagagtggctgcagagcttcctgctgctgctcttccgcagcctgaagcagcacccccccctgctgctggacacagtgaagaacctgtgtgacatcctgaaccccctggaccagctgggcatctacaagagcaaccctggcatcatcggcctgggcggcctggtgagcagcattgctggcatgatcaccgtggcctacccccagatgaagctgaagaccaggtag

SEQ ID NO: 141256 - DNA, 744 bp, Artificial Sequence
  derived and/or modified sequence
atggacgccttcacccggttcaccaaccagacccagggccgggaccggctattccgggctacccagtacacatgcatgctgcttcgatacctgctagaacctaaagcaggcaaggagaaggtcgttatgaaactcaagaagctcgagagctctgtcagtaccggacgcaaatggttccgtctgggaaatgtggtccatgcaatccaggccaccgagcagagcatccacgccacagacctggtaccacggctctgcctaaccctggctaatctgaaccgcgttatttattttatctgtgataccatcctgtgggttaggagcgtagggctgaccagcggtattaacaaggagaagtggcgaactagagctgcacaccattactactattctcttctgctgagtctagtgcgggacttatacgaaatatccctgcaaatgaagagagtgacgtgcgaccgagctaaaaaggaaaagtccgcctcccaggatccactatggttctccgtagcagaggaggagacagaatggctgcagtcctttctgctgctgttgttcaggtctcttaagcaacaccctccactgttgctggacaccgtgaaaaatctttgcgacattctgaatcctcttgatcagttaggtatttacaagtcgaaccccgggattatcggcttaggagggttagtcagttccatcgcgggcatgatcaccgtggcctatcctcagatgaagctgaaaacgaggtag

SEQ ID NO: 141257 - DNA, 2740 bp, Artificial Sequence
  derived and/or modified sequence
agaaagtgtgcccgccccctctggggcggagagactcagcccctccccctcagcggataacctgggactgaccgttccctggggatccgacgggccccagaggacccacgcctgagccccgtgcgactcgtggcctttgggctagaagccatggacgccttcacccgcttcaccaaccagacccagggccgggaccgactcttcagagccactcagtacacatgcatgttgcttagatatttgttagagcccaaagctggcaaagagaaggtggtaatgaagctcaagaaactggagtccagtgtgagcactggtcgtaaatggttcagactaggcaatgtggtacatgctatacaggcaactgagcagagcattcatgccactgacctggtacctcgcttatgcttaacattagccaacctgaaccgtgtgatttatttcatctgtgacaccatcctctgggtgaggagcgtaggtctcacctctggcatcaacaaagagaaatggcgaacgagggctgctcaccactactactattctcttctgctgagcctggtcagggatctgtatgaaatctccctgcagatgaaacgagttacatgtgacagggcaaagaaagagaaatcagcatcccaggatcctctttggttcagcgtggctgaggaggaaacagaatggctccaatcctttctacttcttttattccgatctctgaagcagcatcctcccttgctcctggacacagtgaagaacctttgtgatatcctgaaccctttggaccagctggggatctataaatccaatcctggcatcattggacttggaggtcttgtgtcctctatagcaggcatgatcactgtggcatatcctcagatgaagctgaagacccgttagggtgtttttaggcttggaactagtacctactttaaaagatggcctcttggtgggacagacatttgtataagtcacaggccatgtcatactgtgcttaagttcttgttcatgtgagcatttaacaacctgtgatgtgggcagagatgaggccaagaacggagaagggaggagcatgaagagttgtatgtttttggagtgctggagtgacttgtgaatttctgaatattttcccttcatctaacattgattgaacatctcttatgtgcatagtgggagcttagtatttgctgaatgaataaaaattgaaaggaaaaaatttaaaaagacccaatcgcactgatcattgaacaccagtatacaataactttagggtcatatggatcattggtttcacgattacagtaggtctggtgcatggcactctcagatctagtagaggctctgatgtcagtagcaggatggaggagagctgggcttacagcctctcaacttgttggcccttataccatcactgcactcatgtccttgctctgtgcagaagtagaatcagaaaagcatcaggcaccttcatggtataaattgtgtctatgggtgcagtgaataagcaaaaatcagaagcagaccggagggacttataaaaataggtacagggtcacaatgggtgcctatatgtagcctgtgacagataagaagctgacagtgagacaaacaaaaaactgaggctagagcctcattcctctgactcctaatccagtgttctctccatgctctcccactgtcttcagaattgagtagaaatgtgatcccctcctgaatcctgttttttgcctcttactctcccataatttggaaatttccttgtccagtggtttatattcttttctagaaaaactaaaactgggtggagtgtggtggctcacacctataatcccagcactttgggaggctgaagcggaaggattgcttgaggccaggagttcaagaccagcctgggcaatgtagtgagactccttctctacaacaaagtgttaaaaaattagccaggcatggtggagtatgcctgtagtcccagatactctggaggctgaagcaggaggatcacttgagcccaggagttcaaggctgcagtgagcttccaccgcactccagcccgggtgatagagcaagaccctgtgtcttaaaaaaaaattaagacagtatttagacttatcagttagattgttttatttaaatccttctaacaatttaggcaattctacattaattttcatcaaaatttatccagtcaaaaaaatttcatgaatactccagatgtaagagagtcacaattttctacgataaatcagacatcttatttctagggtgattgagggaggtggaaagcgcaggaggaagccagtgaagaggacaatggaatgctgagtcaatgacattgacttgtgttcctatctgccatcttgggtgtgggtctttatatgtggttacagatcctttagtttgagggaggtgaggtagagaaataggatgccagcaggtaggaggccgatgtcagtcctcccagcaaagctgtgtcatttatctgaatggaaatgagaaaataaatatgtactcaataagtcacatttcccagaaatgtgattgagattctcaaaaaatagactcagattcttggctgtctgtttaaccaatcacgatatgggatttgagaaataaaatttagggaattttaagagacatgaaagctactaggtcagggaaaataaaaagcttaaataactatttttattgtccagatcctctactgtaatagattaactatgttcaataaatttctagacaaaattga

SEQ ID NO: 141258 - DNA, 744 bp, Artificial Sequence
  derived and/or modified sequence
atggacgcgttcacccgatttactaatcagacacagggtcgggatcgactgttcagagccactcagtatacctgcatgttactgcggtacctgctcgagcccaaagctggaaaagaaaaggtagttatgaaactgaagaaactagagtcctctgtgagcacaggcaggaagtggttcagacttggcaatgtcgtgcatgccattcaagccacggagcagagcatccatgccaccgacctcgtccctcggctctgcttaactttggccaatctgaacagggtgatttatttcatatgcgacaccatcctgtgggtgcggtctgtgggactcacctccggaatcaataaggagaagtggcggacacgagccgctcaccattattactacagtcttctgttgagcttggtgcgcgatctgtatgagatcagtctgcaaatgaaacgggtcacctgcgatcgcgctaaaaaggaaaagagtgcctcacaggaccctctttggttcagtgtggccgaggaagagaccgaatggctacagagttttctccttctacttttccgctcgctgaaacagcaccctccgctgctcttagataccgtgaagaatctatgtgacattcttaatccccttgaccaactgggcatttacaagagcaatcctggtattattggcttgggtggtctggtttcaagcatagccggaatgattacagttgcctaccctcagatgaagctcaaaacccgttag

SEQ ID NO: 141259 - DNA, 744 bp, Artificial Sequence
  derived and/or modified sequence
atggacgccttcaccagattcaccaaccagacccagggcagagacagactgttcagagccacccagtacacctgcatgctgctgagatacctgctggagcccaaggccggcaaggagaaggtggtgatgaagctgaagaagctggagagcagcgtgagcaccggcagaaagtggttcagactgggcaacgtggtgcacgccatccaggccaccgagcagagcatccacgccaccgacctggtgcccagactgtgcctgaccctggccaacctgaacagagtgatctacttcatctgcgacaccatcctgtgggtgagaagcgtgggcctgaccagcggcatcaacaaggagaagtggagaaccagagccgcccaccactactactacagcctgctgctgagcctggtgagagacctgtacgagatcagcctgcagatgaagagagtgacctgcgacagagccaagaaggagaagagcgccagccaggaccccctgtggttcagcgtggccgaggaggagaccgagtggctgcagagcttcctgctgctgctgttcagaagcctgaagcagcacccccccctgctgctggacaccgtgaagaacctgtgcgacatcctgaaccccctggaccagctgggcatctacaagagcaaccccggcatcatcggcctgggcggcctggtgagcagcatcgccggcatgatcaccgtggcctacccccagatgaagctgaagaccagatag

SEQ ID NO: 141260 - protein, 432 aa, Artificial Sequence
  derived and/or modified sequence
MASPVAAQAGKLLRALALRPRFLAAGSQAVQLTSRRWLNLQEYQSKKLMSDNGVRVQRFFVADTANEALEAAKRLNAKEIVLKAQILAGGRGKGVFNSGLKGGVHLTKDPNVVGQLAKQMIGYNLATKQTPKEGVKVNKVMVAEALDISRETYLAILMDRSCNGPVLVGSPQGGVDIEEVAASNPELIFKEQIDIFEGIKDSQAQRMAENLGFVGPLKSQAADQITKLYNLFLKIDATQVEVNPFGETPEGQVVCFDAKINFDDNAEFRQKDIFAMDDKSENEPIENEAAKYDLKYIGLDGNIACFVNGAGLAMATCDIIFLNGGKPANFLDLGGGVKEAQVYQAFKLLTADPKVEAILVNIFGGIVNCAIIANGITKACRELELKVPLVVRLEGTNVQEAQKILNNSGLPITSAIDLEDAAKKAVASVAKK

SEQ ID NO: 141261 - DNA, 1299 bp, Artificial Sequence
  derived and/or modified sequence
atggccagccccgtggccgcccaggccggcaagctgctgagagccctggccctgagacccagattcctggccgccggcagccaggccgtgcagctgaccagcagaagatggctgaacctgcaggagtaccagagcaagaagctgatgagcgacaacggcgtgagagtgcagagattcttcgtggccgacaccgccaacgaggccctggaggccgccaagagactgaacgccaaggagatcgtgctgaaggcccagatcctggccggcggcagaggcaagggcgtgttcaacagcggcctgaagggcggcgtgcacctgaccaaggaccccaacgtggtgggccagctggccaagcagatgatcggctacaacctggccaccaagcagacccccaaggagggcgtgaaggtgaacaaggtgatggtggccgaggccctggacatcagcagagagacctacctggccatcctgatggacagaagctgcaacggccccgtgctggtgggcagcccccagggcggcgtggacatcgaggaggtggccgccagcaaccccgagctgatcttcaaggagcagatcgacatcttcgagggcatcaaggacagccaggcccagagaatggccgagaacctgggcttcgtgggccccctgaagagccaggccgccgaccagatcaccaagctgtacaacctgttcctgaagatcgacgccacccaggtggaggtgaaccccttcggcgagacccccgagggccaggtggtgtgcttcgacgccaagatcaacttcgacgacaacgccgagttcagacagaaggacatcttcgccatggacgacaagagcgagaacgagcccatcgagaacgaggccgccaagtacgacctgaagtacatcggcctggacggcaacatcgcctgcttcgtgaacggcgccggcctggccatggccacctgcgacatcatcttcctgaacggcggcaagcccgccaacttcctggacctgggcggcggcgtgaaggaggcccaggtgtaccaggccttcaagctgctgaccgccgaccccaaggtggaggccatcctggtgaacatcttcggcggcatcgtgaactgcgccatcatcgccaacggcatcaccaaggcctgcagagagctggagctgaaggtgcccctggtggtgagactggagggcaccaacgtgcaggaggcccagaagatcctgaacaacagcggcctgcccatcaccagcgccatcgacctggaggacgccgccaagaaggccgtggccagcgtggccaagaagtag

SEQ ID NO: 141262 - DNA, 753 bp, Artificial Sequence
  derived and/or modified sequence
atgagcgacaacggcgtgagagtgcagagattcttcgtggccgacaccgccaacgaggccctggaggccgccaagagactgaacgccaaggagatcgtgctgaaggcccagatcctggccggcggcagaggcaagggcgtgttcaacagcggcctgaagggcggcgtgcacctgaccaaggaccccaacgtggtgggccagctggccaagcagatgatcggctacaacctggccaccaagcagacccccaaggagggcgtgaaggtgaacaaggtgatggtggccgaggccctggacatcagcagagagacctacctggccatcctgatggacagaagctgcaacggccccgtgctggtgggcagcccccagggcggcgtggacatcgaggaggtggccgccagcaaccccgagctgatcttcaaggagcagatcgacatcttcgagggcatcaaggacagccaggcccagagaatggccgagaacctgggcttcgtgggccccctgaagagccaggtggaggccatcctggtgaacatcttcggcggcatcgtgaactgcgccatcatcgccaacggcatcaccaaggcctgcagagagctggagctgaaggtgcccctggtggtgagactggagggcaccaacgtgcaggaggcccagaagatcctgaacaacagcggcctgcccatcaccagcgccatcgacctggaggacgccgccaagaaggccgtggccagcgtggccaagaagtag

SEQ ID NO: 141263 - DNA, 1299 bp, Artificial Sequence
  derived and/or modified sequence
atggcgagtccagttgccgcccaggcaggcaagttattacgagctctggctctcagacctaggttcttagctgccggaagtcaggctgtccaactgactagtcggagatggctgaatctccaggaataccagagcaaaaagctgatgagcgacaacggtgtgagagtccaacgcttcttcgtcgctgatacggctaacgaagctttagaagcggcaaaacggctaaacgccaaggaaattgtgcttaaggcacagatcctggccggaggaaggggcaagggggtgttcaacagcggattaaagggtggcgttcatttgacgaaagatccgaatgtcgttggccagttggctaaacagatgattggttacaatctcgctactaagcagacgccaaaagagggcgttaaggtgaataaggtgatggtggctgaggcgctggatatcagccgcgagacttatctcgccatcttgatggaccgctcttgcaacggaccagtattagtgggatcacctcagggtggagttgatatcgaggaagttgccgcatccaatcccgaactgatctttaaggaacagattgatatcttcgaaggaatcaaggactctcaggcccagcgcatggcagagaatctcggctttgtgggacctttgaagtcccaggccgccgatcagattactaaactttataacctcttcctgaaaatcgatgccacacaggtggaggtaaacccctttggggagacccccgaaggtcaagtagtgtgttttgacgcaaagattaatttcgacgataacgccgagtttcgccaaaaagatatattcgccatggatgataaaagtgaaaatgaacctattgagaacgaggccgctaagtatgacctgaaatatattgggctggacggcaatattgcatgctttgtgaacggtgccgggttggctatggctacctgcgatattatctttttaaatggaggaaagccagcgaattttttggacctaggcggcggcgtgaaagaagcccaggtgtatcaggcctttaagctcctgacagctgaccccaaagtggaagccatcctggttaacatctttggtgggattgttaactgcgccatcatagccaacgggatcactaaggcctgccgcgaactggagctcaaggtgccgctagtggtacgcctggagggcactaatgtgcaggaagctcagaaaatacttaataactctgggctccctatcacaagtgccatcgatctagaggacgcggctaagaaggctgtggcctctgttgcgaaaaaatag

SEQ ID NO: 141264 - DNA, 753 bp, Artificial Sequence
  derived and/or modified sequence
atgtccgacaatggtgtgcgcgtgcaacgcttttttgtggcagacactgctaatgaggccctggaggcagcgaagcgccttaatgccaaggagatcgtgctaaaggcgcaaatcctcgccggtggccgtggcaaaggagtattcaatagtgggttaaaaggcggcgtccatttgacaaaggaccccaacgtggtcggccagctggccaaacagatgattggatataatctggcaactaagcagacaccaaaagaaggcgtgaaggtgaacaaagtcatggtggccgaggccctcgatatcagcagagaaacgtacctggccatcctcatggacagatcctgtaacggccccgttctggtcggctcgccccaggggggcgttgacatcgaggaggtcgcagcatcaaaccctgagctaatctttaaagagcaaattgatatcttcgagggcatcaaagactctcaggcccagcgcatggcagagaatcttgggtttgtcgggcctctgaagtcacaagtcgaggcaattttggtcaatatcttcggaggaatcgtcaattgtgccatcatagcgaacggaattacaaaagcatgcagggagcttgagctcaaggtgccattggttgtccgcctagaaggaaccaatgtacaagaggcgcaaaagatcctaaataattcaggtctaccgattaccagcgccatagatttggaagatgccgcaaaaaaggcagttgcatccgtcgccaaaaaatag

SEQ ID NO: 141265 - DNA, 1299 bp, Artificial Sequence
  derived and/or modified sequence
atggccagccctgtggccgcccaggccggcaagctgctgcgggccctggccctgcggccccgcttcctggccgccggcagccaggccgtgcagctgaccagccgccgctggctgaacctgcaggagtaccagagcaagaagctgatgtctgacaacggggtgcgggtgcagcgcttctttgtggccgacacagccaatgaggccctggaggccgccaagaggctgaatgccaaggagatcgtgctgaaggcccagatcctggccggcggccggggcaaaggagtcttcaacagcggcctgaagggcggcgtgcacctgaccaaggaccccaacgtggtgggccagctggccaagcagatgattggctacaacctggccaccaagcagacccccaaggagggcgtgaaggtgaacaaggtgatggtggccgaggccctggacatcagccgggagacctacctggccatcctgatggacaggagctgcaatggacctgtgctggtgggcagcccccagggcggcgtggacatcgaggaggtggccgccagcaaccctgagctgatcttcaaggagcagattgacatctttgagggcatcaaggacagccaggcccagaggatggccgagaacctgggctttgtgggccccctgaagagccaggccgctgaccagatcaccaagctgtacaacctcttcctgaagattgatgccacccaggtggaggtgaacccctttggagagaccccagagggccaggtggtgtgctttgatgccaagatcaactttgatgacaatgctgagttccggcagaaggacatctttgccatggatgacaagtcagaaaatgagcccattgaaaatgaagctgccaagtatgacctgaagtacatcggcctggatggcaacatcgcctgctttgtgaatggagctggcctggccatggccacctgtgacatcatcttcctgaatggaggcaagccagccaacttcctggacctgggcggcggcgtgaaggaggcccaggtgtaccaggccttcaagctgctgacagctgaccccaaggtggaggccatcctggtgaacatctttggaggcatcgtgaactgtgccatcatcgccaacggcatcaccaaggcctgccgggagctggagctgaaggtgcccctggtggtgcggctggagggcaccaacgtgcaggaggcccagaagatcctgaacaacagcggcctgcccatcaccagcgccatcgacctggaggatgctgccaagaaggctgtggcctctgtggccaagaagtag

SEQ ID NO: 141266 - DNA, 753 bp, Artificial Sequence
  derived and/or modified sequence
atgtctgacaacggggtgcgggtgcagcgcttctttgtggccgacacagccaatgaggccctggaggccgccaagaggctgaatgccaaggagatcgtgctgaaggcccagatcctggccggcggccggggcaaaggagtcttcaacagcggcctgaagggcggcgtgcacctgaccaaggaccccaacgtggtgggccagctggccaagcagatgattggctacaacctggccaccaagcagacccccaaggagggcgtgaaggtgaacaaggtgatggtggccgaggccctggacatcagccgggagacctacctggccatcctgatggacaggagctgcaatggacctgtgctggtgggcagcccccagggcggcgtggacatcgaggaggtggccgccagcaaccctgagctgatcttcaaggagcagattgacatctttgagggcatcaaggacagccaggcccagaggatggccgagaacctgggctttgtgggccccctgaagagccaggtggaggccatcctggtgaacatctttggaggcatcgtgaactgtgccatcatcgccaacggcatcaccaaggcctgccgggagctggagctgaaggtgcccctggtggtgcggctggagggcaccaacgtgcaggaggcccagaagatcctgaacaacagcggcctgcccatcaccagcgccatcgacctggaggatgctgccaagaaggctgtggcctctgtggccaagaagtag

SEQ ID NO: 141267 - DNA, 1299 bp, Artificial Sequence
  derived and/or modified sequence
atggccagccccgtggccgcccaggccggcaagctgctgcgggccctagctctaagaccgcgctttcttgccgctgggagccaggctgtgcagttaacctcacggcggtggctcaacctgcaggagtatcagtctaagaaactaatgtcggacaacggggtgcgcgtgcaacggttcttcgtcgccgacacggccaacgaagccttagaggccgctaagcgccttaacgctaaagaaatcgttctgaaggcccaaatactcgccggaggtcggggaaagggcgttttcaactcaggcctcaaaggaggcgtacacctgacaaaagaccctaatgtagtcggccagctagctaaacaaatgatcggctataatctcgctactaaacagacccccaaagaaggggtgaaggtaaacaaggtcatggtggcggaggcgctggatatctccagggaaacttacctggcaattttaatggacaggagttgcaacgggccagttcttgtgggctcaccgcaaggcggcgtggacattgaagaagttgccgcctcaaacccagagctgatcttcaaagaacaaatcgacatttttgaaggcatcaaggacagccaggctcaacggatggccgagaacctaggctttgtgggccctttgaagtcacaggctgcagatcagatcaccaagctgtataacctatttcttaagatcgatgctactcaggtggaggtcaacccttttggagagacccccgaaggacaggttgtttgcttcgacgctaaaattaacttcgacgacaatgcagagttccgacaaaaggatattttcgcaatggatgataaaagtgagaacgagccgatcgagaatgaagccgccaagtacgacctaaagtatatcggcctagatggaaatattgcgtgctttgtgaatggggctggccttgcaatggctacgtgtgacatcatctttcttaatgggggaaaacctgccaacttcctcgacctgggaggcggcgtcaaagaggcgcaggtatatcaagcttttaaactccttacagccgaccctaaagttgaagcaatcctggtgaatatctttgggggcattgtcaactgtgccatcatcgcgaacgggatcacgaaagcgtgccgtgaattggagttgaaagtccccctggtggttcgtttagaggggacaaacgtgcaagaggcacaaaagatcttgaataatagtggcttgcctattaccagcgcaattgatctggaggacgccgcaaagaaggctgttgcaagcgttgctaaaaagtag

SEQ ID NO: 141268 - DNA, 753 bp, Artificial Sequence
  derived and/or modified sequence
atgagcgacaacggcgtgcgggtgcagcggttcttcgtggccgacactgctaatgaagctctagaggccgccaaaagactaaatgcgaaggagattgttcttaaagctcagattctggccggagggcgcgggaaaggagtgtttaactctggacttaagggaggggtccatctgaccaaggatcctaatgtggtggggcagctggcgaagcagatgatcggctacaatttagccacgaagcagacgcctaaggagggtgtgaaagtgaacaaggtgatggttgctgaggcgttggatatctccagagagacctaccttgcaatcctcatggatcgcagctgcaatgggccagtcctggtaggatcccctcaaggcggagtggatatcgaggaggtggccgcatctaatccggagctcatcttcaaggagcagattgacatcttcgaaggcattaaagattcccaggctcagaggatggctgaaaatctgggatttgtgggcccactgaaaagtcaagtcgaagccatcctggtgaatatatttggaggcattgtgaactgcgccatcatagccaatggcattaccaaggcctgtcgcgaactggagcttaaggtacccctggttgtgcgactcgaggggaccaacgtgcaagaggcacagaagatactcaacaatagcggactgcctataactagtgcaatcgatctggaggatgcagctaaaaaggctgtggccagtgtcgctaagaaatag

SEQ ID NO: 141269 - DNA, 1299 bp, Artificial Sequence
  derived and/or modified sequence
atggcttcacctgtggccgctcaggcgggtaaattactacgagcattggccctccgaccaaggtttctggctgcgggatcacaagccgtacagctgacctctcggagatggttgaatctgcaggaatatcagtccaaaaagctcatgtcggataacggcgtgagagtgcagaggtttttcgtggccgacaccgccaatgaggccttggaagctgccaaacgtttgaacgctaaagagattgttcttaaggcccaaatcctggcaggtggcaggggtaagggggtcttcaattccggtttaaaggggggagtgcatctcacaaaggatcctaacgtcgttgggcagctggccaaacagatgatcggctacaatctggcaaccaaacaaacacccaaggagggcgttaaggtcaataaagtgatggttgctgaggccctcgatatttcccgcgagacatacctggcaattctaatggatcggtcgtgtaacggccctgtccttgtaggttcccctcagggcggtgtcgatatcgaggaagttgctgcctccaatccagagcttatttttaaggaacagatcgacattttcgaaggaattaaggatagccaggcacagcgtatggcagagaatttgggattcgtgggacccttgaaatctcaggctgctgaccagatcactaaactatacaacctctttctgaagattgacgctacccaagtggaagtgaacccctttggtgaaacgccagaagggcaagtggtgtgcttcgacgccaagattaattttgacgacaatgctgagttccggcagaaggacattttcgcgatggatgacaagagtgagaacgagcccatcgaaaatgaggcggcaaaatacgaccttaaatatatcgggcttgacggcaacattgcttgtttcgtgaacggggcagggctggctatggcaacatgcgacatcatcttcttaaatggaggtaagcctgcgaatttccttgacctgggaggcggagtcaaggaggcacaggtgtaccaagcctttaagctgctgactgccgatcctaaggtggaagccatcttggttaacatcttcggtggaattgttaattgcgcgatcattgccaacggcatcactaaagcttgtcgagagttagagctgaaggttcctcttgtagttagactggagggcacgaacgttcaggaggcacagaagattttgaacaattctggcctgccaatcacgagtgccattgatctagaggatgcagccaagaaggccgtggcaagcgtcgccaaaaagtag

SEQ ID NO: 141270 - DNA, 753 bp, Artificial Sequence
  derived and/or modified sequence
atgtctgataatggcgtccgagtgcagaggttctttgtggccgatacagcaaacgaggctctcgaagccgcaaagcgacttaacgcaaaggagatagtattgaaagcccagattcttgcaggcggtcgcggaaagggcgtgttcaactcgggcctgaagggaggggttcatctgaccaaagacccaaacgtggtgggacaactggccaagcagatgatcggttacaacctggccactaagcaaactcctaaggagggtgtgaaggtgaataaggtgatggtggccgaagcgctcgacatctctcgggagacctacttggctatccttatggatcgatcgtgtaatggacctgtcctcgtaggcagccctcagggaggcgtggacatcgaggaggtagccgctagcaatcccgaactgatctttaaggaacaaattgacatattcgagggaattaaggactcccaggctcagcgcatggctgaaaacctcggatttgtggggccacttaaatctcaggtggaagcgatactcgtgaatatattcgggggaatagtgaactgtgctatcatcgccaacggcattactaaggcttgccgcgagctcgaactaaaagtgcctctggttgttcggttggaaggcaccaatgtccaggaggctcaaaaaatactcaacaatagtggtctgccaattaccagtgcgatcgatctggaagatgcggctaagaaggcagtagccagtgtggctaagaaatag

SEQ ID NO: 141271 - DNA, 2352 bp, Artificial Sequence
  derived and/or modified sequence
ctgccccgtgccgagtttcctgtttaagatggcgtcccccgtagcagcgcaggccgggaagcttctgcgagccctagcgctgcggccccgcttcctggcggccgggtcccaggcagttcaattaacctccagaagatggctgaacctgcaggaataccagagcaagaaactgatgtctgacaacggagtgagagttcaaagattctttgtagcagacactgcaaatgaagctctcgaggctgctaagagactaaatgcaaaagaaattgttttaaaagcccagatcttagctggaggaagaggaaaaggtgtcttcaatagtggtttgaaaggaggtgttcatttaacaaaagaccctaatgttgtgggacagctggctaaacagatgattgggtacaatctagcgacaaaacaaactccaaaagaaggtgtgaaagttaacaaggtgatggttgctgaagccttggatatttccagagaaacctacctggcaattctgatggaccggtcctgcaatggccccgtgctggtgggcagcccccaggggggcgtcgacattgaagaggtggctgcttcaaacccggagctcatttttaaggagcaaattgacatttttgaaggaataaaggacagccaagctcagcggatggccgaaaatctaggcttcgttgggcctttgaaaagccaggctgcagatcaaattacgaagctgtataatctcttcctgaaaattgatgctactcaggtggaagtgaatccctttggtgaaactccagaaggacaagttgtctgttttgatgccaagataaactttgatgacaacgcagaattccgacaaaaagacatatttgctatggacgacaaatcagagaatgagcccattgaaaatgaagctgccaaatatgatctaaaatacataggactagatgggaacattgcctgctttgtgaatggtgctgggctcgccatggctacttgtgatatcattttccttaatggtgggaagccagccaacttcttggatcttggaggtggtgtaaaggaagctcaagtatatcaagcattcaaattgctcacagctgatcctaaggttgaagccatccttgtcaatatatttggtggtatcgtcaactgtgccatcattgccaatgggatcaccaaagcctgccgggagctagaactcaaggtgcccctggtggtccggcttgaaggaaccaacgtccaagaggcccagaagatactcaacaacagcggactccccattacttcagccattgacctggaggatgcagccaagaaggctgtggccagtgtggccaagaagtgatgtctttgtcctgatccaatggagaaagaaagccatttttccgtaaaaagggatggttcatcattgtgaaagaaatggttatctcattggggaagaaaaggggagggggaaggcaagaatcactgaaaaatcttaaatctgtgttttctggaataagatatctagacagcctaaatctgattttggtctttataaaaataatatcttgtgttctcatacttttctgtcactgtaagcctgcccagtaggcagtgttttgcagactttggggagtggtctatgtggccaaatattgtgtgtatagacagaatttgaaatcaagtcctgcttcatttacaagaattttggtgggcatctaatcctacataatgaaaaagaaaaacagaccatttaaaaactcagacaagattatatttaatatattaattactaaaaaggcataagattacactgaacatattagctactaaaaaggcactgctaagacattcaagcaaatagctattacacactactgcagattttacaggtttctaattctaacatatgtttgaaaaatccgtgagtattccaaaatatatttaataatggaatatctgcattaatataccatccatgtgtttttaccatttgccttaatattgaatatactgtttacctcacactaaaaagaaaaccagaagccttatttgtgattttgggagtggaagcttccatttttgtgtcaaaaatgaatcctgattcttatggaaatctctgttattaagatatttcaagatgagacaacactgaagatcaaattgtgtttagtatcactatcttctctcctcgtttctctcttactcctcatcctcccagaatctaccagtttatggtagaaagatgggaaccttatttgaatgtgttttttttttccatgatgtccaattttgttgtgggaaaggatttggataaaatttttgtttaaattttggtagatttttatctatacaaatttaaataaaattatgttttgtaagctgtaa

SEQ ID NO: 141272 - DNA, 1948 bp, Artificial Sequence
  derived and/or modified sequence
ctgccccgtgccgagtttcctgtttaagatggcgtcccccgtagcagcgcaggccgggaagcttctgcgagccctagcgctgcggccccgcttcctggcggccgggtcccaggcagttcaattaacctccagaagatggctgaacctgcaggaataccagagcaagaaactgatgtctgacaacggagtgagagttcaaagattctttgtagcagacactgcaaatgaagctctcgaggctgctaagagactaaatgcaaaagaaattgttttaaaagcccagatcttagctggaggaagaggaaaaggtgtcttcaatagtggtttgaaaggaggtgttcatttaacaaaagaccctaatgttgtgggacagctggctaaacagatgattgggtacaatctagcgacaaaacaaactccaaaagaaggtgtgaaagttaacaaggtgatggttgctgaagccttggatatttccagagaaacctacctggcaattctgatggaccggtcctgcaatggccccgtgctggtgggcagcccccaggggggcgtcgacattgaagaggtggctgcttcaaacccggagctcatttttaaggagcaaattgacatttttgaaggaataaaggacagccaagctcagcggatggccgaaaatctaggcttcgttgggcctttgaaaagccaggttgaagccatccttgtcaatatatttggtggtatcgtcaactgtgccatcattgccaatgggatcaccaaagcctgccgggagctagaactcaaggtgcccctggtggtccggcttgaaggaaccaacgtccaagaggcccagaagatactcaacaacagcggactccccattacttcagccattgacctggaggatgcagccaagaaggctgtggccagtgtggccaagaagtgatgtctttgtcctgatccaatggagaaagaaagccatttttccgtaaaaagggatggttcatcattgtgaaagaaatggttatctcattggggaagaaaaggggagggggaaggcaagaatcactgaaaaatcttaaatctgtgttttctggaataagatatctagacagcctaaatctgattttggtctttataaaaataatatcttgtgttctcatacttttctgtcactgtaagcctgcccagtaggcagtgttttgcagactttggggagtggtctatgtggccaaatattgtgtgtatagacagaatttgaaatcaagtcctgcttcatttacaagaattttggtgggcatctaatcctacataatgaaaaagaaaaacagaccatttaaaaactcagacaagattatatttaatatattaattactaaaaaggcataagattacactgaacatattagctactaaaaaggcactgctaagacattcaagcaaatagctattacacactactgcagattttacaggtttctaattctaacatatgtttgaaaaatccgtgagtattccaaaatatatttaataatggaatatctgcattaatataccatccatgtgtttttaccatttgccttaatattgaatatactgtttacctcacactaaaaagaaaaccagaagccttatttgtgattttgggagtggaagcttccatttttgtgtcaaaaatgaatcctgattcttatggaaatctctgttattaagatatttcaagatgagacaacactgaagatcaaattgtgtttagtatcactatcttctctcctcgtttctctcttactcctcatcctcccagaatctaccagtttatggtagaaagatgggaaccttatttgaatgtgttttttttttccatgatgtccaattttgttgtgggaaaggatttggataaaatttttgtttaaattttggtagatttttatctatacaaatttaaataaaattatgttttgtaagctgt

SEQ ID NO: 141273 - protein, 346 aa, Artificial Sequence
  derived and/or modified sequence
MTATLAAAADIATMVSGSSGLAAARLLSRSFLLPQNGIRHCSYTASRQHLYVDKNTKIICQGFTGKQGTFHSQQALEYGTKLVGGTTPGKGGQTHLGLPVFNTVKEAKEQTGATASVIYVPPPFAAAAINEAIEAEIPLVVCITEGIPQQDMVRVKHKLLRQEKTRLIGPNCPGVINPGECKIGIMPGHIHKKGRIGIVSRSGTLTYEAVHQTTQVGLGQSLCVGIGGDPFNGTDFIDCLEIFLNDSATEGIILIGEIGGNAEENAAEFLKQHNSGPNSKPVVSFIAGLTAPPGRRMGHAGAIIAGGKGGAKEKISALQSAGVVVSMSPAQLGTTIYKEFEKRKML

SEQ ID NO: 141274 - DNA, 1041 bp, Artificial Sequence
  derived and/or modified sequence
atgaccgccaccctggccgccgccgccgacatcgccaccatggtgagcggcagcagcggcctggccgccgccagactgctgagcagaagcttcctgctgccccagaacggcatcagacactgcagctacaccgccagcagacagcacctgtacgtggacaagaacaccaagatcatctgccagggcttcaccggcaagcagggcaccttccacagccagcaggccctggagtacggcaccaagctggtgggcggcaccacccccggcaagggcggccagacccacctgggcctgcccgtgttcaacaccgtgaaggaggccaaggagcagaccggcgccaccgccagcgtgatctacgtgcccccccccttcgccgccgccgccatcaacgaggccatcgaggccgagatccccctggtggtgtgcatcaccgagggcatcccccagcaggacatggtgagagtgaagcacaagctgctgagacaggagaagaccagactgatcggccccaactgccccggcgtgatcaaccccggcgagtgcaagatcggcatcatgcccggccacatccacaagaagggcagaatcggcatcgtgagcagaagcggcaccctgacctacgaggccgtgcaccagaccacccaggtgggcctgggccagagcctgtgcgtgggcatcggcggcgaccccttcaacggcaccgacttcatcgactgcctggagatcttcctgaacgacagcgccaccgagggcatcatcctgatcggcgagatcggcggcaacgccgaggagaacgccgccgagttcctgaagcagcacaacagcggccccaacagcaagcccgtggtgagcttcatcgccggcctgaccgccccccccggcagaagaatgggccacgccggcgccatcatcgccggcggcaagggcggcgccaaggagaagatcagcgccctgcagagcgccggcgtggtggtgagcatgagccccgcccagctgggcaccaccatctacaaggagttcgagaagagaaagatgctgtag

SEQ ID NO: 141275 - DNA, 1041 bp, Artificial Sequence
  derived and/or modified sequence
atgaccgctacgctcgccgcggcagcagacatcgccaccatggtctccggctcatctgggctcgccgcagctaggctgttaagtcgcagcttcctcctccctcaaaacggaatcaggcattgttcatacaccgcctcccggcaacatctttatgtggataagaataccaagatcatctgccagggcttcacgggcaagcagggcacatttcattctcagcaagcactggaatacgggacaaaacttgtgggaggcacaactcctgggaaggggggacagacccatctggggctgccagtgttcaacacagtaaaggaggccaaggagcagaccggtgccactgccagtgtcatttacgtgcccccaccctttgcagccgccgccattaacgaggccatagaggccgaaatccctctggtggtttgcatcacggaagggattccccagcaagatatggtgagggttaaacacaagctgctccggcaggaaaagactagacttatcggaccaaactgtccaggggtgattaatcctggagagtgtaagattgggattatgcctggccacatccataagaagggtaggatcggcattgtttcccgcagtggaactctgacctacgaggccgtacaccagaccacacaagttggcttggggcaaagcttgtgcgtaggcattgggggcgaccctttcaacggaaccgacttcattgattgcctggagatcttccttaatgacagcgccaccgaaggaattattctgattggggagatcggggggaatgctgaggagaatgccgccgagtttttgaaacagcataacagtggacctaattccaagcccgtggtttccttcatcgcaggcctgacagcacctcccgggcgacgcatgggacacgctggggctattatagccgggggcaaggggggtgcaaaagagaagattagcgcattgcagtcagccggagtggtggtttcaatgtctcctgcacaacttggcacaacgatctataaagaatttgagaagcggaaaatgctttag

SEQ ID NO: 141276 - DNA, 1041 bp, Artificial Sequence
  derived and/or modified sequence
atgacagccaccctggccgctgctgctgacatcgccaccatggtgtctggcagcagcggcctggccgccgcccggctgctgagccgctccttcctgctgccccagaatggcatccgccactgcagctacacagccagccggcagcacctgtatgtggacaagaacaccaagatcatctgccagggcttcaccgggaagcagggcaccttccacagccagcaggccctggagtatggcaccaagctggtgggcggcaccacccctgggaagggcggccagacccacctgggcctgcctgtgttcaacacagtgaaggaggccaaggagcagacaggagccacagccagcgtcatctacgtgcccccaccatttgctgctgctgccatcaatgaggccattgaagctgagatccccctggtggtgtgcatcacagagggcatcccccagcaggacatggtgcgggtgaagcacaagctgctgcggcaggagaagaccaggctcatcggccccaactgccctggggtcatcaaccctggagagtgcaagattggcatcatgcctggccacatccacaagaagggccgcatcggcatcgtgagccgcagcggcaccctgacctatgaagctgtgcaccagaccacccaggtgggcctgggccagagcctgtgtgtgggcatcggcggggaccccttcaacggcacagacttcatcgactgcctggagatcttcctgaatgattctgccacagagggcatcatcctgattggagagatcggcggcaatgctgaggagaatgctgctgagttcctgaagcagcacaacagcggccccaacagcaagcctgtggtgtccttcatcgccggcctgacagcccctcctggaagaaggatgggccacgccggggccatcatcgccggcggcaagggcggggccaaggagaagatcagcgccctgcagagcgctggggtggtggtgtccatgagccctgcccagctgggcaccaccatctacaaggagtttgagaagaggaagatgctgtag

SEQ ID NO: 141277 - DNA, 1041 bp, Artificial Sequence
  derived and/or modified sequence
atgaccgccaccctggccgccgccgccgacatcgccaccatggtgtccggctcgtctggtctggctgccgctaggctgctgtcgagatcatttctcctgccccaaaatggaatcagacactgctcttatacagcatcccgacagcatttgtacgtggataagaataccaagatcatctgtcagggctttaccggtaagcagggcacattccacagccagcaagctcttgagtatgggaccaaacttgttggggggaccactccaggtaaaggggggcagacacacctcggactgcctgtattcaatacagtcaaggaggccaaggagcaaactggagcaacggcttccgtgatatatgtgccacctccatttgcagccgcagccattaatgaagcaattgaggctgaaattccactggtggtgtgtattacggaaggtatcccacagcaggacatggtcagagtgaaacacaaactgctgaggcaggaaaagacgaggctgatcgggcctaactgccccggggtaatcaacccgggcgaatgtaaaattggaataatgcctgggcacattcacaaaaagggcagaatcggcattgtgtcacgcagtggcaccctgacctatgaagcagtgcatcagacgacacaggtgggccttggacagtccctttgtgtcggtatcggaggcgaccccttcaatggaaccgacttcattgactgtctagaaatcttcctgaacgatagtgcaacagagggaatcatcttgatcggagagatcgggggtaatgctgaggagaacgcagctgagttccttaagcaacataattctgggccaaacagtaagccagtagtctctttcattgcaggtctgaccgcacctcccggtagaagaatgggccatgctggggccatcatagccggaggcaagggcggagcgaaggagaaaattagtgccctgcaatctgcgggcgtcgtggttagcatgagtccagcccagctgggaaccactatctacaaggagttcgagaaacggaaaatgttgtag

SEQ ID NO: 141278 - DNA, 1041 bp, Artificial Sequence
  derived and/or modified sequence
atgactgcaaccttggccgctgctgcagacattgccaccatggtgtccggcagttcaggtttagccgcagctcggttgttaagtcggagctttcttttgccccagaacggcatcagacattgcagctataccgcctccaggcagcatctgtatgtggacaagaacacaaaaatcatttgtcagggattcacaggaaagcagggtactttccacagccagcaggccctggagtacggaaccaagctggtggggggaaccacaccaggcaagggagggcagactcacctgggtctgccagtatttaacactgtcaaagaagctaaggaacagacgggagccacagcttcagtgatctacgtgccacccccatttgctgctgctgcgatcaatgaggctatcgaagccgaaatacctctagttgtttgcataacagagggcattccgcaacaggatatggtacgagtgaaacataaattattacgccaggaaaagactaggctgattggacccaactgcccaggggtgatcaacccgggagaatgcaaaatagggataatgccgggtcatatccataaaaaagggaggataggtatcgtgtcacgatcaggcacactcacgtacgaggcagttcaccagaccactcaggtcggtttgggtcagtctctgtgcgttgggatcggcggagaccctttcaatggtacggatttcatcgactgtttggaaatttttctcaacgacagcgctaccgagggaatcattcttattggtgagatcgggggaaatgccgaagagaacgcagctgagttcctgaagcagcacaacagtggcccaaattcgaaacccgtagtaagttttatcgctgggctcaccgccccaccaggacggaggatgggacatgccggagctataattgctgggggtaagggcggagcaaaagagaagatttctgctttgcagtcagcaggcgtagtggtgtccatgagcccagcccagttaggcaccaccatttacaaggaatttgaaaaaaggaagatgctgtag

SEQ ID NO: 141279 - DNA, 1475 bp, Artificial Sequence
  derived and/or modified sequence
atgttaatcaaacccacatttctaggaaggagccgagttattatctgcctctccgataggatgcctctttgtcttcacctgccattcccgctgtttcgtgaagaatcctctgtaaagggaaatttgttcaggcgactgctgtggccaccctctgcctcctccggcctctgcccctgggaggtccccgggggcctgggagtgtcattggcgtatgaccgcaacccttgccgctgccgctgacatcgctaccatggtctccggcagcagcggcctcgccgccgcccgtctcctgtcgcgcagcttcctcctgccgcagaatggaattcggcattgttcctacacagcttctcggcaacatctctatgttgataaaaatacaaagattatttgccagggtttcactggcaaacagggcacctttcacagccagcaggcattggaatatggcaccaaactcgttggaggaaccactccagggaaaggaggccagacacatctgggcttacctgtctttaatactgtgaaggaggccaaagaacagacaggagcaacggcttctgtcatttatgttcctccgccttttgctgctgctgccattaatgaagctattgaggcagaaattcccttggttgtgtgtatcactgaaggaattccccagcaggacatggtacgagtcaagcacaaactgctgcgccaggaaaagacaaggctaattgggcccaactgccctggagtcatcaatcctggagaatgtaaaattggcatcatgcctggccatattcacaaaaaaggaaggattggcattgtgtccagatctggcaccctgacttatgaagcagttcaccaaacaacgcaagttggattggggcagtctttgtgcgttggcattggaggtgatccttttaatggaacagattttattgactgcctcgaaatctttttgaacgattctgccacagaaggcatcatattgattggtgaaattggtggtaatgcagaagagaatgctgcagaatttttgaagcaacataattcaggtccaaattccaagcctgtagtgtccttcattgctggtttaactgctcctcctgggagaagaatgggtcatgccggggcaattattgctggaggaaaaggtggagctaaagagaagatctctgcccttcagagtgcaggagttgtggtcagtatgtctcctgcacagctgggaaccacgatctacaaggaatttgaaaagaggaagatgctatgaaagaaaaaaaaaattcctaaaactgtggaatggatcacgtagacatgtaacccagcagcagtttgcttctgttgtccactgattaatcagcctatgtgcctgacactggtcttgcagtacaactggaagccaaaacaaggtggaagatgtcctgaattaagatgttttcaccacattgtattacagagacagccaataaatctactatttgatttcaatatgg

SEQ ID NO: 141280 - protein, 154 aa, Artificial Sequence
  derived and/or modified sequence
MAASMFYGRLVAVATLRNHRPRTAQRAAAQGPVLIGSSHGGVNIEDVAAESPEAIIKEPIDIEEGIKKEQALQLAQKMGFPPNIVESAAENMVKLYSLFLKYDATMIEINPMVEDSDGAVLCMDAKINFDSNSAYRQKKIFDLQDWTQEDERDK

SEQ ID NO: 141281 - protein, 298 aa, Artificial Sequence
  derived and/or modified sequence
SGRGHPSEPPASDGPAGCCSGSKDVVIKAQVLAGGRGKGTFESGLKGGVKIVFSPEEAKAVSSQMIGKKLFTKQTGEKGRICNQVLVCERKYPRREYYFAITMERSFQGPVLIGSSHGGVNIEDVAAESPEAIIKEPIDIEEGIKKEQALQLAQKMGFPPNIVESAAENMVKLYSLFLKYDATMIEINPMVEDSDGAVLCMDAKINFDSNSAYRQKKIFDLQDWTQEDERDKDAAKANLNYIGLDGNIGCLVNGAGLAMATMDIIKLHGGTPANFLDVGGGATVHQVTEAFKLITSDK

SEQ ID NO: 141282 - protein, 441 aa, Artificial Sequence
  derived and/or modified sequence
MAASMFYGRLVAVATLRNHRPRTAQQQQRNLSLHEYMSMELLQEAGVSVPKGYVAKSPDEAYAIAKKLGSKDVVIKAQVLAGGRGKGTFESGLKGGVKIVFSPEEAKAVSSQMIGKKLFTKQTGEKGRICNQVLVCERKYPRREYYFAITMERSFQGPVLIGSSHGGVNIEDVAAESPEAIIKEPIDIEEGIKKEQALQLAQKMGFPPNIVESAAENMVKLYSLFLKYDATMIEINPMVEDSDGAVLCMDAKINFDSNSAYRQKKIFDLQDWTQEDERDKDAAKANLNYIGLDGNIGCLVNGAGLAMATMDIIKLHGGTPANFLDVGGGATVHQVTEAFKLITSDKKVLAILVNIFGGIMRCDVIAQGIVMAVKDLEIKIPVVVRLQGTRVDDAKALIADSGLKILACDDLDEAARMVVKLSEIVTLAKQAHVDVKFQLPI

SEQ ID NO: 141283 - protein, 463 aa, Artificial Sequence
  derived and/or modified sequence
MAASMFYGRLVAVATLRNHRPRTAQRAAAQVLGSSGLFNNHGLQVQQQQQRNLSLHEYMSMELLQEAGVSVPKGYVAKSPDEAYAIAKKLGSKDVVIKAQVLAGGRGKGTFESGLKGGVKIVFSPEEAKAVSSQMIGKKLFTKQTGEKGRICNQVLVCERKYPRREYYFAITMERSFQGPVLIGSSHGGVNIEDVAAESPEAIIKEPIDIEEGIKKEQALQLAQKMGFPPNIVESAAENMVKLYSLFLKYDATMIEINPMVEDSDGAVLCMDAKINFDSNSAYRQKKIFDLQDWTQEDERDKDAAKANLNYIGLDGNIGCLVNGAGLAMATMDIIKLHGGTPANFLDVGGGATVHQVTEAFKLITSDKKVLAILVNIFGGIMRCDVIAQGIVMAVKDLEIKIPVVVRLQGTRVDDAKALIADSGLKILACDDLDEAARMVVKLSEIVTLAKQAHVDVKFQLPI

SEQ ID NO: 141284 - protein, 405 aa, Artificial Sequence
  derived and/or modified sequence
MSMELLQEAGVSVPKGYVAKSPDEAYAIAKKLGSKDVVIKAQVLAGGRGKGTFESGLKGGVKIVFSPEEAKAVSSQMIGKKLFTKQTGEKGRICNQVLVCERKYPRREYYFAITMERSFQGPVLIGSSHGGVNIEDVAAESPEAIIKEPIDIEEGIKKEQALQLAQKMGFPPNIVESAAENMVKLYSLFLKYDATMIEINPMVEDSDGAVLCMDAKINFDSNSAYRQKKIFDLQDWTQEDERDKDAAKANLNYIGLDGNIGCLVNGAGLAMATMDIIKLHGGTPANFLDVGGGATVHQVTEAFKLITSDKKVLAILVNIFGGIMRCDVIAQGIVMAVKDLEIKIPVVVRLQGTRVDDAKALIADSGLKILACDDLDEAARMVVKLSEIVTLAKQAHVDVKFQLPI

SEQ ID NO: 141285 - protein, 291 aa, Artificial Sequence [sequence omitted]

SEQ ID NO: 141286 - protein, 329 aa, Artificial Sequence
  derived and/or modified sequence
MIGKKLFTKQTGEKGRICNQVLVCERKYPRREYYFAITMERSFQGPVLIGSSHGGVNIEDVAAESPEAIIKEPIDIEEGIKKEQALQLAQKMGFPPNIVESAAENMVKLYSLFLKYDATMIEINPMVEDSDGAVLCMDAKINFDSNSAYRQKKIFDLQDWTQEDERDKDAAKANLNYIGLDGNIGCLVNGAGLAMATMDIIKLHGGTPANFLDVGGGATVHQVTEAFKLITSDKKVLAILVNIFGGIMRCDVIAQGIVMAVKDLEIKIPVVVRLQGTRVDDAKALIADSGLKILACDDLDEAARMVVKLSEIVTLAKQAHVDVKFQLPI

SEQ ID NO: 141287 - DNA, 1326 bp, Artificial Sequence
  derived and/or modified sequence
atggccgccagcatgttctacggcagactggtggccgtggccaccctgagaaaccacagacccagaaccgcccagcagcagcagagaaacctgagcctgcacgagtacatgagcatggagctgctgcaggaggccggcgtgagcgtgcccaagggctacgtggccaagagccccgacgaggcctacgccatcgccaagaagctgggcagcaaggacgtggtgatcaaggcccaggtgctggccggcggcagaggcaagggcaccttcgagagcggcctgaagggcggcgtgaagatcgtgttcagccccgaggaggccaaggccgtgagcagccagatgatcggcaagaagctgttcaccaagcagaccggcgagaagggcagaatctgcaaccaggtgctggtgtgcgagagaaagtaccccagaagagagtactacttcgccatcaccatggagagaagcttccagggccccgtgctgatcggcagcagccacggcggcgtgaacatcgaggacgtggccgccgagagccccgaggccatcatcaaggagcccatcgacatcgaggagggcatcaagaaggagcaggccctgcagctggcccagaagatgggcttcccccccaacatcgtggagagcgccgccgagaacatggtgaagctgtacagcctgttcctgaagtacgacgccaccatgatcgagatcaaccccatggtggaggacagcgacggcgccgtgctgtgcatggacgccaagatcaacttcgacagcaacagcgcctacagacagaagaagatcttcgacctgcaggactggacccaggaggacgagagagacaaggacgccgccaaggccaacctgaactacatcggcctggacggcaacatcggctgcctggtgaacggcgccggcctggccatggccaccatggacatcatcaagctgcacggcggcacccccgccaacttcctggacgtgggcggcggcgccaccgtgcaccaggtgaccgaggccttcaagctgatcaccagcgacaagaaggtgctggccatcctggtgaacatcttcggcggcatcatgagatgcgacgtgatcgcccagggcatcgtgatggccgtgaaggacctggagatcaagatccccgtggtggtgagactgcagggcaccagagtggacgacgccaaggccctgatcgccgacagcggcctgaagatcctggcctgcgacgacctggacgaggccgccagaatggtggtgaagctgagcgagatcgtgaccctggccaagcaggcccacgtggacgtgaagttccagctgcccatctag

SEQ ID NO: 141288 - DNA, 1392 bp, Artificial Sequence
  derived and/or modified sequence
atggccgccagcatgttctacggcagactggtggccgtggccaccctgagaaaccacagacccagaaccgcccagagagccgccgcccaggtgctgggcagcagcggcctgttcaacaaccacggcctgcaggtgcagcagcagcagcagagaaacctgagcctgcacgagtacatgagcatggagctgctgcaggaggccggcgtgagcgtgcccaagggctacgtggccaagagccccgacgaggcctacgccatcgccaagaagctgggcagcaaggacgtggtgatcaaggcccaggtgctggccggcggcagaggcaagggcaccttcgagagcggcctgaagggcggcgtgaagatcgtgttcagccccgaggaggccaaggccgtgagcagccagatgatcggcaagaagctgttcaccaagcagaccggcgagaagggcagaatctgcaaccaggtgctggtgtgcgagagaaagtaccccagaagagagtactacttcgccatcaccatggagagaagcttccagggccccgtgctgatcggcagcagccacggcggcgtgaacatcgaggacgtggccgccgagagccccgaggccatcatcaaggagcccatcgacatcgaggagggcatcaagaaggagcaggccctgcagctggcccagaagatgggcttcccccccaacatcgtggagagcgccgccgagaacatggtgaagctgtacagcctgttcctgaagtacgacgccaccatgatcgagatcaaccccatggtggaggacagcgacggcgccgtgctgtgcatggacgccaagatcaacttcgacagcaacagcgcctacagacagaagaagatcttcgacctgcaggactggacccaggaggacgagagagacaaggacgccgccaaggccaacctgaactacatcggcctggacggcaacatcggctgcctggtgaacggcgccggcctggccatggccaccatggacatcatcaagctgcacggcggcacccccgccaacttcctggacgtgggcggcggcgccaccgtgcaccaggtgaccgaggccttcaagctgatcaccagcgacaagaaggtgctggccatcctggtgaacatcttcggcggcatcatgagatgcgacgtgatcgcccagggcatcgtgatggccgtgaaggacctggagatcaagatccccgtggtggtgagactgcagggcaccagagtggacgacgccaaggccctgatcgccgacagcggcctgaagatcctggcctgcgacgacctggacgaggccgccagaatggtggtgaagctgagcgagatcgtgaccctggccaagcaggcccacgtggacgtgaagttccagctgcccatctag

SEQ ID NO: 141289 - DNA, 1218 bp, Artificial Sequence
  derived and/or modified sequence
atgagcatggagctgctgcaggaggccggcgtgagcgtgcccaagggctacgtggccaagagccccgacgaggcctacgccatcgccaagaagctgggcagcaaggacgtggtgatcaaggcccaggtgctggccggcggcagaggcaagggcaccttcgagagcggcctgaagggcggcgtgaagatcgtgttcagccccgaggaggccaaggccgtgagcagccagatgatcggcaagaagctgttcaccaagcagaccggcgagaagggcagaatctgcaaccaggtgctggtgtgcgagagaaagtaccccagaagagagtactacttcgccatcaccatggagagaagcttccagggccccgtgctgatcggcagcagccacggcggcgtgaacatcgaggacgtggccgccgagagccccgaggccatcatcaaggagcccatcgacatcgaggagggcatcaagaaggagcaggccctgcagctggcccagaagatgggcttcccccccaacatcgtggagagcgccgccgagaacatggtgaagctgtacagcctgttcctgaagtacgacgccaccatgatcgagatcaaccccatggtggaggacagcgacggcgccgtgctgtgcatggacgccaagatcaacttcgacagcaacagcgcctacagacagaagaagatcttcgacctgcaggactggacccaggaggacgagagagacaaggacgccgccaaggccaacctgaactacatcggcctggacggcaacatcggctgcctggtgaacggcgccggcctggccatggccaccatggacatcatcaagctgcacggcggcacccccgccaacttcctggacgtgggcggcggcgccaccgtgcaccaggtgaccgaggccttcaagctgatcaccagcgacaagaaggtgctggccatcctggtgaacatcttcggcggcatcatgagatgcgacgtgatcgcccagggcatcgtgatggccgtgaaggacctggagatcaagatccccgtggtggtgagactgcagggcaccagagtggacgacgccaaggccctgatcgccgacagcggcctgaagatcctggcctgcgacgacctggacgaggccgccagaatggtggtgaagctgagcgagatcgtgaccctggccaagcaggcccacgtggacgtgaagttccagctgcccatctag

SEQ ID NO: 141290 - DNA, 1326 bp, Artificial Sequence
  derived and/or modified sequence
atggcggcctctatgttttacggtcggctggtggcagtagcgaccctgcgaaatcatcgccctagaacagctcagcagcaacaacggaacctgagtctacacgagtacatgtccatggaactcctgcaggaagcaggggtctcggtaccgaagggatacgtggccaagtctcctgacgaggcctatgcaatcgccaagaagttgggatctaaggatgtggtgattaaggctcaagtgctagccgggggtcgggggaagggtacgttcgagtctgggcttaaggggggggtaaaaatagttttttctcctgaggaagccaaggctgttagcagtcaaatgataggtaagaagctgttcacaaagcagaccggcgagaagggtagaatttgcaaccaggtgctcgtctgcgagcggaaatatcctaggagagaatactacttcgccatcacaatggagagatctttccagggtcccgtgttaatcggaagctcgcacggtggcgttaacatcgaggatgtcgctgccgaaagtcctgaagccattatcaaagagcctattgatatagaggagggaataaagaaagagcaagcattgcagttggctcaaaagatgggatttccccctaatatcgttgagagcgctgctgagaatatggttaaactctattcccttttcctaaagtatgatgcaacaatgatcgaaattaatcctatggtggaagactctgatggagcagtgttgtgcatggatgctaagatcaatttcgactccaatagcgcctaccgacagaaaaaaatttttgatcttcaggactggacccaggaagacgagagagataaggatgccgctaaggccaatctcaactacattggacttgatggcaatattgggtgccttgtgaatggggcggggttggccatggctaccatggacatcattaagctgcatgggggcacccccgctaactttttggatgtgggaggcggggccacagtgcaccaggtgaccgaggccttcaagctgattaccagtgataaaaaggtgcttgccattctcgtcaacatctttggcggcataatgcgctgcgacgtcatagcacaggggatcgtgatggccgtgaaggacttagagatcaagatcccagtggtggttaggctgcagggaacccgggtggacgacgccaaagccctgattgctgattctggccttaagatactggcctgcgatgacctggacgaggcagcccggatggttgttaagctgagcgagattgtgacattggcaaagcaggctcacgtcgacgttaagtttcagctgccaatctag

SEQ ID NO: 141291 - DNA, 1392 bp, Artificial Sequence
  derived and/or modified sequence
atggcggcaagtatgttctatgggaggctcgttgccgtggctaccctccgcaaccataggccaaggacagcacagcgagccgcagcgcaggtgctgggaagctctgggctcttcaataaccatggattacaggtgcagcagcaacagcagaggaatctgagtctacacgaatacatgtccatggagttattgcaggaagcaggcgtgagtgtgcctaagggatacgtggctaagtcccctgacgaagcctacgccatcgcaaaaaaactgggtagtaaggacgtcgtcataaaagcacaggtccttgcgggtggtagaggtaaaggcacattcgagagcggtcttaaaggcggagtcaaaatcgtgttttcccccgaggaggctaaggcagtgtcctcccaaatgattggcaagaagctgttcacaaagcagacaggagagaaaggtaggatttgtaaccaagtgttggtgtgtgagcggaagtatccccgacgcgagtattacttcgccatcacaatggagcggtctttccagggccccgtgctcatcggcagctcacacggtggagtcaatatagaggacgtagctgcggagtcacccgaggccatcatcaaggaacccatcgacatagaagaggggatcaaaaaggaacaggctctgcagctggcacaaaagatggggttcccgccaaacattgtagagtctgcagcagaaaatatggtgaaactgtacagtcttttcttgaagtatgacgccaccatgatcgaaatcaaccccatggtcgaagactccgacggtgctgtcctgtgtatggacgcaaagatcaattttgacagcaactcggcctatcgacagaaaaaaatctttgatctgcaggattggacccaggaggatgagagggacaaggatgcggccaaggcaaatctaaattacattgggttagatggaaacatcggctgcctggtcaatggcgccggccttgccatggcgaccatggatataattaaacttcacggcggcacccccgccaattttctggacgtcggaggtggggccacagtccaccaagtaaccgaggccttcaaattgatcacctccgacaaaaaagtcctggctatcctggtgaatatcttcggcgggatcatgcgatgcgatgttattgcccagggaattgtgatggctgtgaaggacctggagataaaaatcccggtcgtggtccgtctccagggaacacgggttgacgacgcgaaagcgctcatagccgattctggcttaaagatcttggcttgcgatgatctggacgaggccgcacgcatggttgtcaagttgtcagaaatcgtgaccctcgcaaagcaggcccacgtggatgtgaagtttcagttacctatttag

SEQ ID NO: 141292 - DNA, 1218 bp, Artificial Sequence
  derived and/or modified sequence
atgtcaatggaacttttacaggaggctggcgtgtcggtacccaagggatacgttgcaaagtctcccgacgaggcatacgctatcgctaagaagctggggtctaaggatgtggtaatcaaagctcaagtgctggccggtggtcgcgggaagggtaccttcgagtctggcctgaaggggggcgtgaaaatcgttttcagtcctgaagaggcaaaggctgtgagctctcagatgatcggtaaaaagctctttactaaacagacaggtgaaaagggtagaatctgcaatcaggtgctggtgtgcgagcgcaagtatcctaggagggaatactattttgcaataaccatggagcgaagcttccaaggtcccgtgctcatcggctcttctcatggcggcgtcaacattgaggatgtggcggccgagagtcccgaggcgatcataaaggaacctatagatattgaggaaggaataaagaaagagcaggcccttcagctggcccagaaaatgggcttccctcctaacattgtggaaagtgccgccgaaaatatggtgaagctgtattcactctttttgaaatatgatgctactatgattgaaatcaaccctatggtcgaagacagcgatggtgctgtcctttgtatggatgcaaagatcaacttcgattcgaactctgcttacagacagaaaaaaatcttcgatctgcaggactggacgcaagaagatgagcgggacaaagacgccgcgaaggcaaatctgaattatattggactggatgggaacatagggtgtctggtcaatggggccgggctagcgatggcgacaatggatattattaagctgcacggggggacacctgcaaattttcttgatgtgggaggcggagctaccgtccaccaagtgaccgaggctttcaaattgatcacgtccgacaagaaagtgttggcaatcctggtgaatatctttgggggcatcatgcggtgtgacgtaatcgcccaaggcatagttatggccgtcaaggacctggaaataaagattccagttgtcgtccgcttacaggggacgcgcgtagatgatgctaaagcccttattgctgacagcggcctgaagatattggcttgcgacgacctggacgaggcagctcgaatggtggtgaagctgtcagagatcgtcacattagctaaacaggcccacgtcgacgttaagttccagctccctatctag

SEQ ID NO: 141293 - DNA, 1218 bp, Artificial Sequence
  derived and/or modified sequence
atgagcatggagctgctgcaagaggccggcgtgagcgtgcctaaaggatatgtggccaagagtccagacgaagcctacgctatcgctaagaagttgggcagcaaagatgtggttatcaaggcccaggtgttagctggagggagagggaagggaactttcgagtcaggccttaagggaggagtcaaaattgtcttctctccagaggaggcaaaggctgtatcctcccagatgatcgggaaaaaattattcaccaagcagacaggcgagaagggcaggatttgcaatcaggtgctggtctgcgagcgaaagtacccaagacgggaatactatttcgcaattactatggagcgcagctttcagggacccgtactgatcggaagctctcatggaggcgttaacattgaggatgttgccgctgagtctcccgaagcaattatcaaggaaccaatcgatatcgaggaaggcatcaagaaagagcaggcactccagctggctcaaaagatggggttcccacccaacattgtggagtctgcagcggaaaatatggttaagctgtattctctgttcttaaagtacgacgcgaccatgatagaaatcaatccaatggtggaagatagcgatggagccgtcttatgtatggatgccaaaattaactttgattccaactccgcgtaccggcagaagaaaatttttgacctccaggactggactcaggaagatgaacgcgacaaagatgctgccaaggcaaacctgaattacatcggccttgacggcaacattggatgccttgtgaacggcgcagggctggctatggccaccatggatatcataaagctgcatggtggaaccccagctaactttttggatgttggagggggagccacagtgcaccaggtcaccgaggcttttaagctcataacctctgataagaaggtgctcgctatcctggtgaatatttttggagggatcatgagatgcgatgtgattgcgcaaggcatcgtcatggctgtaaaggacctggaaatcaaaatccccgtcgtggtgcggctgcaaggtactcgagtagacgacgctaaagcgctcattgccgacagtggtctgaagattctggcctgcgacgatctcgatgaggctgccagaatggtggtcaagttaagcgagattgtaactttagctaaacaggcccacgtggacgttaagttccagctccctatttag

SEQ ID NO: 141294 - DNA, 1326 bp, Artificial Sequence
  derived and/or modified sequence
atggccgcctccatgttttatggccgcctggtggccgtggccaccctgaggaaccaccggcccaggacagcccagcagcagcagaggaacctgagcctgcacgagtacatgtccatggagctgctgcaggaggccggcgtgtctgtgcccaagggctacgtggccaagagcccagatgaggcctatgccatcgccaagaagctgggcagcaaggatgtggtgatcaaggcccaggtgctggccggcggccggggcaagggcacctttgaaagtggcctgaagggcggcgtgaagatcgtgttcagccctgaggaggccaaggctgtgagcagccagatgattggcaagaagctgttcaccaagcagacaggagagaagggccgcatctgcaaccaggtgctggtgtgtgagaggaagtacccccggcgggagtactactttgccatcaccatggagaggagcttccagggccctgtgctgattggcagcagccatggaggagtgaacattgaagatgtggccgctgagagccctgaggccatcatcaaggagcccatcgacatcgaggagggcatcaagaaggagcaggccctgcagctggcccagaagatgggcttcccccccaacatcgtggagagcgctgctgagaacatggtgaagctgtacagcctcttcctgaagtatgatgccaccatgattgagatcaaccccatggtggaggacagtgatggagctgtgctgtgcatggatgccaagatcaactttgacagcaacagcgcctaccggcagaagaagatctttgacctgcaggactggacccaggaggatgagcgggacaaggatgctgccaaggccaacctgaactacatcggcctggatggcaacatcggctgcctggtgaatggagctggcctggccatggccaccatggacatcatcaagctgcacggcggcaccccagccaacttcctggatgtgggcggcggggccaccgtgcaccaggtgacagaggccttcaagctgatcaccagtgacaagaaggtgctggccatcctggtgaacatctttggaggcatcatgagatgtgatgtgattgcccagggcatcgtgatggctgtgaaggacctggagatcaagatccctgtggtggtgcggctgcagggcaccagggtggatgatgccaaggccctgattgctgacagcggcctgaagatcctggcctgtgatgacctggatgaggccgccaggatggtggtgaagctgtctgagatcgtgaccctggccaagcaggcccacgtggatgtgaagttccagctgcccatctag

SEQ ID NO: 141295 - DNA, 1392 bp, Artificial Sequence
  derived and/or modified sequence
atggccgcctccatgttttatggccgcctggtggccgtggccaccctgaggaaccaccggcccaggacagcccagagagctgctgcccaggtgctgggcagcagcggcctcttcaacaaccacggcctgcaggtgcagcagcagcagcagaggaacctgagcctgcacgagtacatgtccatggagctgctgcaggaggccggcgtgtctgtgcccaagggctacgtggccaagagcccagatgaggcctatgccatcgccaagaagctgggcagcaaggatgtggtgatcaaggcccaggtgctggccggcggccggggcaagggcacctttgaaagtggcctgaagggcggcgtgaagatcgtgttcagccctgaggaggccaaggctgtgagcagccagatgattggcaagaagctgttcaccaagcagacaggagagaagggccgcatctgcaaccaggtgctggtgtgtgagaggaagtacccccggcgggagtactactttgccatcaccatggagaggagcttccagggccctgtgctgattggcagcagccatggaggagtgaacattgaagatgtggccgctgagagccctgaggccatcatcaaggagcccatcgacatcgaggagggcatcaagaaggagcaggccctgcagctggcccagaagatgggcttcccccccaacatcgtggagagcgctgctgagaacatggtgaagctgtacagcctcttcctgaagtatgatgccaccatgattgagatcaaccccatggtggaggacagtgatggagctgtgctgtgcatggatgccaagatcaactttgacagcaacagcgcctaccggcagaagaagatctttgacctgcaggactggacccaggaggatgagcgggacaaggatgctgccaaggccaacctgaactacatcggcctggatggcaacatcggctgcctggtgaatggagctggcctggccatggccaccatggacatcatcaagctgcacggcggcaccccagccaacttcctggatgtgggcggcggggccaccgtgcaccaggtgacagaggccttcaagctgatcaccagtgacaagaaggtgctggccatcctggtgaacatctttggaggcatcatgagatgtgatgtgattgcccagggcatcgtgatggctgtgaaggacctggagatcaagatccctgtggtggtgcggctgcagggcaccagggtggatgatgccaaggccctgattgctgacagcggcctgaagatcctggcctgtgatgacctggatgaggccgccaggatggtggtgaagctgtctgagatcgtgaccctggccaagcaggcccacgtggatgtgaagttccagctgcccatctag

SEQ ID NO: 141296 - DNA, 1218 bp, Artificial Sequence
  derived and/or modified sequence
atgtccatggagctgctgcaggaggccggcgtgtctgtgcccaagggctacgtggccaagagcccagatgaggcctatgccatcgccaagaagctgggcagcaaggatgtggtgatcaaggcccaggtgctggccggcggccggggcaagggcacctttgaaagtggcctgaagggcggcgtgaagatcgtgttcagccctgaggaggccaaggctgtgagcagccagatgattggcaagaagctgttcaccaagcagacaggagagaagggccgcatctgcaaccaggtgctggtgtgtgagaggaagtacccccggcgggagtactactttgccatcaccatggagaggagcttccagggccctgtgctgattggcagcagccatggaggagtgaacattgaagatgtggccgctgagagccctgaggccatcatcaaggagcccatcgacatcgaggagggcatcaagaaggagcaggccctgcagctggcccagaagatgggcttcccccccaacatcgtggagagcgctgctgagaacatggtgaagctgtacagcctcttcctgaagtatgatgccaccatgattgagatcaaccccatggtggaggacagtgatggagctgtgctgtgcatggatgccaagatcaactttgacagcaacagcgcctaccggcagaagaagatctttgacctgcaggactggacccaggaggatgagcgggacaaggatgctgccaaggccaacctgaactacatcggcctggatggcaacatcggctgcctggtgaatggagctggcctggccatggccaccatggacatcatcaagctgcacggcggcaccccagccaacttcctggatgtgggcggcggggccaccgtgcaccaggtgacagaggccttcaagctgatcaccagtgacaagaaggtgctggccatcctggtgaacatctttggaggcatcatgagatgtgatgtgattgcccagggcatcgtgatggctgtgaaggacctggagatcaagatccctgtggtggtgcggctgcagggcaccagggtggatgatgccaaggccctgattgctgacagcggcctgaagatcctggcctgtgatgacctggatgaggccgccaggatggtggtgaagctgtctgagatcgtgaccctggccaagcaggcccacgtggatgtgaagttccagctgcccatctag

SEQ ID NO: 141297 - DNA, 1326 bp, Artificial Sequence
  derived and/or modified sequence
atggccgccagcatgttctacggccggctggtggccgtggccacccttcgcaatcaccggccgcggacagcccagcagcaacaacggaatttgtctttacacgagtatatgagcatggagctcctgcaagaggccggcgtctctgtgcccaaaggatacgtggcaaaatcgcctgatgaagcatacgccattgctaaaaaactggggagcaaggatgtggtcattaaggctcaagttcttgccggtgggaggggcaaaggcacgttcgagagtggcctgaaggggggagttaaaatcgtgttctcacctgaggaggccaaagctgtgtcctctcagatgatcgggaagaagctgttcactaagcagactggtgagaaaggcagaatctgcaatcaagtactcgtctgcgagcgtaaatatcccaggagagaatattacttcgccatcacaatggaacgctcgtttcagggcccagtgcttatcggcagctcccatggtggggttaacatagaagatgtggccgccgaatcccccgaggctatcatcaaagagccaattgacatcgaagaagggatcaaaaaagagcaggctctccaactggcccagaaaatgggcttccccccgaacatcgttgaatccgcagcagagaatatggtgaagctctacagtcttttcctgaaatacgacgcaacaatgatcgagatcaacccaatggtcgaggattcggatggcgcagttctatgcatggacgccaaaatcaactttgatagtaacagcgcctaccggcagaaaaaaatcttcgatctccaagattggacacaggaggatgaacgggacaaggatgcagctaaagcaaacctgaattacattggccttgatggcaacatcggctgtctggtgaacggcgctgggctcgccatggctacgatggacataatcaagctccatggaggaacaccggccaattttctcgacgtgggaggaggagctaccgtccaccaggttacagaggcatttaaattaatcactagcgataaaaaagtgctcgcaatactggtgaatatattcgggggcatcatgaggtgtgatgtcattgcacaaggtatagtgatggccgttaaggatctggaaattaagatcccagttgtcgtgagactgcagggcacccgggttgacgatgctaaagcgttaatcgctgactcaggcctgaaaatcttggcatgtgatgatttggatgaggccgcgcgcatggtggtcaagctcagcgagatagtgacgctagctaagcaggcacatgtcgacgtgaaatttcaactgccaatatag

SEQ ID NO: 141298 - DNA, 1392 bp, Artificial Sequence
  derived and/or modified sequence
atggccgccagcatgttctacggccggctggtggccgtggccaccctgagaaaccatagacctcgaacagcgcagagagcggcagcgcaggttctgggttctagtgggctgttcaataaccacggccttcaggtgcagcagcagcagcagcggaatctgagtttgcatgagtatatgtctatggagttgctgcaggaagctggcgtctcggtaccgaagggctatgttgcgaagtcccccgacgaggcctacgcaatcgcaaagaagctgggaagcaaggacgtcgtgataaaagcccaagtgcttgccggaggtaggggcaaggggacctttgaatctggcctcaagggaggggtcaaaatagtgttcagtccagaagaagctaaggccgtgtctagtcaaatgataggcaagaaattgtttactaagcagacaggggagaagggacgcatctgtaaccaggtgctggtgtgtgagagaaagtaccccagacgggaatattattttgctatcaccatggaacgaagctttcagggcccagtgttgatcgggtcctcacatggtggcgttaacatagaggacgtggcagccgagtcacccgaagccataatcaaggaacctatcgatattgaggagggaatcaagaaagaacaggcccttcaactggcccagaaaatgggtttccctccaaatatcgtggaaagtgcagcggaaaacatggtcaagctttatagcctcttcctgaaatacgacgcgacaatgatcgagataaatcccatggtggaggactcggacggggcagtactttgcatggatgccaagatcaacttcgacagtaacagtgcctacagacagaaaaagattttcgacctgcaagactggacgcaggaggatgaacgagataaggatgccgctaaggccaacctcaactatataggactggacggaaacatcgggtgccttgtaaatggcgccggtctggctatggccacgatggacatcatcaaactgcacgggggaaccccagcaaactttttagacgtgggaggtggcgctaccgtgcaccaggtaacagaagccttcaagcttatcacttccgacaagaaggttttggccatattagtcaacatctttggtggtataatgaggtgcgacgtgatcgcgcagggcatcgtcatggctgtcaaagacctggagatcaagattccagtggtggttcgtttgcagggcactagggtcgatgacgctaaggctctcatcgccgacagcggcctcaagatcctggcgtgtgacgacctggacgaagcagctagaatggtcgtcaaacttagtgaaatcgtcaccctggcaaaacaagcccatgtcgacgtcaaattccaacttccaatatag

SEQ ID NO: 141299 - DNA, 1218 bp, Artificial Sequence
  derived and/or modified sequence
atgagcatggagctgctgcaggaggccggcgtgagcgtgcccaagggctacgttgcaaagtctcccgatgaggcctatgcaatcgcgaaaaagctcgggtcgaaggatgtggtaatcaaagcccaggtcctggcgggcggccgcgggaagggcaccttcgagtcgggcttgaagggcggcgtgaagattgtgttctctccagaggaagcgaaggccgtctcaagtcagatgatcgggaaaaaactgtttaccaagcagactggggaaaagggaaggatctgtaatcaggttctggtatgtgaacgtaaataccctaggcgcgaatactactttgcaatcacaatggagaggagtttccagggacctgtcttaatcggctcatcccacgggggggtgaacattgaggacgtggcagcagaaagccccgaagctatcatcaaggaacctattgacatcgaagagggtatcaaaaaagagcaggctctgcaactcgctcagaagatgggttttcctccaaacattgtggagagcgcagccgaaaacatggtgaaactctattccctatttctaaagtatgacgcaacgatgatcgagattaatccaatggtggaggacagcgacggcgccgtactgtgtatggacgccaagataaactttgactcaaactccgcctaccgacagaaaaaaattttcgatctccaagactggacgcaggaggatgagagggacaaagacgccgcaaaagccaacttgaattatatcggactggacggaaacataggatgtttggtgaacggcgctggactggcaatggcgactatggacattatcaagctgcatggcggaacgccagctaacttcctcgacgtcgggggtggtgcaacggtgcatcaggtgacagaggcctttaagctgattacctcagataaaaaggtgctggctattctggtaaacatcttcggaggcattatgaggtgcgacgtgatcgcacagggcatagtgatggccgtaaaagatctggagattaaaatccctgtggttgtaaggctgcagggaactcgagtggatgatgccaaagccctgattgccgatagtgggctcaaaatactggcctgcgacgatttggatgaagcagccagaatggtcgtgaaactatccgaaattgtcaccctggccaagcaggcacacgtggacgtgaagtttcaactgccaatttag

SEQ ID NO: 141300 - DNA, 1218 bp, Artificial Sequence
  derived and/or modified sequence
atgagcatggagctgctgcaggaggccggcgtgagcgtgcccaaggggtatgtggcgaagtccccagacgaggcttatgctatcgccaaaaagctggggtctaaggatgtggtcattaaggcccaggttctggctggcggaagaggcaaaggaactttcgaatccggcttaaagggcggggtgaagatcgtcttttctccagaggaagctaaggccgtgagcagccagatgatcgggaagaaattgttcaccaagcagactggtgagaagggcagaatttgcaaccaggttcttgtgtgcgagcgcaagtatcctaggcgagaatattactttgctatcaccatggagcgctctttccaagggccagtccttataggctcttcccatgggggggtgaacatcgaagacgtggccgcagaaagcccagaggccattattaaggaacctattgacatcgaagaggggatcaagaaagagcaggccttgcagcttgcacaaaaaatgggattccctcccaatatcgtggaatctgcggctgagaatatggtgaagctctactccctatttctgaaatatgacgcaactatgattgagatcaacccaatggtggaggattcagatggagctgttctgtgcatggatgcaaagatcaacttcgatagcaactccgcttatcggcagaagaaaatattcgacctgcaggactggacacaagaggacgagcgggacaaggacgcggccaaggccaatctcaactacataggactggacggcaacattggatgccttgtgaacggggcaggtttggccatggcaacgatggatataattaagcttcatgggggcacgcctgccaacttcttggacgtcgggggcggcgcaaccgtgcaccaagtgaccgaggcatttaagctgattactagcgacaagaaagtgttagccattctggtgaacatcttcggggggatcatgcggtgcgatgtgattgctcaggggattgtgatggccgtgaaggacctggagattaagatcccagttgtcgttaggctgcagggtacaagagtggacgatgccaaggctcttatcgctgactccgggctgaagatccttgcgtgtgatgacttagatgaggcagcccggatggtcgtgaaactgtctgaaatcgtgaccctagcgaagcaagcacacgtcgatgtaaaatttcagttgcccatctag

SEQ ID NO: 141301 - DNA, 1326 bp, Artificial Sequence
  derived and/or modified sequence
atggcagccagtatgttctacgggcgattggtggctgtggcaactctccggaatcacagaccgaggacagcccagcagcagcagcgtaatctatcacttcatgagtatatgtccatggagcttctccaggaggcaggagtcagcgtcccgaaaggatatgtggcgaaaagccccgatgaggcttacgcaatagctaaaaagcttggatcaaaagatgtggtgataaaagcccaggtgctcgctggaggtaggggtaagggtactttcgaaagtggactcaaaggtggggtgaaaatcgtgttttctccagaggaggcaaaggcagtgtcaagtcagatgatcggaaaaaagctgtttactaaacagaccggcgagaaaggtagaatctgcaatcaggtcctcgtgtgtgaacgcaaataccctaggcgtgaatattacttcgctattaccatggagagatcatttcagggacctgtgcttatcggctcaagccacggaggtgtaaatattgaagacgtggcggctgagtcgcctgaagctatcattaaggagcccatcgacatcgaggaaggtatcaagaaagaacaggcccttcagctggcccaaaaaatgggttttcctcctaacatagtggaatccgccgctgagaatatggtgaaactttactccctgttcctcaagtacgacgctaccatgatcgagatcaatcccatggtggaggatagcgatggcgctgtcctctgtatggatgccaagattaattttgatagtaacagtgcctaccgtcagaaaaaaattttcgatcttcaggactggacccaagaggacgagagggataaggatgctgctaaggccaacctgaactacattggactagatggcaacatcggctgtcttgtgaacggcgctgggctggctatggccactatggatattattaagctgcacggcggaacccccgctaattttttggatgtggggggtggtgccactgtgcaccaggttactgaggccttcaagctgatcacctccgacaaaaaggttctggccatcttggtgaacatatttggaggcatcatgagatgcgatgtgatagctcaaggcatcgtgatggcagtcaaagatctggagattaaaatccccgtcgtcgtgcgactccagggcaccagagtagacgacgccaaggctctgattgccgactcaggcctcaagattctggcttgcgatgatcttgacgaagcagccagaatggtcgtgaagctttccgaaatagtgacactggccaagcaagctcatgtcgacgtgaaatttcagctccccatctag

SEQ ID NO: 141302 - DNA, 1392 bp, Artificial Sequence
  derived and/or modified sequence
atggccgcttctatgttttacggtcgattggttgcagtggccactttgagaaatcaccggcctcggaccgctcagagagctgctgcacaggtgttagggagctcgggactttttaataaccacgggctgcaggtgcagcagcaacagcagaggaatttgtcacttcacgagtatatgtccatggagctgctgcaagaggccggagtgagtgtgccgaaagggtacgtggcaaaatcaccagacgaggcttacgccattgcaaagaaactcgggtctaaagatgttgtgatcaaggctcaagttctggctggaggcagaggaaaaggaacgttcgaatccggactgaaaggcggagtgaaaattgtgttctcgccagaggaggcaaaggccgtgagctcgcagatgatcggcaagaaactgttcactaaacagaccggagagaagggacggatttgtaatcaggtcctcgtttgtgagcgtaagtatcccaggagggagtactatttcgcaatcaccatggaacggagcttccaaggtcctgtgctgattggctcctcccacgggggtgttaacatcgaggatgtggctgcagagagtcccgaagccataatcaaagaaccaattgatatcgaagagggtataaagaaggaacaggccctgcagctggcacagaagatgggtttccctcctaatatcgtggagagcgccgctgagaatatggtgaagctctactcactttttctcaagtatgacgcaactatgattgaaatcaatcctatggttgaagacagtgatggtgcagtattgtgcatggacgccaagattaacttcgattctaattccgcctaccgccagaagaaaattttcgaccttcaggactggactcaggaggacgaacgcgacaaggatgccgctaaagctaatctgaattatattggcttggatggtaacatcggctgcttagtaaatggagccggactagctatggcaacgatggatatcataaaactccacggcggtacgccagctaactttctcgacgtcggtggcggagccaccgttcaccaggtcacagaagccttcaaactgattacatcggacaagaaggtgctcgccatccttgtcaatatcttcggtggaatcatgaggtgtgatgtcattgctcaaggcatcgtgatggccgttaaagatttggaaattaagattccagtcgtggtgcgtttgcagggtacaagggtcgacgatgccaaggcgcttatcgcagattctggcctaaagattcttgcatgtgatgacctagacgaagctgctaggatggttgtaaagctgagcgagattgtgactcttgcaaagcaggcacatgtagatgttaagttccagctcccaatctag

SEQ ID NO: 141303 - DNA, 1218 bp, Artificial Sequence
  derived and/or modified sequence
atgagtatggaactgcttcaagaggccggagtctcagtgccaaaaggctatgtcgctaagtctcccgacgaagcatacgcaattgctaaaaagttgggatccaaagatgtggtgattaaggcacaggtcctcgcagggggacggggtaagggcaccttcgagagtggtctcaaaggtggagtgaagatcgtcttctcacccgaggaagcaaaagctgtaagctcccagatgattgggaagaagctctttaccaaacagactggggagaagggacgaatctgcaatcaggtgctggtctgcgagagaaagtacccccgtagggagtactactttgccattactatggagcgtagctttcaggggccagtcctcatcgggtccagtcatggtggagtaaacatcgaagatgtggcagcagagtcccctgaggccatcatcaaagagcctatcgacatagaggagggaataaagaaggaacaagctctacagcttgcccagaagatgggtttcccacccaatatcgtggaaagcgcagccgagaacatggttaaactttacagcctctttcttaagtacgatgccaccatgatcgaaatcaaccccatggtggaagacagcgacggggctgtgctttgcatggatgctaaaattaacttcgactctaactccgcatatcggcagaaaaagatcttcgacctgcaagattggacccaggaagacgaacgggataaggatgctgccaaagcgaatctgaactacatcggactggatgggaacattggctgtctggttaatggcgcagggttggcaatggccacaatggatatcatcaagcttcacggaggcacccccgctaatttcttggacgtgggcggaggggctactgtgcaccaagtgaccgaggcctttaagctcattacttccgacaagaaggtcttggcaatactcgttaatatcttcggcggaattatgcggtgcgatgtcatcgcgcagggcattgtcatggctgtcaaagacctcgaaattaagattcccgtggtagtgaggctccaggggacaagagtggacgatgctaaagcgttaatcgcagattcgggcctgaaaattctcgcatgtgatgacctcgatgaggccgcacgcatggtcgttaagctgtccgagatagtcacgctggctaaacaagcacacgtggatgtcaagtttcaactgcctatttag

SEQ ID NO: 141304 - DNA, 1218 bp, Artificial Sequence
  derived and/or modified sequence
atgtctatggaattactgcaagaagccggagtgtctgtcccgaaggggtatgtggcgaaaagccctgatgaagcttatgcaatcgctaaaaagttgggttccaaggacgtggtcattaaggcccaggttctggcagggggaaggggtaaaggaacctttgagtccggcctcaaaggcggagtaaaaatcgtcttttcgcctgaagaagccaaagcagtgagttcacaaatgatcggtaaaaaattgtttacaaagcagacaggtgagaaaggcagaatctgtaatcaggtcctcgtgtgtgaacgtaagtacccacggcgtgagtactacttcgcaatcactatggagagaagctttcagggtccagtgctcatcggatcctcccacggcggagtcaatattgaggatgtggccgctgagtctcccgaggcaatcatcaaagagccaatcgacattgaagagggtattaagaaggaacaggcccttcagctcgcccaaaagatggggtttcccccaaatatcgtagaatccgccgctgaaaatatggtaaagctctactcactctttctgaaatacgacgcaaccatgatcgagattaacccaatggtggaagacagtgatggcgcagtgttgtgtatggatgcaaagattaattttgattccaattccgcatatcgacaaaaaaagatctttgacctccaggactggacccaggaggatgaaagagacaaggacgctgccaaggcgaacctgaattacattgggctggatggcaatattggctgcctggtgaacggggctggtctagcaatggccaccatggatatcattaaactgcatggcggaacaccagctaattttctggacgtaggcggaggagcgactgtccatcaggtcaccgaggcatttaagttgattacaagcgacaaaaaagtgttggccatcctggtaaacattttcggcggaatcatgaggtgcgatgtcatcgcacagggaatcgtgatggccgtcaaggacctcgagattaagattcctgtggtggtgcggctgcaggggacaagggtggatgatgccaaggccctgattgccgatagtggtcttaaaattctggcctgcgatgaccttgatgaagcagcccgaatggtcgtaaaactttcagaaatcgtcaccttggccaagcaagcccatgtagacgttaagttccagttgcctatctag

SEQ ID NO: 141305 - DNA, 2098 bp, Artificial Sequence
  derived and/or modified sequence
ccgcctgtcgcctgtgcgcctgcgcgcggcgccgaggggacggggtccgactcagaaatggcggcctccatgttctacggcaggctagtggccgtggccacccttcggaaccaccggcctcggacggcccagcaacagcaaaggaatctctcactacatgaatacatgagtatggaattattgcaagaagctggtgtctccgttcccaaaggatatgtggcaaagtcaccagatgaagcttatgcaattgccaaaaaattaggttcaaaagatgtcgtgataaaggcacaggttttagctggtggtagaggaaaaggaacatttgaaagtggcctcaaaggaggagtgaagatagttttctctccagaagaagcaaaagctgtttcttcacaaatgattgggaaaaaattgtttaccaagcaaacgggagaaaagggcagaatatgcaatcaagtattggtctgtgagcgaaaatatcccaggagagaatactactttgcaataacaatggaaaggtcatttcaaggtcctgtattaataggaagttcacatggtggtgtcaacattgaagatgttgctgctgagtctcctgaagcaataattaaagaacctattgatattgaagaaggcatcaaaaaggaacaagctctccagcttgcacagaagatgggatttccacctaatattgtggaatcagcagcagaaaacatggtcaagctttacagcctttttctgaaatacgatgcaaccatgatagaaataaatccaatggtggaagattcagatggagctgtattgtgtatggatgcaaagatcaattttgactctaattcagcctatcgccaaaagaaaatctttgatctacaggactggacccaggaagatgaaagggacaaagatgctgctaaggcaaatctcaactacattggcctcgatggaaatataggctgcctagtaaatggtgctggtttggctatggccacaatggatataataaaacttcatggagggactccagccaacttccttgatgttggtggtggtgctacagtccatcaagtaacagaagcatttaagcttatcacttcagataaaaaggtactggctattctggtcaacatttttggaggaatcatgcgctgtgatgttattgcacagggtatagtcatggcagtaaaagacttggaaattaaaatacctgttgtggtacggttacaaggtacacgagtcgatgatgctaaggcactgatagcggacagtggacttaaaatacttgcttgtgatgacttggatgaagctgctagaatggttgtaaagctctctgaaatagtgaccttagcgaagcaagcacatgtggatgtgaaatttcagttgccaatatgatctgaaaacccagtggatggctgaaggtgttaaatgtgctataatcattaagaatactgtgttctgtgttattgttctttttctttttagtgtgtggagattgtaattgccatctaggcacacaaacatttaaaaggatttggactgcatttaattgtaccattcagaatggactgtttgtacgaagcatgtataatgcagttatcttctttcttttgtcgcagccagtcttttttgcttctcctacaaaacgtaacttgcaatttgccagtttattattgttggatacaaagttcttcattgataagagtcctataaataagataaatacgaagataaagctttattctttagtgttaaaatacagtatatctaataactagcctcattagtagagcagtatattaaaacaatgttttatgtaaaaagtgtttatcttcagcaccaaatacatgataaatgtatcaatcactatttataaacagagctttcaaacactcctcagaatattcttctaagtattttgatgaagtaactttgtaattatttgaacattgttttaatcattaggaaacactgattaactgcaagtcttcatgattctgtcatattaagaaacacctgtaggtttgcttcaaataaaggcatatataccaaggacttacagacaaaattaagaatgtcaatttaagttaataaaaatctcccaatatga

SEQ ID NO: 141306 - DNA, 2164 bp, Artificial Sequence
  derived and/or modified sequence
ccgcctgtcgcctgtgcgcctgcgcgcggcgccgaggggacggggtccgactcagaaatggcggcctccatgttctacggcaggctagtggccgtggccacccttcggaaccaccggcctcggacggcccagcgggctgctgctcaggttctgggaagttctggattgtttaataaccatggactccaagtacagcagcaacagcaaaggaatctctcactacatgaatacatgagtatggaattattgcaagaagctggtgtctccgttcccaaaggatatgtggcaaagtcaccagatgaagcttatgcaattgccaaaaaattaggttcaaaagatgtcgtgataaaggcacaggttttagctggtggtagaggaaaaggaacatttgaaagtggcctcaaaggaggagtgaagatagttttctctccagaagaagcaaaagctgtttcttcacaaatgattgggaaaaaattgtttaccaagcaaacgggagaaaagggcagaatatgcaatcaagtattggtctgtgagcgaaaatatcccaggagagaatactactttgcaataacaatggaaaggtcatttcaaggtcctgtattaataggaagttcacatggtggtgtcaacattgaagatgttgctgctgagtctcctgaagcaataattaaagaacctattgatattgaagaaggcatcaaaaaggaacaagctctccagcttgcacagaagatgggatttccacctaatattgtggaatcagcagcagaaaacatggtcaagctttacagcctttttctgaaatacgatgcaaccatgatagaaataaatccaatggtggaagattcagatggagctgtattgtgtatggatgcaaagatcaattttgactctaattcagcctatcgccaaaagaaaatctttgatctacaggactggacccaggaagatgaaagggacaaagatgctgctaaggcaaatctcaactacattggcctcgatggaaatataggctgcctagtaaatggtgctggtttggctatggccacaatggatataataaaacttcatggagggactccagccaacttccttgatgttggtggtggtgctacagtccatcaagtaacagaagcatttaagcttatcacttcagataaaaaggtactggctattctggtcaacatttttggaggaatcatgcgctgtgatgttattgcacagggtatagtcatggcagtaaaagacttggaaattaaaatacctgttgtggtacggttacaaggtacacgagtcgatgatgctaaggcactgatagcggacagtggacttaaaatacttgcttgtgatgacttggatgaagctgctagaatggttgtaaagctctctgaaatagtgaccttagcgaagcaagcacatgtggatgtgaaatttcagttgccaatatgatctgaaaacccagtggatggctgaaggtgttaaatgtgctataatcattaagaatactgtgttctgtgttattgttctttttctttttagtgtgtggagattgtaattgccatctaggcacacaaacatttaaaaggatttggactgcatttaattgtaccattcagaatggactgtttgtacgaagcatgtataatgcagttatcttctttcttttgtcgcagccagtcttttttgcttctcctacaaaacgtaacttgcaatttgccagtttattattgttggatacaaagttcttcattgataagagtcctataaataagataaatacgaagataaagctttattctttagtgttaaaatacagtatatctaataactagcctcattagtagagcagtatattaaaacaatgttttatgtaaaaagtgtttatcttcagcaccaaatacatgataaatgtatcaatcactatttataaacagagctttcaaacactcctcagaatattcttctaagtattttgatgaagtaactttgtaattatttgaacattgttttaatcattaggaaacactgattaactgcaagtcttcatgattctgtcatattaagaaacacctgtaggtttgcttcaaataaaggcatatataccaaggacttacagacaaaattaagaatgtcaatttaagttaataaaaatctcccaatatga

SEQ ID NO: 141307 - DNA, 1471 bp, Artificial Sequence
  derived and/or modified sequence
agtccgcgaggatccccggcggcccggccgtggctgctcctgcagtttctaagagatgggcgggagcaggtgggctctgagtggaggttctgggaagttctggattgtttaataaccatggactccaagtacagcagcaacagcaaaggaatctctcactacatgaatacatgagtatggaattattgcaagaagctggtgtctccgttcccaaaggatatgtggcaaagtcaccagatgaagcttatgcaattgccaaaaaattaggttcaaaagatgtcgtgataaaggcacaggttttagctggtggtagaggaaaaggaacatttgaaagtggcctcaaaggaggagtgaagatagttttctctccagaagaagcaaaagctgtttcttcacaaatgattgggaaaaaattgtttaccaagcaaacgggagaaaagggcagaatatgcaatcaagtattggtctgtgagcgaaaatatcccaggagagaatactactttgcaataacaatggaaaggtcatttcaaggtcctgtattaataggaagttcacatggtggtgtcaacattgaagatgttgctgctgagtctcctgaagcaataattaaagaacctattgatattgaagaaggcatcaaaaaggaacaagctctccagcttgcacagaagatgggatttccacctaatattgtggaatcagcagcagaaaacatggtcaagctttacagcctttttctgaaatacgatgcaaccatgatagaaataaatccaatggtggaagattcagatggagctgtattgtgtatggatgcaaagatcaattttgactctaattcagcctatcgccaaaagaaaatctttgatctacaggactggacccaggaagatgaaagggacaaagatgctgctaaggcaaatctcaactacattggcctcgatggaaatataggctgcctagtaaatggtgctggtttggctatggccacaatggatataataaaacttcatggagggactccagccaacttccttgatgttggtggtggtgctacagtccatcaagtaacagaagcatttaagcttatcacttcagataaaaaggtactggctattctggtcaacatttttggaggaatcatgcgctgtgatgttattgcacagggtatagtcatggcagtaaaagacttggaaattaaaatacctgttgtggtacggttacaaggtacacgagtcgatgatgctaaggcactgatagcggacagtggacttaaaatacttgcttgtgatgacttggatgaagctgctagaatggttgtaaagctctctgaaatagtgaccttagcgaagcaagcacatgtggatgtgaaatttcagttgccaatatgatctgaaaacccagtggatggctgaaggtgttaaatgtgctataatcattaagaatactgtgttctgtgttattgttctttttc

SEQ ID NO: 141308 - DNA, 1801 bp, Artificial Sequence
  derived and/or modified sequence
ctcacgcacggcacacggaagcaagcacggcgtgagttcgtccctctgcgcacgccccggtttcctcgcgtccgcggctgctcacccgaactccagatgacctccagggagttggaaactgccagctccaaccgagcctttcctcttccccaggaggacgcaacgcggatgcttgcagctggtcaccacgactccgactccgactcctggccgccgcccgcgcggctgtgcgctggccgtcatagcgcgcgggaggacgcgcctggcagcggcaggaagtgacgcgctcactaccccgtcccgcggccgcagccaatctctccccgcgagggcggaggcgccgaaatcaaagcgagagcgcctcggcctctccagctgtccgcgggtcttgctctgttgcctaggctggagtgcagtggtacaagcacggctcactgcagccttgacctcctgggatcaagggttctgggaagttctggattgtttaataaccatggactccaagtacagcagcaacagcaaaggaatctctcactacatgaatacatgagtatggaattattgcaagaagctggtgtctccgttcccaaaggatatgtggcaaagtcaccagatgaagcttatgcaattgccaaaaaattaggttcaaaagatgtcgtgataaaggcacaggttttagctggtggtagaggaaaaggaacatttgaaagtggcctcaaaggaggagtgaagatagttttctctccagaagaagcaaaagctgtttcttcacaaatgattgggaaaaaattgtttaccaagcaaacgggagaaaagggcagaatatgcaatcaagtattggtctgtgagcgaaaatatcccaggagagaatactactttgcaataacaatggaaaggtcatttcaaggtcctgtattaataggaagttcacatggtggtgtcaacattgaagatgttgctgctgagtctcctgaagcaataattaaagaacctattgatattgaagaaggcatcaaaaaggaacaagctctccagcttgcacagaagatgggatttccacctaatattgtggaatcagcagcagaaaacatggtcaagctttacagcctttttctgaaatacgatgcaaccatgatagaaataaatccaatggtggaagattcagatggagctgtattgtgtatggatgcaaagatcaattttgactctaattcagcctatcgccaaaagaaaatctttgatctacaggactggacccaggaagatgaaagggacaaagatgctgctaaggcaaatctcaactacattggcctcgatggaaatataggctgcctagtaaatggtgctggtttggctatggccacaatggatataataaaacttcatggagggactccagccaacttccttgatgttggtggtggtgctacagtccatcaagtaacagaagcatttaagcttatcacttcagataaaaaggtactggctattctggtcaacatttttggaggaatcatgcgctgtgatgttattgcacagggtatagtcatggcagtaaaagacttggaaattaaaatacctgttgtggtacggttacaaggtacacgagtcgatgatgctaaggcactgatagcggacagtggacttaaaatacttgcttgtgatgacttggatgaagctgctagaatggttgtaaagctctctgaaatagtgaccttagcgaagcaagcacatgtggatgtgaaatttcagttgccaatatgatctgaaaacccagtggatggctgaaggtgttaaatgt

SEQ ID NO: 141309 - protein, 220 aa, Artificial Sequence
  derived and/or modified sequence
MAGLSRGSARALLAALLASTLLALLVSPARGRGGRDHGDWDEASRLPPLPPREDAARVARFVTHVSDWGALATISTLEAVRGRPFADVLSLSDGPPGAGSGVPYFYLSPLQLSVSNLQENPYATLTMTLAQTNFCKKHGFDPQSPLCVHIMLSGTVTKVNETEMDIAKHSLFIRHPEMKTWPSSHNWFFAKLNITNIWVLDYFGGPKIVTPEEYYNVTVQ

SEQ ID NO: 141310 - DNA, 2048 bp, Artificial Sequence
  derived and/or modified sequence
ggcggggcctgggcgcgccgagctccggctgggtccctgcaggtcttggggcccgggactcttcctggagacaccgccatggccgggctatcccgcgggtccgcgcgcgcactgctcgccgccctgctggcgtcgacgctgttggcgctgctcgtgtcgcccgcgcggggtcgcggcggccgggaccacggggactgggacgaggcctcccggctgccgccgctaccaccccgcgaggacgcggcgcgcgtggcccgcttcgtgacgcacgtctccgactggggcgctctggccaccatctccacgctggaggcggtgcgcggccggcccttcgccgacgtcctctcgctcagcgacgggcccccgggcgcgggcagcggcgtgccctatttctacctgagcccgctgcagctctccgtgagcaacctgcaggagaatccatatgctacactgaccatgactttggcacagaccaacttctgcaagaaacatggatttgatccacaaagtcccctttgtgttcacataatgctgtcaggaactgtgaccaaggtgaatgaaacagaaatggatattgcaaagcattcgttattcattcgacaccctgagatgaaaacctggccttccagccataattggttctttgctaagttgaatataaccaatatctgggtcctggactactttggtggaccaaaaatcgtgacaccagaagaatattataatgtcacagttcagtgaagcagactgtggtgaatttagcaacacttatgaagtttcttaaagtggctcatacacacttaaaaggcttaatgtttctctggaaagcgtcccagaatattagccagttttctgtcacatgctggtttgtttgcttgcttgtttacttgcttgtttaccaatagagttgacctgttattggatttcctggaagatgtggtagctacttttttcctattttgaagccattttcgtagagaaatatccttcactataatcaaataagttttgtcccatcaattccaaagatgtttccagtggtgctcttgaagaggaatgagtaccagttttaaattgcccattggcatttgaaggtagttgagtatgtgttctttattcctagaagccactgtgcttggtagagtgcatcactcaccacagctgcctcctgagctgcctgagcctggtgcaaaaggattggcccccattatggtgcttctgaataaatcttgccaagatagacaaacaatgatgaaactcagatggagcttcctactcacgttgatttatgtctcacaatcctgggtattgttaattcaacatagggtgaaactatttctgataaagaacttttgaaaaactttttatactctaaagtgatactcagaacaaaagaaagtcataaaactcctgaatttaatttccccacctaagtcgaaacagtattatcaaaacacatgtgcacacagattattttttggctccaaaactggattgcaaaagaaagaggagaagaatattttgtgtgttcctggtattcttttataagtaaagtttacccaggcatggaccagcttcagccagggacaaaatcccctcccaaaccactctccacagctttttaaaaatacttctactcttaacaattacctaaggcttcctcaactgccccaaatctcttaatagcttctagtgctgctacaatctaagtcaggtcaccagagggaagagaacatggcattaaaagaatcacatcttcagaagagaagacactaatattattacccatatacatgatttcagaagatgacataagattcctcttaaagaggaaatgtcaggaatcaagccactgaatccttaaagagaaaagttgaatatgagtcattgtgtctgaaaactgcaaagtgaacttaactgagatccagcaaacaggttctgtttaagaaaaataatttatactaaatttagtaaaatggacttcttattcaaagcatcaataattaaaagaattattttaatgaaaaaaaaaaaaaaaaaaaaaaaaa

SEQ ID NO: 141311 - DNA, 663 bp, Artificial Sequence
  derived and/or modified sequence
atggctggactatctaggggctcagccagagccctccttgcagctttgcttgcctctacactactggccctcctcgtgagcccagccaggggccgagggggacgagatcatggcgattgggacgaagcctctaggctgcccccattgccaccacgcgaggatgcagccagggtggctagattcgtgactcacgtgagcgattggggagcactggcaacaatttccacccttgaggccgtgcgtggacgacccttcgctgacgtgctctcactgtccgatggccctccaggcgcaggttccggcgtgccctacttctacttgagtccactgcaactctccgtgtctaatctgcaggagaatccgtatgcaaccctaactatgactctcgcacagacaaatttctgcaaaaagcacggcttcgaccctcaatctcctttgtgcgttcatattatgctctccggaacagttaccaaggtgaacgagactgaaatggatatcgccaaacactcgttattcatccggcacccagaaatgaagacctggcccagtagccacaattggttcttcgctaagttgaatattacaaatatatgggtactggactactttggtggtccaaagattgtcactccagaggagtactataacgtcacagtgcagtag

SEQ ID NO: 141312 - DNA, 663 bp, Artificial Sequence
  derived and/or modified sequence
atggcaggattaagccgtggcagcgcaagagcactgttagcagccttgctggcctctacactgcttgccctcttagttagccctgcaagaggccgcggcggcagggatcatggagattgggacgaggctagcagactccctcctctgcccccccgcgaagacgcagctcgcgtggctagattcgtgacacatgtcagcgactggggcgccttagctactatttctacactagaggcagtacgaggtcgtccatttgctgacgttctctccctttcggatggtcctcccggggccgggtctggagtgccgtatttttacctcagcccattacagcttagcgtctcgaatctccaggagaatccgtacgccaccctcacaatgacactcgctcagactaacttttgtaagaagcacggcttcgatccacaatccccactctgtgtccacatcatgcttagcgggacggtgactaaagtgaacgaaacggagatggacattgccaagcattccttgtttatccgccatcccgaaatgaaaacctggccatcttcacataactggttctttgcgaaactcaacataaccaatatctgggtcctagactactttggcggtccgaaaattgttaccccagaagagtactacaatgtaactgttcaatag

SEQ ID NO: 141313 - DNA, 663 bp, Artificial Sequence
  derived and/or modified sequence
atggctgggctttcacgcggttctgcccgcgcattactggccgccctactggcgtcaacattactggctctgttagtgtcgcccgctcgtggacgtgggggccgtgaccacggggattgggacgaggccagcaggcttccacctcttccacccagggaagacgctgctcgtgttgcacgcttcgtaacacacgtctctgactggggagcattggctaccataagcacactggaggctgttagaggcaggccctttgcagacgtattatccctctccgatggccctcctggggcaggctctggcgtcccgtatttctacctgtccccgctccagctttccgtgtccaatttgcaagagaacccttatgccacattaacaatgacattggcgcagaccaatttctgcaaaaaacacggcttcgatcctcagtcccctctgtgcgtccatatcatgctttctggcactgtgaccaaggtgaacgaaaccgagatggatattgcaaagcattctctgttcattcgacatccggagatgaaaacatggccaagctctcacaactggtttttcgcgaaactgaatatcacgaacatttgggttctggattactttggcggccccaagatcgtgactcctgaggaatactataacgtgaccgttcaatag

SEQ ID NO: 141314 - DNA, 663 bp, Artificial Sequence
  derived and/or modified sequence
atggccggcctgagcagaggcagcgccagagccctgctggccgccctgctggccagcaccctgctggccctgctggtgagccccgccagaggcagaggcggcagagaccacggcgactgggacgaggccagcagactgccccccctgccccccagagaggacgccgccagagtggccagattcgtgacccacgtgagcgactggggcgccctggccaccatcagcaccctggaggccgtgagaggcagacccttcgccgacgtgctgagcctgagcgacggcccccccggcgccggcagcggcgtgccctacttctacctgagccccctgcagctgagcgtgagcaacctgcaggagaacccctacgccaccctgaccatgaccctggcccagaccaacttctgcaagaagcacggcttcgacccccagagccccctgtgcgtgcacatcatgctgagcggcaccgtgaccaaggtgaacgagaccgagatggacatcgccaagcacagcctgttcatcagacaccccgagatgaagacctggcccagcagccacaactggttcttcgccaagctgaacatcaccaacatctgggtgctggactacttcggcggccccaagatcgtgacccccgaggagtactacaacgtgaccgtgcagtag

SEQ ID NO: 141315 - DNA, 663 bp, Artificial Sequence
  derived and/or modified sequence
atggccgggctaagccgggggagtgctagggcacttctcgccgcactccttgcctctactctgctggcccttctggtctcccctgcgaggggccgcggcgggagggatcacggcgactgggacgaagcttcccgcctgccgccactaccacctagggaggacgcagcgagggtggcccgcttcgtgacccacgtgagcgattggggcgctctcgcgacaattagcaccctagaggccgtgagaggaaggcctttcgcagacgtgctatctctctcagacggtcctccaggagctggaagtggcgttccatatttttatttgtcgcccctgcagctatccgtaagcaacctgcaggagaacccgtacgcgactttgacgatgaccttagcccagactaacttctgtaaaaaacacggttttgatccccagtcaccactgtgcgtgcacataatgctgtccgggactgtgaccaaagtcaatgaaaccgagatggacatcgccaagcacagcctattcataaggcacccagaaatgaagacctggccttcttcccacaactggtttttcgctaagctcaatatcacgaacatttgggtcctcgactattttggtgggccaaaaattgtaacaccggaggaatattacaatgtgacagtacagtag

SEQ ID NO: 141316 - DNA, 1974 bp, Artificial Sequence
  derived and/or modified sequence
ccgggactcttcctggagacaccgccatggccgggctatcccgcgggtccgcgcgcgcactgctcgccgccctgctggcgtcgacgctgttggcgctgctcgtgtcgcccgcgcggggtcgcggcggccgggaccacggggactgggacgaggcctcccggctgccgccgctaccaccccgcgaggacgcggcgcgcgtggcccgcttcgtgacgcacgtctccgactggggcgctctggccaccatctccacgctggaggcggtgcgcggccggcccttcgccgacgtcctctcgctcagcgacgggcccccgggcgcgggcagcggcgtgccctatttctacctgagcccgctgcagctctccgtgagcaacctgcaggagaatccatatgctacactgaccatgactttggcacagaccaacttctgcaagaaacatggatttgatccacaaagtcccctttgtgttcacataatgctgtcaggaactgtgaccaaggtgaatgaaacagaaatggatattgcaaagcattcgttattcattcgacaccctgagatgaaaacctggccttccagccataattggttctttgctaagttgaatataaccaatatctgggtcctggactactttggtggaccaaaaatcgtgacaccagaagaatattataatgtcacagttcagtgaagcagactgtggtgaatttagcaacacttatgaagtttcttaaagtggctcatacacacttaaaaggcttaatgtttctctggaaagcgtcccagaatattagccagttttctgtcacatgctggtttgtttgcttgcttgtttacttgcttgtttaccaatagagttgacctgttattggatttcctggaagatgtggtagctacttttttcctattttgaagccattttcgtagagaaatatccttcactataatcaaataagttttgtcccatcaattccaaagatgtttccagtggtgctcttgaagaggaatgagtaccagttttaaattgcccattggcatttgaaggtagttgagtatgtgttctttattcctagaagccactgtgcttggtagagtgcatcactcaccacagctgcctcctgagctgcctgagcctggtgcaaaaggattggcccccattatggtgcttctgaataaatcttgccaagatagacaaacaatgatgaaactcagatggagcttcctactcacgttgatttatgtctcacaatcctgggtattgttaattcaacatagggtgaaactatttctgataaagaacttttgaaaaactttttatactctaaagtgatactcagaacaaaagaaagtcataaaactcctgaatttaatttccccacctaagtcgaaacagtattatcaaaacacatgtgcacacagattattttttggctccaaaactggattgcaaaagaaagaggagaagaatattttgtgtgttcctggtattcttttataagtaaagtttacccaggcatggaccagcttcagccagggacaaaatcccctcccaaaccactctccacagctttttaaaaatacttctactcttaacaattacctaaggcttcctcaactgccccaaatctcttaatagcttctagtgctgctacaatctaagtcaggtcaccagagggaagagaacatggcattaaaagaatcacatcttcagaagagaagacactaatattattacccatatacatgatttcagaagatgacataagattcctcttaaagaggaaatgtcaggaatcaagccactgaatccttaaagagaaaagttgaatatgagtcattgtgtctgaaaactgcaaagtgaacttaactgagatccagcaaacaggttctgtttaagaaaaataatttatactaaatttagtaaaatggacttcttattcaaagcatcaataattaaaagaattattttaatgaaa

SEQ ID NO: 141317 - DNA, 663 bp, Artificial Sequence
  derived and/or modified sequence
atggccggcctgagccggggcagcgcccgggccctgctggccgccctgctggccagcaccctgctggccctgctggtgtccccagcccggggccggggcggccgggaccatggagactgggatgaggccagccggctgccccccctgcccccaagagaagatgctgcccgggtggccaggtttgtgacccacgtgtctgactggggcgccctggccaccatcagcaccctggaggccgtgcggggccggccctttgctgatgtgctgagcctgagtgatggccccccaggggccggcagcggcgtgccctacttctacctgagccccctgcagctgtctgtgagcaacctgcaggagaacccctatgccaccctgaccatgaccctggcccagaccaacttctgcaagaagcacggctttgacccccagagccccctgtgtgtgcacatcatgctgtctggaacagtgaccaaggtgaatgaaacagagatggacatcgccaagcacagcctcttcatccgccaccctgagatgaagacctggcccagcagccacaactggttctttgccaagctgaacatcaccaacatctgggtgctggactactttggaggccccaagatcgtgaccccagaggagtactacaacgtgacagtgcagtag

SEQ ID NO: 141318 - DNA, 663 bp, Artificial Sequence
  derived and/or modified sequence
atggccggcctgagccggggcagcgcccgggccctgctggccgcccttttagcctccacattattggccctcctggtgtccccagcacgcggacgaggagggcgggatcacggtgactgggatgaggccagccggcttccacccttgcctccccgcgaggatgccgcacgtgtagcccgattcgtaacccatgtgagtgattggggcgccctggcaaccatctctactctcgaggcagtacgagggcggcccttcgcggatgtgctgagcctgtcagacgggccccctggcgcgggctcaggggtgccttacttctatctctctcccctgcagttgagcgtatccaacctgcaagaaaacccatacgcaacgctgaccatgactttagctcagaccaatttttgcaaaaagcacggtttcgacccacagtcaccactgtgcgtgcacattatgctgagtggaacagtgacaaaggtcaatgaaaccgagatggatatcgcaaaacactccctgttcataagacaccccgagatgaagacatggccgtccagtcacaattggttctttgcaaagctaaacattacaaatatctgggtgttggactatttcggcgggcccaaaatcgtcacaccagaagagtactacaatgtcaccgtccagtag

SEQ ID NO: 141319 - RNA, 663 nt, Artificial Sequence
  derived and/or modified sequence
auggcaggauuaagccguggcagcgcaagagcacuguuagcagccuugcuggccucuacacugcuugcccucuuaguuagcccugcaagaggccgcggcggcagggaucauggagauugggacgaggcuagcagacucccuccucugcccccccgcgaagacgcagcucgcguggcuagauucgugacacaugucagcgacuggggcgccuuagcuacuauuucuacacuagaggcaguacgaggucguccauuugcugacguucucucccuuucggaugguccucccggggccgggucuggagugccguauuuuuaccucagcccauuacagcuuagcgucucgaaucuccaggagaauccguacgccacccucacaaugacacucgcucagacuaacuuuuguaagaagcacggcuucgauccacaauccccacucuguguccacaucaugcuuagcgggacggugacuaaagugaacgaaacggagauggacauugccaagcauuccuuguuuauccgccaucccgaaaugaaaaccuggccaucuucacauaacugguucuuugcgaaacucaacauaaccaauaucuggguccuagacuacuuuggcgguccgaaaauuguuaccccagaagaguacuacaauguaacuguucaauag

SEQ ID NO: 141320 - RNA, 663 nt, Artificial Sequence
  derived and/or modified sequence
auggcugggcuuucacgcgguucugcccgcgcauuacuggccgcccuacuggcgucaacauuacuggcucuguuagugucgcccgcucguggacgugggggccgugaccacggggauugggacgaggccagcaggcuuccaccucuuccacccagggaagacgcugcucguguugcacgcuucguaacacacgucucugacuggggagcauuggcuaccauaagcacacuggaggcuguuagaggcaggcccuuugcagacguauuaucccucuccgauggcccuccuggggcaggcucuggcgucccguauuucuaccuguccccgcuccagcuuuccguguccaauuugcaagagaacccuuaugccacauuaacaaugacauuggcgcagaccaauuucugcaaaaaacacggcuucgauccucaguccccucugugcguccauaucaugcuuucuggcacugugaccaaggugaacgaaaccgagauggauauugcaaagcauucucuguucauucgacauccggagaugaaaacauggccaagcucucacaacugguuuuucgcgaaacugaauaucacgaacauuuggguucuggauuacuuuggcggccccaagaucgugacuccugaggaauacuauaacgugaccguucaauag

SEQ ID NO: 141321 - protein, 549 aa, Artificial Sequence
  derived and/or modified sequence
MEGPRSAACRARPATSPGAVDLTAPPPPPLLRILNSRAAPATRTFADLCRSLLQPESRVLCRLQPVNCYPPAASTKLCPVGVIRCPVCSQECAERHIIDNFFVKDTTEVPSSTVEKSNQVCTSCEDNAEANGFCVECVEWLCKTCIRAHQRVKFTKDHTVRQKEEVSPEAVGVTSQRPVFCPFHKKEQLKLYCETCDKLTCRDCQLLEHKEHRYQFIEEAFQNQKVIIDTLITKLMEKTKYIKFTGNQIQNRIIEVNQNQKQVEQDIKVAIFTLMVEINKKGKALLHQLESLAKDHRMKLMQQQQEVAGLSKQLEHVMHFSKWAVSSGSSTALLYSKRLITYRLRHLLRARCDASPVTNNTIQFHCDPSFWAQNIINLGSLVIEDKESQPQMPKQNPVVEQNSQPPSGLSSNQLSKFPTQISLAQLRLQHMQQQQPPPRLINFQNHSPKPNGPVLPPHPQQLRYPPNQNIPRQAIKPNPLQMAFLAQQAIKQWQISSGQGTPSTTQNINTAACTVFDVRVLHHIPYWALNISSSERDSFLWFSSVYNLE

SEQ ID NO: 141322 - protein, 1016 aa, Artificial Sequence
  derived and/or modified sequence
MEVAVEKAVAAAAAASAAASGGPSAAPSGENEAESRQGPDSERGGEAARLNLLDTCAVCHQNIQSRAPKLLPCLHSFCQRCLPAPQRYLMLPAPMLGSAETPPPVPAPGSPVSGSSPFATQVGVIRCPVCSQECAERHIIDNFFVKDTTEVPSSTVEKSNQVCTSCEDNAEANGFCVECVEWLCKTCIRAHQRVKFTKDHTVRQKEEVSPEAVGVTSQRPVFCPFHKKEQLKLYCETCDKLTCRDCQLLEHKEHRYQFIEEAFQNQKVIIDTLITKLMEKTKYIKFTGNQIQNRIIEVNQNQKQVEQDIKVAIFTLMVEINKKGKALLHQLESLAKDHRMKLMQQQQEVAGLSKQLEHVMHFSKWAVSSGSSTALLYSKRLITYRLRHLLRARCDASPVTNNTIQFHCDPSFWAQNIINLGSLVIEDKESQPQMPKQNPVVEQNSQPPSGLSSNQLSKFPTQISLAQLRLQHMQQQQPPPRLINFQNHSPKPNGPVLPPHPQQLRYPPNQNIPRQAIKPNPLQMAFLAQQAIKQWQISSGQGTPSTTNSTSSTPSSPTITSAAGYDGKAFGSPMIDLSSPVGGSYNLPSLPDIDCSSTIMLDNIVRKDTNIDHGQPRPPSNRTVQSPNSSVPSPGLAGPVTMTSVHPPIRSPSASSVGSRGSSGSSSKPAGADSTHKVPVVMLEPIRIKQENSGPPENYDFPVVIVKQESDEESRPQNANYPRSILTSLLLNSSQSSTSEETVLRSDAPDSTGDQPGLHQDNSSNGKSEWLDPSQKSPLHVGETRKEDDPNEDWCAVCQNGGELLCCEKCPKVFHLSCHVPTLTNFPSGEWICTFCRDLSKPEVEYDCDAPSHNSEKKKTEGLVKLTPIDKRKCERLLLFLYCHEMSLAFQDPVPLTVPDYYKIIKNPMDLSTIKKRLQEDYSMYSKPEDFVADFRLIFQNCAEFNEPDSEVANAGIKLENYFEELLKNLYPEKRFPKPEFRNESEDNKFSDDSDDDFVQPRKKRLKSIEERQLLK

SEQ ID NO: 141323 - DNA, 3905 bp, Artificial Sequence
  derived and/or modified sequence
gacagataccctccttccggccgcgccactcgggaggcggatcccgtgggcctgaggaggcttcccccgcccggtttgctttccctccctcgctggcgctgccgcgagtccaccgagcggcctctgaggagcagccgcaggaggaggaggaggtcgtcgggggcggcgggcggagaccgcgctctcgcttccccggcggcggcaagggcaggacaatggaggtggcggtggagaaggcggtggcggcggcggcagcggcctcggctgcggcctccggggggccctcggcggcgccgagcggggagaacgaggccgagagtcggcagggcccggactcggagcgcggcggcgaggcggcccggctcaacctgttggacacttgcgccgtgtgccaccagaacatccagagccgggcgcccaagctgctgccctgcctgcactctttctgccagcgctgcctgcccgcgccccagcgctacctcatgctgcccgcgcccatgctgggctcggccgagaccccgccacccgtccctgcccccggctcgccggtcagcggctcgtcgccgttcgccacccaagttggagtcattcgttgcccagtttgcagccaagaatgtgcagagagacacatcatagataacttttttgtgaaggacactactgaggttcccagcagtacagtagaaaagtcaaatcaggtatgtacaagctgtgaggacaacgcagaagccaatgggttttgtgtagagtgtgttgaatggctctgcaagacgtgtatcagagctcatcagagggtaaagttcacaaaagaccacactgtcagacagaaagaggaagtatctccagaggcagttggtgtcaccagccagcgaccagtgttttgtccttttcataaaaaggagcagctgaagctgtactgtgagacatgtgacaaactgacatgtcgagactgtcagttgttagaacataaagagcatagataccaatttatagaagaagcttttcagaatcagaaagtgatcatagatacactaatcaccaaactgatggaaaaaacaaaatacataaaattcacaggaaatcagatccaaaacagaattattgaagtaaatcaaaatcaaaagcaggtggaacaggatattaaagttgctatatttacactgatggtagaaataaataaaaaaggaaaagctctactgcatcagttagagagccttgcaaaggaccatcgcatgaaacttatgcaacaacaacaggaagtggctggactctctaaacaattggagcatgtcatgcatttttctaaatgggcagtttccagtggcagcagtacagcattactttatagcaaacgactgattacataccggttacggcacctccttcgtgcaaggtgtgatgcatccccagtgaccaacaacaccatccaatttcactgtgatcctagtttctgggctcaaaatatcatcaacttaggttctttagtaatcgaggataaagagagccagccacaaatgcctaagcagaatcctgtcgtggaacagaattcacagccaccaagtggtttatcatcaaaccagttatccaagttcccaacacagatcagcctagctcaattacggctccagcatatgcagcaacagcaaccgcctccacgtttgataaactttcagaatcacagccccaaacccaatggaccagttcttcctcctcatcctcaacaactgagatatccaccaaaccagaacataccacgacaagcaataaagccaaaccccctacagatggctttcttggctcaacaagccataaaacagtggcagatcagcagtggacagggaaccccatcaactaccaacagcacatcctctactccttccagccccacgattactagtgcagcaggatatgatggaaaggcttttggttcacctatgatcgatttgagctcaccagtgggagggtcttataatcttccctctcttccggatattgactgttcaagtactattatgctggacaatattgtgaggaaagatactaatatagatcatggccagccaagaccaccctcaaacagaacggtccagtcaccaaattcatcagtgccatctccaggccttgcaggacctgttactatgactagtgtacaccccccaatacgttcacctagtgcctccagcgttggaagccgaggaagctctggctcttccagcaaaccagcaggagctgactctacacacaaagtcccagtggtcatgctggagccaattcgaataaaacaagaaaacagtggaccaccggaaaattatgatttccctgttgttatagtgaagcaagaatcagatgaagaatctaggcctcaaaatgccaattatccaagaagcatactcacctccctgctcttaaatagcagtcagagctctacttctgaggagactgtgctaagatcagatgcccctgatagtacaggagatcaacctggacttcaccaggacaattcctcaaatggaaagtctgaatggttggatccttcccagaagtcacctcttcatgttggagagacaaggaaagaggatgaccccaatgaggactggtgtgcagtttgtcaaaacggaggggaactcctctgctgtgaaaagtgccccaaagtattccatctttcttgtcatgtgcccacattgacaaattttccaagtggagagtggatttgcactttctgccgagacttatctaaaccagaagttgaatatgattgtgatgctcccagtcacaactcagaaaaaaagaaaactgaaggccttgttaagttaacacctatagataaaaggaagtgtgagcgcctacttttatttctttactgccatgaaatgagcctggcttttcaagaccctgttcctctaactgtgcctgattattacaaaataattaaaaatccaatggatttgtcaaccatcaagaaaagactacaagaagattattccatgtactcaaaacctgaagattttgtagctgattttagattgatctttcaaaactgtgctgaattcaatgagcctgattcagaagtagccaatgctggtataaaacttgaaaattattttgaagaacttctaaagaacctctatccagaaaaaaggtttcccaaaccagaattcaggaatgaatcagaagataataaatttagtgatgattcagatgatgactttgtacagccccggaagaaacgcctcaaaagcattgaagaacgccagttgcttaaataatatgcagcaccactagcttgtgctggtttttagatttttttgttttcaaaaaaacatttgtcagtaatttaacatcactacaaaaagaagagtttgtgactattctcatctctgttttggacgtttactagactttgatttccttaatagcccatttctgttaacctcttatcactaagaaagaaaggaaagaaggagatgaatagaagaaagaaaatggaaagaaggaaaaaaggaggatagaaaaaggatggaagaaagaagcattgaaaacaaagacattcttcccacttcttggatttttaaaccacagtctggagtgatagctactgtagaaaggaaatagactttgtatgaactctttaagttgaaaagtaaaaaatatatgtggtttggatgtgtgctttaattcagctttagaaattaataccactacccgtgaattatatggcctgacaatatgaattaggtgtactgtactgaagaacagtactccacaaacatgggtggtaacaagagttccatcccaggaggccaaacggtgcaacagaagggtaggttagatgctattaagaaggcacttaatagtacatcatgtaagatggcaactgtattaaagaaaaatccggaaaacaaaaa

SEQ ID NO: 141324 - DNA, 1650 bp, Artificial Sequence
  derived and/or modified sequence
atggagggccccagaagcgccgcctgcagagccagacccgccaccagccccggcgccgtggacctgaccgcccccccccccccccccctgctgagaatcctgaacagcagagccgcccccgccaccagaaccttcgccgacctgtgcagaagcctgctgcagcccgagagcagagtgctgtgcagactgcagcccgtgaactgctacccccccgccgccagcaccaagctgtgccccgtgggcgtgatcagatgccccgtgtgcagccaggagtgcgccgagagacacatcatcgacaacttcttcgtgaaggacaccaccgaggtgcccagcagcaccgtggagaagagcaaccaggtgtgcaccagctgcgaggacaacgccgaggccaacggcttctgcgtggagtgcgtggagtggctgtgcaagacctgcatcagagcccaccagagagtgaagttcaccaaggaccacaccgtgagacagaaggaggaggtgagccccgaggccgtgggcgtgaccagccagagacccgtgttctgccccttccacaagaaggagcagctgaagctgtactgcgagacctgcgacaagctgacctgcagagactgccagctgctggagcacaaggagcacagataccagttcatcgaggaggccttccagaaccagaaggtgatcatcgacaccctgatcaccaagctgatggagaagaccaagtacatcaagttcaccggcaaccagatccagaacagaatcatcgaggtgaaccagaaccagaagcaggtggagcaggacatcaaggtggccatcttcaccctgatggtggagatcaacaagaagggcaaggccctgctgcaccagctggagagcctggccaaggaccacagaatgaagctgatgcagcagcagcaggaggtggccggcctgagcaagcagctggagcacgtgatgcacttcagcaagtgggccgtgagcagcggcagcagcaccgccctgctgtacagcaagagactgatcacctacagactgagacacctgctgagagccagatgcgacgccagccccgtgaccaacaacaccatccagttccactgcgaccccagcttctgggcccagaacatcatcaacctgggcagcctggtgatcgaggacaaggagagccagccccagatgcccaagcagaaccccgtggtggagcagaacagccagccccccagcggcctgagcagcaaccagctgagcaagttccccacccagatcagcctggcccagctgagactgcagcacatgcagcagcagcagcccccccccagactgatcaacttccagaaccacagccccaagcccaacggccccgtgctgcccccccacccccagcagctgagatacccccccaaccagaacatccccagacaggccatcaagcccaaccccctgcagatggccttcctggcccagcaggccatcaagcagtggcagatcagcagcggccagggcacccccagcaccacccagaacatcaacaccgccgcctgcaccgtgttcgacgtgagagtgctgcaccacatcccctactgggccctgaacatcagcagcagcgagagagacagcttcctgtggttcagcagcgtgtacaacctggagtag

SEQ ID NO: 141325 - DNA, 3051 bp, Artificial Sequence
  derived and/or modified sequence
atggaggtggccgtggagaaggccgtggccgccgccgccgccgccagcgccgccgccagcggcggccccagcgccgcccccagcggcgagaacgaggccgagagcagacagggccccgacagcgagagaggcggcgaggccgccagactgaacctgctggacacctgcgccgtgtgccaccagaacatccagagcagagcccccaagctgctgccctgcctgcacagcttctgccagagatgcctgcccgccccccagagatacctgatgctgcccgcccccatgctgggcagcgccgagacccccccccccgtgcccgcccccggcagccccgtgagcggcagcagccccttcgccacccaggtgggcgtgatcagatgccccgtgtgcagccaggagtgcgccgagagacacatcatcgacaacttcttcgtgaaggacaccaccgaggtgcccagcagcaccgtggagaagagcaaccaggtgtgcaccagctgcgaggacaacgccgaggccaacggcttctgcgtggagtgcgtggagtggctgtgcaagacctgcatcagagcccaccagagagtgaagttcaccaaggaccacaccgtgagacagaaggaggaggtgagccccgaggccgtgggcgtgaccagccagagacccgtgttctgccccttccacaagaaggagcagctgaagctgtactgcgagacctgcgacaagctgacctgcagagactgccagctgctggagcacaaggagcacagataccagttcatcgaggaggccttccagaaccagaaggtgatcatcgacaccctgatcaccaagctgatggagaagaccaagtacatcaagttcaccggcaaccagatccagaacagaatcatcgaggtgaaccagaaccagaagcaggtggagcaggacatcaaggtggccatcttcaccctgatggtggagatcaacaagaagggcaaggccctgctgcaccagctggagagcctggccaaggaccacagaatgaagctgatgcagcagcagcaggaggtggccggcctgagcaagcagctggagcacgtgatgcacttcagcaagtgggccgtgagcagcggcagcagcaccgccctgctgtacagcaagagactgatcacctacagactgagacacctgctgagagccagatgcgacgccagccccgtgaccaacaacaccatccagttccactgcgaccccagcttctgggcccagaacatcatcaacctgggcagcctggtgatcgaggacaaggagagccagccccagatgcccaagcagaaccccgtggtggagcagaacagccagccccccagcggcctgagcagcaaccagctgagcaagttccccacccagatcagcctggcccagctgagactgcagcacatgcagcagcagcagcccccccccagactgatcaacttccagaaccacagccccaagcccaacggccccgtgctgcccccccacccccagcagctgagatacccccccaaccagaacatccccagacaggccatcaagcccaaccccctgcagatggccttcctggcccagcaggccatcaagcagtggcagatcagcagcggccagggcacccccagcaccaccaacagcaccagcagcacccccagcagccccaccatcaccagcgccgccggctacgacggcaaggccttcggcagccccatgatcgacctgagcagccccgtgggcggcagctacaacctgcccagcctgcccgacatcgactgcagcagcaccatcatgctggacaacatcgtgagaaaggacaccaacatcgaccacggccagcccagaccccccagcaacagaaccgtgcagagccccaacagcagcgtgcccagccccggcctggccggccccgtgaccatgaccagcgtgcacccccccatcagaagccccagcgccagcagcgtgggcagcagaggcagcagcggcagcagcagcaagcccgccggcgccgacagcacccacaaggtgcccgtggtgatgctggagcccatcagaatcaagcaggagaacagcggcccccccgagaactacgacttccccgtggtgatcgtgaagcaggagagcgacgaggagagcagaccccagaacgccaactaccccagaagcatcctgaccagcctgctgctgaacagcagccagagcagcaccagcgaggagaccgtgctgagaagcgacgcccccgacagcaccggcgaccagcccggcctgcaccaggacaacagcagcaacggcaagagcgagtggctggaccccagccagaagagccccctgcacgtgggcgagaccagaaaggaggacgaccccaacgaggactggtgcgccgtgtgccagaacggcggcgagctgctgtgctgcgagaagtgccccaaggtgttccacctgagctgccacgtgcccaccctgaccaacttccccagcggcgagtggatctgcaccttctgcagagacctgagcaagcccgaggtggagtacgactgcgacgcccccagccacaacagcgagaagaagaagaccgagggcctggtgaagctgacccccatcgacaagagaaagtgcgagagactgctgctgttcctgtactgccacgagatgagcctggccttccaggaccccgtgcccctgaccgtgcccgactactacaagatcatcaagaaccccatggacctgagcaccatcaagaagagactgcaggaggactacagcatgtacagcaagcccgaggacttcgtggccgacttcagactgatcttccagaactgcgccgagttcaacgagcccgacagcgaggtggccaacgccggcatcaagctggagaactacttcgaggagctgctgaagaacctgtaccccgagaagagattccccaagcccgagttcagaaacgagagcgaggacaacaagttcagcgacgacagcgacgacgacttcgtgcagcccagaaagaagagactgaagagcatcgaggagagacagctgctgaagtag

SEQ ID NO: 141326 - DNA, 1650 bp, Artificial Sequence
  derived and/or modified sequence
atggaaggaccacgatccgctgcctgcagggcgaggcccgcaacgtcaccgggggcagtcgatcttacagctccgccacctcccccacttttacggattctgaattctagggccgctccagcaacccgaaccttcgctgatctctgtagaagtctactgcagcccgagtctcgggtactctgcagactccagcccgtaaattgctatccccccgcggcttccactaagctctgccctgtgggagtgattcggtgtccagtctgtagtcaggaatgtgcggagcgacatattatagacaactttttcgtgaaggatacaactgaggtgccaagctccaccgtggaaaagagcaaccaggtgtgtaccagttgtgaggacaacgctgaggccaacggcttctgtgtcgaatgcgtggagtggctgtgcaagacatgtatccgtgcccatcaacgcgtgaagttcaccaaagatcacactgtgcggcagaaggaggaggtttctccagaagctgtgggcgtgactagccaacggcctgttttttgccccttccacaaaaaggaacagctcaagctgtactgcgaaacatgtgacaaactaacatgccgggactgccagctcctggaacataaagagcataggtatcagtttattgaagaagccttccagaatcagaaagtgattatcgatactctcataaccaagctgatggagaagacaaagtacattaagttcacaggtaatcagattcagaataggatcattgaagtgaaccaaaaccagaaacaggtggaacaagacatcaaagtggccatctttacactgatggtggaaatcaacaaaaaaggcaaggcactcttacaccagctggaatcgctggcaaaagatcatcggatgaaacttatgcagcagcagcaggaagtggcgggactgagcaagcagctggaacatgtgatgcatttctctaagtgggccgtaagcagtgggtcctccaccgccctactctattctaaaaggttgatcacctacaggctcaggcacctgcttcgcgcgaggtgcgatgctagtcccgtaaccaataacacaatccagtttcattgcgacccaagtttctgggcacagaacatcatcaacctcgggagcctggtaatcgaagataaggagtcacagccccagatgccgaagcagaaccccgtggtagaacagaatagccaacctccctctggcctaagcagtaaccagctgagcaaattccctactcagatcagtctggcccagctcaggctgcagcacatgcagcagcagcagccaccacctcggctgattaattttcaaaatcatagcccgaaacccaacggaccagtcttgccaccccacccccagcagctccgatacccgcctaaccaaaacattccaagacaggcaataaagccgaacccgttgcagatggccttcctggcgcaacaggctattaagcagtggcagatttcctccggtcagggaacccccagtacaacccagaacataaacaccgccgcctgcacagtcttcgacgtccgggtactacatcacatcccctattgggctctgaacatcagctcctctgaaagggatagtttcttatggttttcatctgtgtacaatctggagtag

SEQ ID NO: 141327 - DNA, 3051 bp, Artificial Sequence
  derived and/or modified sequence
atggaggtcgccgtggaaaaagctgtggccgccgccgcggccgcctcagccgctgcctcaggaggaccatcagccgccccgtcaggcgaaaacgaagctgaatcacgccaggggcccgacagcgaacggggaggagaggctgcccgtctcaacctactggacacctgcgccgtgtgccatcagaacattcagtcaagagccccaaaactgttaccctgtctacactcgttctgccagcggtgtcttcccgcgcctcagaggtacttgatgctcccagctccaatgctcgggtccgcagaaacccccccaccagtgcctgcacctgggagtcctgtcagcggctcctcaccgttcgccactcaggtgggcgtgattagatgtccagtatgtagccaggaatgcgcagagcggcacattatcgacaatttcttcgtgaaggataccaccgaggttccgagttcaacagtagagaaaagtaatcaagtgtgtacttcgtgcgaggacaacgcggaagccaatggcttctgcgttgagtgtgtcgagtggctgtgcaaaacatgtatccgagcgcatcagcgagttaaattcacaaaagatcacactgtacgccagaaggaggaggtcagccctgaagctgtgggagttacatcccagcgaccagtcttctgccctttccacaagaaagagcaactgaagctgtactgcgaaacgtgtgataaactgacctgtagagactgccagttgctggaacacaaggagcacaggtatcagttcatagaagaggcgtttcagaatcagaaggtgatcatagacacccttataacgaaactaatggagaagactaaatacatcaagttcaccggcaatcagattcaaaaccgtatcatcgaagtcaatcagaaccaaaagcaggtcgagcaggacataaaggtcgccatctttacgctgatggtggaaatcaacaaaaagggtaaagctcttttgcatcagctggaatctctggctaaggatcaccggatgaagcttatgcaacaacagcaggaagtggcaggactttccaaacagctcgaacatgtgatgcactttagcaaatgggctgtgagcagcggttcaagtactgctctcctgtattccaaacggttgattacgtacagactgaggcacctgctgcgggctcgctgtgacgcttcaccggttactaacaatacaatccagttccactgtgatcccagtttctgggcccaaaacattataaatctgggaagtcttgttatcgaggacaaggaatcacagccacagatgcccaagcaaaaccctgttgtcgaacaaaatagccagcctccctcaggcctgagttccaaccagctgtccaaattccccacacaaatctctctggcacagctgcgattgcagcacatgcagcagcagcaaccgcccccccgccttatcaactttcaaaaccactcccccaaacccaacggccctgtcctacccccacatccacaacagcttaggtacccacccaaccagaacatcccccgacaggccatcaagccaaatcccctccagatggcctttctagctcaacaggccatcaagcaatggcagatctcctccggccagggaacaccctccacaacaaactccacctcgagcaccccctccagtcccaccataacatcagctgcagggtatgatggaaaggccttcggatcccctatgattgacctcagttctcctgttgggggttcatacaacctgccaagtctgccagatatagattgcagttccactataatgctcgataacattgttaggaaagatactaacattgatcacggtcagccaagaccaccttcgaatcgcaccgttcaaagcccaaattcttccgtgccgagccctggtctggcgggacccgttacaatgacatctgtgcatcctcccatcagatctcctagcgcttcgtctgtgggttcccgcggttcaagcggatctagctccaagccagcgggggccgactcaacccataaagtgcccgttgtcatgcttgagcctattaggatcaaacaggaaaactcaggcccccccgagaactatgattttcctgtcgtgattgtaaagcaggagagcgatgaagagtcacggccccaaaacgctaactatcctcgcagtatactgacgagcttgctgctgaactcgtcacagtcctcaactagcgaggaaacagtcctgagaagcgacgccccagactcaacaggggatcagcctgggctgcaccaggataatagcagtaatgggaaatctgaatggctcgatcctagccagaaatctccccttcatgttggggaaacccggaaggaggacgaccctaacgaggattggtgtgcagtgtgccagaatggcggtgaactgctgtgttgtgagaaatgtccgaaggtgttccacttatcgtgccacgtgcctactctgacgaattttccatctggagaatggatctgtactttttgtagagatctgtcaaaaccggaggtcgagtacgattgtgatgccccttcccacaacagcgaaaagaagaaaacggaaggtctcgtaaaactgaccccgattgacaagaggaaatgtgaacgtttactattattcttgtactgccacgagatgtccctggcgtttcaggaccctgtaccattgaccgtgccagactattataagattataaaaaaccccatggatctgtcaactattaagaaacggctccaggaggactattctatgtatagcaagccagaggatttcgtggcagacttccgcttgatttttcagaactgtgcagaatttaatgagccagacagcgaagttgccaacgccggtatcaagctggagaactactttgaggagctccttaagaacctttacccagagaagcgctttcctaaacccgagtttcgtaacgaaagcgaggacaataaattcagcgatgattcagacgatgattttgtccaaccgcggaaaaagcggctgaaatcaatcgaagagcggcaattacttaaatag

SEQ ID NO: 141328 - DNA, 1650 bp, Artificial Sequence
  derived and/or modified sequence
atggagggccccaggtctgctgcctgccgggcccggcctgccaccagccctggagctgtggacctgacagcccctcctcctccacccctgctgcgcatcctgaacagccgggccgccccagccaccaggacctttgctgacctgtgccgcagcctgctgcagcctgagagccgggtgctgtgccgcctgcagcctgtgaactgctaccccccagctgccagcaccaagctgtgccctgtgggcgtcatccgctgccctgtgtgcagccaggagtgtgccgagcggcacatcatcgacaacttctttgtgaaggacaccacagaggtgcccagcagcacagtggagaagagcaaccaggtgtgcaccagctgtgaagataatgctgaggccaacggcttctgtgtggagtgtgtggagtggctgtgcaagacctgcatccgggcccaccagagggtgaagttcaccaaggaccacacagtgcggcagaaggaggaggtgtccccagaggccgtgggcgtgaccagccagaggcctgtgttctgccccttccacaagaaggagcagctgaagctgtactgtgagacctgtgacaagctgacctgccgggactgccagctgctggagcacaaggagcaccgctaccagttcatcgaggaggccttccagaaccagaaggtgatcatcgacaccctcatcaccaagctgatggagaagaccaagtacatcaagttcaccggcaaccagatccagaaccgcatcatcgaggtgaaccagaaccagaagcaggtggagcaggacatcaaggtggccatcttcaccctgatggtggagatcaacaagaagggcaaggccctgctgcaccagctggagagcctggccaaggaccacaggatgaagctgatgcagcagcagcaggaggtggccggcctgagcaagcagctggagcacgtgatgcacttcagcaagtgggccgtgagcagcggcagcagcacagccctgctgtacagcaagaggctcatcacctaccgcctgcggcacctgctgcgggcccgctgtgatgccagccctgtgaccaacaacaccatccagttccactgtgaccccagcttctgggcccagaacatcatcaacctgggcagcctggtgattgaggacaaggagagccagccccagatgcccaagcagaaccctgtggtggagcagaacagccagcccccatctggcctgagcagcaaccagctgagcaagttccccacccagatcagcctggcccagctgcggctgcagcacatgcagcagcagcagcccccacccaggctcatcaacttccagaaccacagccccaagcccaatggacctgtgctgcccccccacccccagcagctgcgctacccacccaaccagaacatcccccggcaggccatcaagcccaaccccctgcagatggccttcctggcccagcaggccatcaagcagtggcagatcagcagcggccagggcacccccagcaccacccagaacatcaacacagctgcctgcaccgtgtttgatgtgcgggtgctgcaccacatcccctactgggccctgaacatcagcagcagcgagcgggacagcttcctgtggttcagctctgtgtacaacctggagtag

SEQ ID NO: 141329 - DNA, 3051 bp, Artificial Sequence
  derived and/or modified sequence
atggaggtggccgtggagaaggctgtggccgctgctgctgctgccagcgctgctgccagcggcggccccagcgctgcccccagcggggagaatgaagctgagagccggcagggcccagattctgagcggggcggggaggccgcccggctgaacctgctggacacctgtgctgtgtgccaccagaacatccagagccgggcccccaagctgctgccctgcctgcacagcttctgccagcgctgcctgcctgccccccagcgctacctgatgctgcctgcccccatgctgggcagcgctgagaccccacctcctgtgcctgcccctggcagccctgtgtctggcagcagcccctttgccacccaggtgggcgtcatccgctgccctgtgtgcagccaggagtgtgccgagcggcacatcatcgacaacttctttgtgaaggacaccacagaggtgcccagcagcacagtggagaagagcaaccaggtgtgcaccagctgtgaagataatgctgaggccaacggcttctgtgtggagtgtgtggagtggctgtgcaagacctgcatccgggcccaccagagggtgaagttcaccaaggaccacacagtgcggcagaaggaggaggtgtccccagaggccgtgggcgtgaccagccagaggcctgtgttctgccccttccacaagaaggagcagctgaagctgtactgtgagacctgtgacaagctgacctgccgggactgccagctgctggagcacaaggagcaccgctaccagttcatcgaggaggccttccagaaccagaaggtgatcatcgacaccctcatcaccaagctgatggagaagaccaagtacatcaagttcaccggcaaccagatccagaaccgcatcatcgaggtgaaccagaaccagaagcaggtggagcaggacatcaaggtggccatcttcaccctgatggtggagatcaacaagaagggcaaggccctgctgcaccagctggagagcctggccaaggaccacaggatgaagctgatgcagcagcagcaggaggtggccggcctgagcaagcagctggagcacgtgatgcacttcagcaagtgggccgtgagcagcggcagcagcacagccctgctgtacagcaagaggctcatcacctaccgcctgcggcacctgctgcgggcccgctgtgatgccagccctgtgaccaacaacaccatccagttccactgtgaccccagcttctgggcccagaacatcatcaacctgggcagcctggtgattgaggacaaggagagccagccccagatgcccaagcagaaccctgtggtggagcagaacagccagcccccatctggcctgagcagcaaccagctgagcaagttccccacccagatcagcctggcccagctgcggctgcagcacatgcagcagcagcagcccccacccaggctcatcaacttccagaaccacagccccaagcccaatggacctgtgctgcccccccacccccagcagctgcgctacccacccaaccagaacatcccccggcaggccatcaagcccaaccccctgcagatggccttcctggcccagcaggccatcaagcagtggcagatcagcagcggccagggcacccccagcaccaccaacagcaccagcagcacccccagcagccccaccatcaccagcgctgctggctatgatggcaaggccttcggcagccccatgattgacctgagcagccctgtgggcggcagctacaacctgcccagcctgcctgacatcgactgcagcagcaccatcatgctggacaacatcgtgaggaaggacaccaacatcgaccacggccagccccggccccccagcaacagaacagtgcagagccccaacagctctgtgcccagccctggcctggccggccctgtgaccatgacctctgtgcacccccccatccgcagccccagcgccagctctgtgggcagccggggcagcagcggcagcagcagcaagccagctggagctgacagcacccacaaggtgcctgtggtgatgctggagcccatccgcatcaagcaggagaacagcggccccccagaaaattatgacttccctgtggtgattgtgaagcaggagagtgatgaggagagccggccccagaatgccaactaccccaggagcatcctgaccagcctgctgctgaacagcagccagagcagcaccagcgaggagaccgtgctgcggagtgatgccccagacagcactggagaccagcccggcctgcaccaggacaacagcagcaatggcaagtctgagtggctggaccccagccagaagagccccctgcacgtgggggagaccaggaaagaagatgaccccaatgaagactggtgtgctgtgtgccagaatggaggagagctgctgtgctgtgagaagtgccccaaggtgttccacctgagctgccacgtgcccaccctgaccaacttccccagcggggagtggatctgcaccttctgccgggacctgagcaagccagaggtggagtatgactgtgatgcccccagccacaacagcgagaagaagaagacagagggcctggtgaagctgacccccatcgacaagaggaaatgtgagcggctgctgctcttcctgtactgccacgagatgagcctggccttccaggaccctgtgcccctgactgtgcctgactactacaagatcatcaagaaccccatggacctgagcaccatcaagaagaggctgcaggaggactacagcatgtacagcaagccagaagattttgtggccgacttccgcctcatcttccagaactgtgccgagttcaatgaaccagacagcgaggtggccaatgccggcatcaagctggagaactactttgaggagctgctgaagaacctgtacccagagaagcgcttccccaagccagagttcagaaatgaaagtgaggacaacaagttcagtgatgacagtgatgatgactttgtgcagcccaggaagaagaggctgaagagcattgaggagcggcagctgctgaagtag

SEQ ID NO: 141330 - DNA, 1650 bp, Artificial Sequence
  derived and/or modified sequence
atggagggcccccggagcgccgcctgccgggcccggcccgccaccagccctggggccgtcgacttgacagccccacccccacccccactgttgcgcattctgaacagcagggctgcacctgcaactcgcacgtttgcggacctatgccgctcattgttgcaacccgaatcaagagtgttatgtcgtctgcagccagtgaattgttacccaccagccgcttctaccaagttgtgccccgtgggggtcatccggtgcccagtgtgctcacaggagtgcgccgaaagacatatcatagataacttctttgtaaaggacactaccgaggtgccatcttctacagtcgaaaaatcaaaccaggtgtgcacatcatgcgaggacaatgccgaggcaaatggcttttgtgtggaatgcgttgagtggctgtgtaaaacttgcatcagggcacaccaaagggtgaagttcacaaaggatcatacagtgcgtcagaaggaggaagtgagtcctgaggccgtcggcgtgaccagtcagagacctgttttttgtccatttcacaaaaaagagcagcttaaactatactgtgagacctgtgataaactcacttgccgagactgtcaattattggaacacaaggaacatagataccagtttatcgaagaggctttccagaaccaaaaagtcattatagataccttaattaccaagctgatggagaaaacaaagtatatcaagtttaccggtaaccagattcagaacagaatcatcgaggtgaaccagaaccaaaagcaagttgaacaggacatcaaagtggccatattcactctcatggtagagatcaataagaagggcaaagccctgctccatcagctggaatccctcgcaaaggatcaccgcatgaaacttatgcaacaacagcaggaagtggctgggctcagtaaacagctggagcatgtcatgcatttctcgaagtgggccgtgagcagcggaagcagtacagccctcctgtatagtaaacgtctgatcacctatcgactacggcatttgctcagagctcgctgtgatgcttctcccgttacaaataatactatccaatttcactgcgacccgtctttctgggcccagaatatcattaatctggggagcctcgtcatagaagacaaggaatctcagccccagatgccgaagcagaaccctgtagtggagcagaattcccagccaccctccgggctatccagcaatcagctttccaaattccccacccagattagtcttgcccagttgcgcctgcagcatatgcagcaacagcagccacccccacgactgatcaacttccagaaccatagtcccaaaccgaatggacccgttctgccaccccacccccaacaactaaggtacccgcccaatcagaacattccaagacaggccatcaaaccaaatcccctccagatggcgtttctcgctcagcaggcaataaagcaatggcaaattagctcaggtcaaggtacacccagtaccacacagaacatcaacactgcggcttgtactgtgttcgacgtacgcgtgcttcaccacatcccgtattgggcactaaacataagctcctccgaaagagactccttcctgtggttttctagcgtgtataacctggaatag

SEQ ID NO: 141331 - DNA, 3051 bp, Artificial Sequence
  derived and/or modified sequence
atggaggtggccgtggagaaggccgtggccgccgccgccgccgcctcagcagcggccagtgggggaccctcggccgccccttcgggagagaacgaggcagagtcccgtcagggccccgattccgagcgggggggggaagccgccaggctaaacctgctcgacacctgcgccgtgtgtcatcagaacatccaatctcgagccccaaagctgctgccctgtctccattctttctgccagcgctgcctacccgcacctcaacggtacctcatgctccctgcaccgatgctgggttcagccgagacccctccgcccgtcccggccccaggatctccagtgtcaggctctagcccattcgctacacaagtgggcgttatcaggtgtcctgtttgctcccaggagtgcgcggaacgtcatatcatcgacaacttcttcgtgaaagatacgaccgaagtcccaagtagcacagtggagaaaagcaaccaggtctgtaccagctgtgaagacaacgctgaggcaaatggattctgtgtcgagtgcgtagaatggctgtgcaaaacatgcatcagagcacaccaacgggtgaaatttaccaaagatcacacagtgcgtcagaaggaagaagtgagtcctgaagccgtgggtgtaacaagccagagacctgttttttgccctttccacaaaaaagaacagctcaagctgtattgcgagacctgcgacaaattgacttgcagagactgtcaattactggagcacaaggaacaccgctatcagttcattgaggaggctttccagaaccagaaggtgataattgacactctgattaccaagttgatggagaagactaagtacatcaaattcaccggcaaccaaatccagaataggattattgaggtgaaccaaaaccaaaaacaggtagagcaagatatcaaggtggccatcttcaccctgatggttgagattaacaaaaagggtaaggccctgttgcaccagctggagtctctagctaaggaccatcggatgaagcttatgcagcagcagcaagaagtggcgggcctcagcaaacagctggaacacgtaatgcatttttcaaagtgggctgtcagttcaggatcgagcacggccctcctgtatagtaagagacttatcacataccgcctccggcatctgcttcgcgcaaggtgtgacgcatcccccgtgaccaacaacaccattcagtttcactgcgatccttctttctgggcacaaaacattattaacctgggctctctggtgatcgaagataaggaatcgcaacctcagatgccaaagcagaacccagtggttgaacagaacagccaacctccttccggacttagtagcaatcagctgtctaagttcccgactcagataagtctcgcccagctcaggttacaacatatgcaacagcagcagcccccgcctcgtctcatcaatttccagaatcactctccaaagccaaatggccccgtgttgcctcctcaccctcaacagctgaggtacccacctaatcagaatatccccagacaggccataaaacctaatcccttacagatggcatttctggcccagcaagcaatcaagcagtggcaaattagctccggccaaggcaccccaagcactacaaattccacttcctccacgccttccagcccgaccatcacttcagctgccggatatgacggaaaagcatttggctcgcctatgattgatctgtctagccctgttggaggaagctacaacctaccctcgctgcccgacattgactgctctagcacaatcatgctggacaacatcgtgagaaaggatactaatattgaccatggtcagccaaggccacccagcaacagaacagtgcagagcccaaactccagtgtcccaagccctggccttgccggcccagttactatgactagcgtacatccacccatcagatcacctagcgcctcctctgtaggaagcaggggttcctctgggtcgtcatcaaagcctgccggagctgacagcacacacaaggtgcctgtggtgatgttagaacctatcaggatcaaacaggagaacagcggaccccctgaaaactacgacttcccagtcgttattgttaagcaggaatccgacgaagagtcccgccctcagaacgccaattacccaaggtccattttgacctccctgctgttgaattcctcacagtccagtaccagcgaggagacagtcctgagatcggacgcccctgattcaacaggagatcagccgggcttgcatcaagacaattccagcaatggaaaatcagaatggctggacccatctcagaaatccccattgcacgtcggcgaaactcgtaaagaagacgacccgaacgaagactggtgcgctgtatgtcagaatggcggcgagctgttgtgttgtgagaagtgccccaaggtgttccacctttcatgtcatgtccccactctgaccaattttccctctggagagtggatctgcactttctgccgggacttgagcaagcctgaagttgagtacgattgcgacgctccctcccacaactcggagaaaaagaaaacagaggggttagtgaaactcacacctattgataagagaaagtgtgaaaggctgctgctgtttctttactgtcacgagatgagtctggcctttcaggatcccgtgcctctcacagtgccggattactataagattatcaagaaccctatggacctctccactatcaaaaaaagactccaagaggactattctatgtattctaagccagaagattttgtggccgactttcgactcatattccagaattgcgctgagtttaatgaacccgactcagaagtcgctaatgctggaattaagctcgaaaactactttgaagagctcctaaaaaacctctaccccgagaagcgattccctaagcccgagtttcgtaacgagtctgaggacaacaaattctcagacgactccgacgacgacttcgtgcagccacgtaagaaacggttaaaaagcatcgaagaaaggcagctgcttaagtag

SEQ ID NO: 141332 - DNA, 1650 bp, Artificial Sequence
  derived and/or modified sequence
atggaaggccctcgcagcgctgcttgcagagcaagacctgctacaagtccgggagcggtggatctgacggctccccctcctcctcccctcctgcgcatactgaacagccgtgccgctcccgcaaccagaaccttcgcagacctctgtcgctcccttctgcaacccgaatcgagagttctgtgtcgactgcagcccgtaaattgctaccctcccgctgcgtcgacaaaactgtgccccgttggcgtgattagatgtcccgtgtgtagtcaggagtgcgcagaaaggcacataatcgataacttctttgtaaaagacaccacagaagtgccctcgtctacagtggaaaaatctaaccaggtctgcacatcctgtgaggacaatgcggaagctaacggtttctgtgtggagtgtgtagagtggttgtgcaagacatgtattagagctcaccaacgggtgaaattcacgaaggatcatactgtccgccagaaagaagaagtttcacctgaagcagtcggtgtgacttcacaaaggcccgtattttgtccatttcacaagaaggagcagcttaagctgtattgcgaaacatgtgacaagctgacctgccgggattgtcagctacttgagcacaaggagcataggtatcaattcatcgaggaggcctttcagaaccaaaaggtcatcattgacaccctgatcactaagctgatggagaaaaccaaatacatcaagtttacaggcaatcagatacagaatcggatcatcgaggtgaatcagaaccaaaagcaggtggaacaggatatcaaggtcgcgatattcactctgatggtcgagattaacaaaaagggtaaggccctactgcaccagctcgaatctctagcgaaagaccacagaatgaaactcatgcagcagcaacaggaggttgccggactgtcgaagcagctagaacatgtgatgcattttagcaaatgggctgtatcgtcaggatcctccaccgctttactgtatagtaagcgtttaataacatatcgcttacggcatcttctgcgcgcacgctgtgacgcgagtcctgtcaccaataacaccattcagtttcactgcgatcccagcttttgggcccaaaatatcatcaaccttggcagtttggtcatcgaggataaggaaagccagccacaaatgcctaagcaaaatcctgtggtggagcaaaattctcaacctccctccgggctgtcttctaatcagttatctaaattccccacacagatcagtctggcccagttgcgcctgcagcacatgcagcaacaacaaccccctcccaggcttattaatttccagaatcacagccccaaacctaatgggccagtcctgcctccacatcctcagcagttgagatatccccctaaccagaacatacctcgacaggcgattaagccaaacccactgcagatggccttcctggcacagcaagcaataaaacagtggcagattagttctggacagggcactccctcgacgactcagaatatcaacacagccgcatgcaccgtgttcgacgtccgcgtactgcatcacataccatactgggcactcaacatttctagcagtgagcgcgactcatttctgtggttttcaagtgtatacaaccttgaatag

SEQ ID NO: 141333 - DNA, 3051 bp, Artificial Sequence
  derived and/or modified sequence
atggaggtagcagtagagaaggcggtagccgctgccgcagctgcctctgccgcagccagcggcggaccttcagccgctcccagtggcgagaatgaagcggagagccgccaaggccctgactccgagcgcggaggtgaagccgctcgactcaacctactggatacatgtgctgtgtgccaccagaatattcagtcccgcgctcccaaactgctgccttgtctccactccttctgccagagatgtctgccagcccctcagcgctatctcatgctaccagccccaatgctggggtccgcagaaaccccaccacccgtgcctgcacctgggtcacctgtctccggatcatcaccctttgccacgcaggtgggagtcattcgctgccctgtttgctcacaggagtgtgccgagcggcatatcatcgacaacttcttcgtgaaggacaccacggaggtaccaagttctaccgtggaaaaatctaatcaggtgtgcacgtcttgtgaggacaacgcagaagccaatgggttctgcgtagagtgtgtggaatggctttgtaaaacatgcatcagggcgcaccagagagttaaattcaccaaagaccatactgtgcgacagaaggaggaggtctctcctgaggcagttggggtgacctcccagaggccagtcttttgtcccttccacaagaaagagcagttgaagctgtactgtgaaacctgtgacaaactgacctgccgtgattgtcagcttttggagcacaaggagcatagataccagtttatcgaagaggcctttcagaaccagaaggtgataattgacacactgataacaaaattaatggaaaagaccaagtacatcaagttcacggggaatcagattcagaaccggatcattgaagtcaaccagaatcaaaagcaggtggagcaggacattaaagtggcaatcttcacgctgatggtggagataaataagaagggcaaagcactgctgcatcagcttgaaagtttagcaaaagaccatagaatgaaactgatgcagcagcagcaggaggttgccggactaagcaagcagcttgagcatgttatgcactttagcaaatgggccgtttcctcgggctcatccaccgcgctgttgtattccaagcggctgattacctaccgccttaggcaccttctgagggctaggtgcgatgcctctccagtgaccaataacacgattcagtttcactgcgacccttcattttgggcccagaacatcatcaacctaggttcccttgtgattgaagataaggaaagtcagcctcagatgcccaagcagaatccagtcgtagagcagaattctcaacccccatccggattgtcatctaatcaactgtcaaagtttccaacacagatcagcctggctcagctgcgactgcagcacatgcaacagcagcagcctcctcctcgcctgattaacttccagaaccattcacccaagccaaacggccctgtgctccccccacacccgcagcagctgcgctacccaccaaaccagaacatccctaggcaggccattaaaccaaatcctttacaaatggcctttcttgcccagcaagctatcaaacagtggcagatctcatccggtcagggtactccatcaaccacaaacagtactagttctacaccatcgagccccaccattacctcagccgcaggctatgatggtaaagcatttggctctccaatgatcgacctttccagcccggtcggcggatcttacaatctgcccagtcttccagatattgactgcagctcaaccatcatgttggataacattgtgcgcaaggatacaaatatcgaccacggacagccccgtcccccatcgaaccggacagtccagtcaccaaactcctcggttccctcccctggtttggccggacccgtgacaatgaccagcgtgcacccacctatcagatctcctagtgcatcgagcgtcggatcaaggggaagtagtgggtcttctagcaagcccgctggtgcagacagcacgcacaaggtccccgtcgtgatgcttgaaccgataagaatcaagcaggaaaacagtggccctcctgaaaattatgatttccctgtggtgattgtgaagcaggagagtgacgaagagtcccggcctcagaacgcgaattatcccagaagcatcctcacttctctgcttctcaatagctcccagagcagcacaagcgaagagaccgtgctgcggtccgacgcacctgatagcaccggagatcaacccggactgcatcaagacaatagttcgaatggcaaaagcgagtggctggatccctcccagaagtctccactccacgtgggtgagactaggaaagaggatgaccccaatgaggactggtgtgcggtttgccaaaacgggggtgaactcctgtgctgcgaaaagtgtccaaaggtgttccacctatcttgtcacgtcccaacattgacaaatttcccctctggagagtggatctgtaccttttgtagggacctttcgaagcctgaggtggagtatgattgcgacgcccctagtcacaacagcgagaagaagaagaccgaagggcttgtcaagctgacacccatagacaaacgcaagtgcgaacgccttcttctgtttctttattgtcatgagatgagcctcgcattccaggaccccgtcccactgaccgtccctgattactataaaatcatcaaaaacccaatggacttatctacgattaaaaaacggttgcaggaggactattccatgtactccaagcccgaagacttcgtcgcagacttccggctaatcttccagaattgcgccgagttcaatgaaccagactctgaagtagctaatgctggcataaagctcgaaaactatttcgaggaactgctgaaaaacctttatcctgagaaaagattcccgaagccagaattccgtaacgagagtgaagataataagttcagcgacgatagcgatgacgacttcgttcagcctcggaaaaaaaggttgaagagcatcgaagagaggcagttattgaagtag

SEQ ID NO: 141334 - DNA, 1650 bp, Artificial Sequence
  derived and/or modified sequence
atggagggcccgcgctctgcggcgtgtcgcgctcggccagcaacttccccgggcgctgtggacttgaccgcgccgccgccgccgccgctgctccgcattctcaacagccgggcggcccctgccactcgcacttttgcagacctctgtcggagtctcctgcagccggaatctcgggttctttgccggctgcagccagttaactgctacccgcccgctgcctccacaaagctttgtccagttggagtcattcgttgcccagtttgcagccaagaatgtgcagagagacacatcatagataacttttttgtgaaggacactactgaggttcccagcagtacagtagaaaagtcaaatcaggtatgtacaagctgtgaggacaacgcagaagccaatgggttttgtgtagagtgtgttgaatggctctgcaagacgtgtatcagagctcatcagagggtaaagttcacaaaagaccacactgtcagacagaaagaggaagtatctccagaggcagttggtgtcaccagccagcgaccagtgttttgtccttttcataaaaaggagcagctgaagctgtactgtgagacatgtgacaaactgacatgtcgagactgtcagttgttagaacataaagagcatagataccaatttatagaagaagcttttcagaatcagaaagtgatcatagatacactaatcaccaaactgatggaaaaaacaaaatacataaaattcacaggaaatcagatccaaaacagaattattgaagtaaatcaaaatcaaaagcaggtggaacaggatattaaagttgctatatttacactgatggtagaaataaataaaaaaggaaaagctctactgcatcagttagagagccttgcaaaggaccatcgcatgaaacttatgcaacaacaacaggaagtggctggactctctaaacaattggagcatgtcatgcatttttctaaatgggcagtttccagtggcagcagtacagcattactttatagcaaacgactgattacataccggttacggcacctccttcgtgcaaggtgtgatgcatccccagtgaccaacaacaccatccaatttcactgtgatcctagtttctgggctcaaaatatcatcaacttaggttctttagtaatcgaggataaagagagccagccacaaatgcctaagcagaatcctgtcgtggaacagaattcacagccaccaagtggtttatcatcaaaccagttatccaagttcccaacacagatcagcctagctcaattacggctccagcatatgcagcaacagcaaccgcctccacgtttgataaactttcagaatcacagccccaaacccaatggaccagttcttcctcctcatcctcaacaactgagatatccaccaaaccagaacataccacgacaagcaataaagccaaaccccctacagatggctttcttggctcaacaagccataaaacagtggcagatcagcagtggacagggaaccccatcaactacccaaaatataaatacagcagcgtgcactgtatttgatgtgagggttcttcatcatataccctactgggcattaaatataagttcctctgaaagggactcgtttttgtggttttcatctgtctataatttggaatga

SEQ ID NO: 141335 - DNA, 3799 bp, Artificial Sequence
  derived and/or modified sequence
ccgcgagtccaccgagcggcctctgaggagcagccgcaggaggaggaggaggtcgtcgggggcggcgggcggagaccgcgctctcgcttccccggcggcggcaagggcaggacaatggaggtggcggtggagaaggcggtggcggcggcggcagcggcctcggctgcggcctccggggggccctcggcggcgccgagcggggagaacgaggccgagagtcggcagggcccggactcggagcgcggcggcgaggcggcccggctcaacctgttggacacttgcgccgtgtgccaccagaacatccagagccgggcgcccaagctgctgccctgcctgcactctttctgccagcgctgcctgcccgcgccccagcgctacctcatgctgcccgcgcccatgctgggctcggccgagaccccgccacccgtccctgcccccggctcgccggtcagcggctcgtcgccgttcgccacccaagttggagtcattcgttgcccagtttgcagccaagaatgtgcagagagacacatcatagataacttttttgtgaaggacactactgaggttcccagcagtacagtagaaaagtcaaatcaggtatgtacaagctgtgaggacaacgcagaagccaatgggttttgtgtagagtgtgttgaatggctctgcaagacgtgtatcagagctcatcagagggtaaagttcacaaaagaccacactgtcagacagaaagaggaagtatctccagaggcagttggtgtcaccagccagcgaccagtgttttgtccttttcataaaaaggagcagctgaagctgtactgtgagacatgtgacaaactgacatgtcgagactgtcagttgttagaacataaagagcatagataccaatttatagaagaagcttttcagaatcagaaagtgatcatagatacactaatcaccaaactgatggaaaaaacaaaatacataaaattcacaggaaatcagatccaaaacagaattattgaagtaaatcaaaatcaaaagcaggtggaacaggatattaaagttgctatatttacactgatggtagaaataaataaaaaaggaaaagctctactgcatcagttagagagccttgcaaaggaccatcgcatgaaacttatgcaacaacaacaggaagtggctggactctctaaacaattggagcatgtcatgcatttttctaaatgggcagtttccagtggcagcagtacagcattactttatagcaaacgactgattacataccggttacggcacctccttcgtgcaaggtgtgatgcatccccagtgaccaacaacaccatccaatttcactgtgatcctagtttctgggctcaaaatatcatcaacttaggttctttagtaatcgaggataaagagagccagccacaaatgcctaagcagaatcctgtcgtggaacagaattcacagccaccaagtggtttatcatcaaaccagttatccaagttcccaacacagatcagcctagctcaattacggctccagcatatgcagcaacagcaaccgcctccacgtttgataaactttcagaatcacagccccaaacccaatggaccagttcttcctcctcatcctcaacaactgagatatccaccaaaccagaacataccacgacaagcaataaagccaaaccccctacagatggctttcttggctcaacaagccataaaacagtggcagatcagcagtggacagggaaccccatcaactaccaacagcacatcctctactccttccagccccacgattactagtgcagcaggatatgatggaaaggcttttggttcacctatgatcgatttgagctcaccagtgggagggtcttataatcttccctctcttccggatattgactgttcaagtactattatgctggacaatattgtgaggaaagatactaatatagatcatggccagccaagaccaccctcaaacagaacggtccagtcaccaaattcatcagtgccatctccaggccttgcaggacctgttactatgactagtgtacaccccccaatacgttcacctagtgcctccagcgttggaagccgaggaagctctggctcttccagcaaaccagcaggagctgactctacacacaaagtcccagtggtcatgctggagccaattcgaataaaacaagaaaacagtggaccaccggaaaattatgatttccctgttgttatagtgaagcaagaatcagatgaagaatctaggcctcaaaatgccaattatccaagaagcatactcacctccctgctcttaaatagcagtcagagctctacttctgaggagactgtgctaagatcagatgcccctgatagtacaggagatcaacctggacttcaccaggacaattcctcaaatggaaagtctgaatggttggatccttcccagaagtcacctcttcatgttggagagacaaggaaagaggatgaccccaatgaggactggtgtgcagtttgtcaaaacggaggggaactcctctgctgtgaaaagtgccccaaagtattccatctttcttgtcatgtgcccacattgacaaattttccaagtggagagtggatttgcactttctgccgagacttatctaaaccagaagttgaatatgattgtgatgctcccagtcacaactcagaaaaaaagaaaactgaaggccttgttaagttaacacctatagataaaaggaagtgtgagcgcctacttttatttctttactgccatgaaatgagcctggcttttcaagaccctgttcctctaactgtgcctgattattacaaaataattaaaaatccaatggatttgtcaaccatcaagaaaagactacaagaagattattccatgtactcaaaacctgaagattttgtagctgattttagattgatctttcaaaactgtgctgaattcaatgagcctgattcagaagtagccaatgctggtataaaacttgaaaattattttgaagaacttctaaagaacctctatccagaaaaaaggtttcccaaaccagaattcaggaatgaatcagaagataataaatttagtgatgattcagatgatgactttgtacagccccggaagaaacgcctcaaaagcattgaagaacgccagttgcttaaataatatgcagcaccactagcttgtgctggtttttagatttttttgttttcaaaaaaacatttgtcagtaatttaacatcactacaaaaagaagagtttgtgactattctcatctctgttttggacgtttactagactttgatttccttaatagcccatttctgttaacctcttatcactaagaaagaaaggaaagaaggagatgaatagaagaaagaaaatggaaagaaggaaaaaaggaggatagaaaaaggatggaagaaagaagcattgaaaacaaagacattcttcccacttcttggatttttaaaccacagtctggagtgatagctactgtagaaaggaaatagactttgtatgaactctttaagttgaaaagtaaaaaatatatgtggtttggatgtgtgctttaattcagctttagaaattaataccactacccgtgaattatatggcctgacaatatgaattaggtgtactgtactgaagaacagtactccacaaacatgggtggtaacaagagttccatcccaggaggccaaacggtgcaacagaagggtaggttagatgctattaagaaggcacttaatagtacatcatgtaagatggcaactgtattaaagaaaaatccggaaaac

SEQ ID NO: 141336 - protein, 599 aa, Artificial Sequence
  derived and/or modified sequence
MLCLGWIFLWLVAGERIKGFNISGCSTKKLLWTYSTRSEEEFVLFCDLPEPQKSHFCHRNRLSPKQVPEHLPFMGSNDLSDVQWYQQPSNGDPLEDIRKSYPHIIQDKCTLHFLTPGVNNSGSYICRPKMIKSPYDVACCVKMILEVKPQTNASCEYSASHKQDLLLGSTGSISCPSLSCQSDAQSPAVTWYKNGKLLSVERSNRIVVDEVYDYHQGTYVCDYTQSDTVSSWTVRAVVQVRTIVGDTKLKPDILDPVEDTLEVELGKPLTISCKARFGFERVFNPVIKWYIKDSDLEWEVSVPEAKSIKSTLKDEIIERNIILEKVTQRDLRRKFVCFVQNSIGNTTQSVQLKEKRGVVLLYILLGTIGTLVAVLAASALLYRHWIEIVLLYRTYQSKDQTLGDKKDFDAFVSYAKWSSFPSEATSSLSEEHLALSLFPDVLENKYGYSLCLLERDVAPGGVYAEDIVSIIKRSRRGIFILSPNYVNGPSIFELQAAVNLALDDQTLKLILIKFCYFQEPESLPHLVKKALRVLPTVTWRGLKSVPPNSRFWAKMRYHMPVKNSQGFTWNQLRITSRIFQWKGLSRTETTGRSSQPKEW

SEQ ID NO: 141337 - protein, 44 aa, Artificial Sequence
  derived and/or modified sequence
MLCLGWIFLWLVAGERIKGFNISGCSTKKLLWTYSTRSEEEFVL

SEQ ID NO: 141338 - DNA, 1800 bp, Artificial Sequence
  derived and/or modified sequence
atgctctgcctaggatggatcttcctttggctggttgccggggagcgaatcaagggattcaacataagcggatgttctacaaaaaagctgctctggacttattcgacaagatccgaggaagaattcgtgctgttctgcgatcttcccgaacctcagaaaagccacttctgccaccgaaatagactgagccccaaacaggtgcctgaacacctcccattcatggggtcgaatgatttgtccgatgtgcaatggtaccagcaaccttcgaatggcgaccccctggaagacatcaggaaatcttacccacatattattcaagacaagtgcactttacattttctgacaccaggcgtgaacaattcaggaagttatatctgccgaccaaagatgatcaagagtccatatgacgtcgcatgctgcgttaaaatgattcttgaagtgaaaccacagacaaatgcaagctgtgagtattccgctagccacaagcaggacctgttgctgggtagcaccgggtcaatctcttgcccgagccttagctgccaaagcgacgcgcaatctcctgcggttacctggtataagaatggtaaactcttgagcgtggagagatcgaatcggatagtcgtggatgaggtgtacgactatcaccagggcacctatgtatgcgattatacccagtccgacactgtttccagctggaccgtgcgggctgtcgtgcaagtgcggaccatagtgggagatactaagctaaaacctgatattctggaccctgtcgaagacacactggaagtggaactgggaaagccccttaccatatcctgtaaagcccggtttggctttgaacgagtgtttaacccagttatcaagtggtatatcaaagactcagatctcgaatgggaggtctccgtaccagaggctaagtcgatcaagtcaactctgaaagacgagatcatcgagcggaatattatactggagaaagtaacacaaagagacttgagacgaaaattcgtgtgctttgtccagaacagcatcggcaacacaacacagtcagtgcagctgaaggaaaaacgtggcgtggtgctattatatatcctgttgggcaccatcggtacgttggtggcagtcttagctgcttccgcgctgctgtatcggcactggatcgagatcgtgctcctgtacaggacttatcaaagcaaagatcaaacactcggagacaagaaggacttcgacgctttcgtgagttatgctaagtggagcagttttcccagcgaggcgaccagctctctatctgaggaacatctcgctctttctctctttccagacgtcctggagaataagtatggttattctctgtgcttgttggaacgcgatgtcgcgcccggtggtgtgtacgcagaggacatcgtttcaatcattaaacggtcaaggcgcgggatctttatcctcagtcccaactacgtgaacgggccgtcgatttttgagctccaggccgccgtaaacctggccctggacgaccaaactctgaagttgatcctcatcaagttctgctacttccaagaaccggaaagcctgccacacctggtcaagaaggcactccgtgtcctgccaacagtcacttggaggggcctcaagtctgtccctcccaactctagattttgggccaagatgagatatcatatgcccgtcaagaattcccagggattcacctggaatcaactccggatcacttccagaatattccaatggaaaggcctgtccaggacagaaacaactgggcggagtagtcagcctaaagaatggtag

SEQ ID NO: 141339 - DNA, 2773 bp, Artificial Sequence
  derived and/or modified sequence
acaatgtccatggtcatttacaaaataaggttttcctttttcctccagttataatcctttatttttgagctggtgtaacgtggctattgtgtcttctccaggtatctctctggataggaagaaatatagtagaaccctttgaaaatggatattttcacatattttcgttcagatacaaaagctggcagttactgaaataaggacttgaagttccttcctcttttttttatgtcttaagagcaggaaataaagagacagctgaaggtgtagccttgaccaactgaaagggaaatcttcatcctctgaaaaaacatatgtgattctcaaaaaacgcatctggaaaattgataaagaagcgattctgtagattctcccagcgctgttgggctctcaattccttctgtgaaggacaacatatggtgatggggaaatcagaagctttgagaccctctacacctggatatgaatcccccttctaatacttaccagaaatgaaggggatactcagggcagagttctgaatctcaaaacactctactctggcaaaggaatgaagttattggagtgatgacaggaacacgggagaacaatgctctgtttgggctggatatttctttggcttgttgcaggagagcgaattaaaggatttaatatttcaggttgttccacaaaaaaactcctttggacatattctacaaggagtgaagaggaatttgtcttattttgtgatttaccagagccacagaaatcacatttctgccacagaaatcgactctcaccaaaacaagtccctgagcacctgcccttcatgggtagtaacgacctatctgatgtccaatggtaccaacaaccttcgaatggagatccattagaggacattaggaaaagctatcctcacatcattcaggacaaatgtacccttcactttttgaccccaggggtgaataattctgggtcatatatttgtagacccaagatgattaagagcccctatgatgtagcctgttgtgtcaagatgattttagaagttaagccccagacaaatgcatcctgtgagtattccgcatcacataagcaagacctacttcttgggagcactggctctatttcttgccccagtctcagctgccaaagtgatgcacaaagtccagcggtaacctggtacaagaatggaaaactcctctctgtggaaaggagcaaccgaatcgtagtggatgaagtttatgactatcaccagggcacatatgtatgtgattacactcagtcggatactgtgagttcgtggacagtcagagctgttgttcaagtgagaaccattgtgggagacactaaactcaaaccagatattctggatcctgtcgaggacacactggaagtagaacttggaaagcctttaactattagctgcaaagcacgatttggctttgaaagggtctttaaccctgtcataaaatggtacatcaaagattctgacctagagtgggaagtctcagtacctgaggcgaaaagtattaaatccactttaaaggatgaaatcattgagcgtaatatcatcttggaaaaagtcactcagcgtgatcttcgcaggaagtttgtttgctttgtccagaactccattggaaacacaacccagtccgtccaactgaaagaaaagagaggagtggtgctcctgtacatcctgcttggcaccatcgggaccctggtggccgtgctggcggcgagtgccctcctctacaggcactggattgaaatagtgctgctgtaccggacctaccagagcaaggatcagacgcttggggataaaaaggattttgatgctttcgtatcctatgcaaaatggagctcttttccaagtgaggccacttcatctctgagtgaagaacacttggccctgagcctatttcctgatgttttagaaaacaaatatggatatagcctgtgtttgcttgaaagagatgtggctccaggaggagtgtatgcagaagacattgtgagcattattaagagaagcagaagaggaatatttatcttgagccccaactatgtcaatggacccagtatctttgaactacaagcagcagtgaatcttgccttggatgatcaaacactgaaactcattttaattaagttctgttacttccaagagccagagtctctacctcatctcgtgaaaaaagctctcagggttttgcccacagttacttggagaggcttaaaatcagttcctcccaattctaggttctgggccaaaatgcgctaccacatgcctgtgaaaaactctcagggattcacgtggaaccagctcagaattacctctaggatttttcagtggaaaggactcagtagaacagaaaccactgggaggagctcccagcctaaggaatggtgaaatgagccctggagccccctccagtccagtccctgggatagagatgttgctggacagaactcacagctctgtgtgtgtgtgttcaggctgataggaaattcaaagagtctcctgccagcaccaagcaagcttgatggacaatggagtgggattgagactgtggtttagagcctttgatttcctggactggactgacggcgagtgaattctctagaccttgggtactttcagtacacaacacccctaagatttcccagtggtccgagcagaatcagaaaatacagctacttctgccttatggctagggaactgtcatgtctaccatgtattgtacatatgactttatgtatacttgcaatcaaataaatattattttattagaaa

SEQ ID NO: 141340 - DNA, 1890 bp, Artificial Sequence
  derived and/or modified sequence
cgctgttgggctctcaattccttctgtgaaggacaacatatggtgatggggaaatcagaagctttgagaccctctacacctggatatgaatcccccttctaatacttaccagaaatgaaggggatactcagggcagagttctgaatctcaaaacactctactctggcaaaggaatgaagttattggagtgatgacaggaacacgggagaacaatgctctgtttgggctggatatttctttggcttgttgcaggagagcgaattaaaggatttaatatttcaggagcccctatgatgtagcctgttgtgtcaagatgattttagaagttaagccccagacaaatgcatcctgtgagtattccgcatcacataagcaagacctacttcttgggagcactggctctatttcttgccccagtctcagctgccaaagtgatgcacaaagtccagcggtaacctggtacaagaatggaaaactcctctctgtggaaaggagcaaccgaatcgtagtggatgaagtttatgactatcaccagggcacatatgtatgtgattacactcagtcggatactgtgagttcgtggacagtcagagctgttgttcaagtgagaaccattgtgggagacactaaactcaaaccagatattctggatcctgtcgaggacacactggaagtagaacttggaaagcctttaactattagctgcaaagcacgatttggctttgaaagggtctttaaccctgtcataaaatggtacatcaaagattctgacctagagtgggaagtctcagtacctgaggcgaaaagtattaaatccactttaaaggatgaaatcattgagcgtaatatcatcttggaaaaagtcactcagcgtgatcttcgcaggaagtttgtttgctttgtccagaactccattggaaacacaacccagtccgtccaactgaaagaaaagagaggagtggtgctcctgtacatcctgcttggcaccatcgggaccctggtggccgtgctggcggcgagtgccctcctctacaggcactggattgaaatagtgctgctgtaccggacctaccagagcaaggatcagacgcttggggataaaaaggattttgatgctttcgtatcctatgcaaaatggagctcttttccaagtgaggccacttcatctctgagtgaagaacacttggccctgagcctatttcctgatgttttagaaaacaaatatggatatagcctgtgtttgcttgaaagagatgtggctccaggaggagtgtatgcagaagacattgtgagcattattaagagaagcagaagaggaatatttatcttgagccccaactatgtcaatggacccagtatctttgaactacaagcagcagtgaatcttgccttggatgatcaaacactgaaactcattttaattaagttctgttacttccaagagccagagtctctacctcatctcgtgaaaaaagctctcagggttttgcccacagttacttggagaggcttaaaatcagttcctcccaattctaggttctgggccaaaatgcgctaccacatgcctgtgaaaaactctcagggattcacgtggaaccagctcagaattacctctaggatttttcagtggaaaggactcagtagaacagaaaccactgggaggagctcccagcctaaggaatggtgaaatgagccctggagccccctccagtccagtccctgggatagagatgttgctggacagaactcacagctctgtgtgtgtgtgttcaggctgataggaaattcaaagagtctcctgccagcaccaagcaagcttgatggacaatggagtgggattgagactgtggtttagagcctttgatttcctggactggactgacggcgagt

SEQ ID NO: 141341 - DNA, 1800 bp, Artificial Sequence
  derived and/or modified sequence
atgctgtgcctgggctggatcttcctgtggctggtggccggggagcgcatcaagggcttcaacatcagcggctgcagcaccaagaagctgctgtggacctacagcaccaggtctgaggaggagtttgtgctcttctgtgacctgcctgagccccagaagagccacttctgccacaggaaccggctgagccccaagcaggtgcctgagcacctgcccttcatgggcagcaatgacctgagtgatgtgcagtggtaccagcagcccagcaatggagaccccctggaggacatcaggaagagctacccccacatcatccaggacaagtgcaccctgcacttcctgaccccaggagtgaacaacagcggcagctacatctgccggcccaagatgatcaagagcccctatgatgtggcctgctgcgtgaagatgatcctggaggtgaagccccagaccaatgccagctgtgagtacagcgccagccacaagcaggacctgctgctgggcagcacaggcagcatcagctgccccagcctgagctgccagagtgatgcccagagccctgctgtgacctggtacaagaatggcaagctgctgtctgtggagaggagcaaccgcatcgtggtggatgaggtgtatgactaccaccagggcacctacgtgtgtgactacacccagagcgacacagtgtcctcctggacagtgcgggctgtggtgcaggtgaggaccatcgtgggggacaccaagctgaagccagacatcctggaccctgtggaggacaccctggaggtggagctgggcaagcccctgaccatcagctgcaaggccaggtttggatttgagagggtcttcaaccctgtgatcaagtggtacatcaaggacagcgacctggagtgggaggtgtctgtgcctgaggccaagagcatcaagagcaccctgaaggatgagatcattgaaagaaacatcatcctggagaaggtgacccagagggacctgcggaggaagtttgtgtgctttgtgcagaacagcatcggcaacaccacccagagcgtgcagctgaaggagaagaggggcgtggtgctgctgtacatcctgctgggcaccatcggcaccctggtggccgtgctggccgccagcgccctgctgtaccgccactggattgagatcgtgctgctgtaccgcacctaccagagcaaggaccagaccctgggggacaagaaggactttgatgcctttgtgtcctatgccaagtggagcagcttccccagcgaggccaccagcagcctgtctgaggagcacctggccctgagcctcttcccagatgtgctggagaacaagtatggctacagcctgtgcctgctggagagagatgtggcccctggaggagtgtatgcagaagatattgtgtccatcatcaagaggagcagaagaggcatcttcatcctgagccccaactacgtgaatggccccagcatctttgagctgcaggccgctgtgaacctggccctggatgaccagaccctgaagctgatcctgatcaagttctgctacttccaggagcctgagagcctgccccacctggtgaagaaggccctgcgggtgctgcccaccgtgacctggaggggcctgaagtctgtgccccccaacagccgcttctgggccaagatgagataccacatgcctgtgaagaacagccagggcttcacctggaaccagctgcgcatcaccagccgcatcttccagtggaagggcctgagcaggacagagaccaccggccgcagcagccagcccaaggagtggtag

SEQ ID NO: 141342 - DNA, 1800 bp, Artificial Sequence
  derived and/or modified sequence
atgctgtgcctgggctggatcttcctgtggctggtggccggcgagcggataaaggggttcaacataagtgggtgcagcacaaagaaactcctatggacctacagcacgcggtccgaagaggagtttgtgttgttctgcgatctaccagaaccgcagaaatctcatttttgccaccgtaatagactgtcgccaaaacaagttcctgagcatttgcccttcatgggcagcaatgacctgagcgatgtccaatggtaccagcagccttccaacggcgacccgctggaggacatcaggaagagctacccacacataatccaggataagtgtaccctgcatttcctaacccctggggtgaataacagcggaagctacatatgcaggcccaagatgataaaaagcccctatgatgtcgcctgctgcgtgaaaatgatcctggaagtgaagcctcagactaatgcaagctgcgaatattccgctagccacaaacaggacttactgttaggctccaccggaagcatatcttgtccctctctgtcttgtcaaagtgacgcacagtctcctgctgtgacttggtacaaaaacggaaagctgctttcggtcgagagatccaaccgtatcgtcgtggatgaggtgtatgattatcaccagggtacatatgtgtgtgactacacacagagcgacactgtgagctcctggactgtccgcgctgtcgtgcaggtgcggaccattgttggggatacgaagctcaaaccagacatactggacccagtggaggacacactggaagttgaactagggaagcctctcacgatcagctgcaaagcaagattcggcttcgaaagagtctttaatccggtcattaagtggtacatcaaggactcggacctggagtgggaagtgtcagtgcccgaggctaagtcaattaagtccacactgaaggatgagattattgagcgtaacattattctcgaaaaagtcacacagcgcgatttgagacggaagttcgtgtgcttcgtgcagaattccatcggaaacacaactcagagtgtgcagctaaaagaaaaacgcggcgtagtactgctttacatcctgctcggcacaattggcacactcgtggcagtgctggctgcgagcgctcttttgtaccggcattggattgaaatcgtgctgctatatcgcacctatcagtctaaagaccagaccctgggtgacaagaaagacttcgatgcgtttgtctcttacgccaagtggtcttcttttccatctgaggcgacctcatcacttagtgaggagcacctggctctcagcctgtttccagatgtactcgaaaataaatatggatatagtctgtgtttactagaaagagacgtggctccaggcggggtgtatgccgaagacattgtgagcattataaagaggagtcgccgtgggatcttcattctgtctcctaattatgttaatgggccttcaatcttcgagctgcaagccgccgtgaacctggcattagacgatcaaactctgaaactgatactcatcaagttctgctattttcaggaaccagagagtcttccccacctggtgaaaaaagctttgcgggtgctgcctacggtcacatggaggggattaaagtctgtacccccaaactccaggttttgggccaaaatgcgatatcatatgccagtaaagaattctcagggatttacatggaaccagttgcggattacctcccggatctttcagtggaaggggctttctcggactgagacgacaggacggtcctctcagcctaaagagtggtag

SEQ ID NO: 141343 - DNA, 1800 bp, Artificial Sequence
  derived and/or modified sequence
atgctgtgtctggggtggatatttctgtggctcgtcgcaggggaacgcattaaaggattcaacatctccggatgctcaaccaagaagctattatggacatactcaacgcgatcggaagaggagttcgttctattctgtgatctgcctgaaccgcagaagagccatttctgtcaccggaatcgcctgagccctaaacaggttccagagcatttaccttttatgggctcgaatgacctctcggatgttcagtggtaccagcaacctagtaatggcgaccctctggaagatattcggaagtcttatccgcatatcattcaggataagtgtaccctgcactttctgactccaggtgtcaacaactccggctcttatatctgtagacctaagatgatcaagtcgccatacgatgtcgcctgttgcgtcaagatgattctcgaagtgaaacctcagaccaacgcaagttgcgagtattcagcttcccataagcaggacctgttactgggctcaacaggctctatcagttgtccctccctttcatgtcagagcgatgcccaatcccccgctgtcacatggtacaaaaatggtaagctcctctccgtagagcgctctaacaggatcgtagtggacgaagtgtacgattatcatcagggcacctacgtctgcgattacacccagagcgacacggtttcaagttggactgtgcgagctgtagtgcaggtcaggacaatcgtaggagacaccaaactgaagcctgatatcctcgatcctgtcgaagacacactagaagtcgagctgggtaagccactgaccatttcctgcaaagctagattcgggttcgagcgcgtcttcaaccccgtcataaagtggtacataaaggacagcgatctcgagtgggaagtctccgtgcccgaggcaaagtcaatcaagtcaacactgaaagatgaaattattgagaggaatatcattcttgaaaaagttacccaaagggatctgcggagaaagtttgtatgttttgttcagaattctatcggcaacaccacacaaagcgtacaactaaaggaaaaacgcggtgtcgtactcctgtacatcctgctgggcaccatcggtacactggtggccgtgttggcggcttcagccctcctctacagacactggattgaaattgtcctgctgtatcgcacttaccaatcgaaagatcaaaccctgggcgacaaaaaggacttcgatgcttttgtgagctatgccaaatggagctcttttccatctgaggctactagctcgctgagcgaggaacaccttgccctcagcctgtttccagacgtgctggaaaacaagtacggatacagcctgtgccttcttgagagagatgtggctcccggaggcgtttatgctgaggacatagtatccataattaaacgatctaggagaggcatctttatcttgagccccaattatgttaacggaccctccatctttgagctccaagctgccgtaaatcttgcccttgatgatcagacactgaaacttatcttgattaaattctgttactttcaggagcctgagtcattgcctcatctggttaaaaaggcgctcagagtgttgccaaccgtaacctggagggggctgaagagcgtgcctcccaatagtcgattttgggccaagatgcggtaccatatgccagtgaagaattcccaaggttttacctggaatcagcttaggattacatcacgcatcttccagtggaaaggacttagcagaactgaaaccaccggacgcagttcccagcccaaggaatggtag

SEQ ID NO: 141344 - DNA, 1800 bp, Artificial Sequence
  derived and/or modified sequence
atgctgtgcctgggctggatcttcctgtggctggtggccggcgagagaatcaagggcttcaacatcagcggctgcagcaccaagaagctgctgtggacctacagcaccagaagcgaggaggagttcgtgctgttctgcgacctgcccgagccccagaagagccacttctgccacagaaacagactgagccccaagcaggtgcccgagcacctgcccttcatgggcagcaacgacctgagcgacgtgcagtggtaccagcagcccagcaacggcgaccccctggaggacatcagaaagagctacccccacatcatccaggacaagtgcaccctgcacttcctgacccccggcgtgaacaacagcggcagctacatctgcagacccaagatgatcaagagcccctacgacgtggcctgctgcgtgaagatgatcctggaggtgaagccccagaccaacgccagctgcgagtacagcgccagccacaagcaggacctgctgctgggcagcaccggcagcatcagctgccccagcctgagctgccagagcgacgcccagagccccgccgtgacctggtacaagaacggcaagctgctgagcgtggagagaagcaacagaatcgtggtggacgaggtgtacgactaccaccagggcacctacgtgtgcgactacacccagagcgacaccgtgagcagctggaccgtgagagccgtggtgcaggtgagaaccatcgtgggcgacaccaagctgaagcccgacatcctggaccccgtggaggacaccctggaggtggagctgggcaagcccctgaccatcagctgcaaggccagattcggcttcgagagagtgttcaaccccgtgatcaagtggtacatcaaggacagcgacctggagtgggaggtgagcgtgcccgaggccaagagcatcaagagcaccctgaaggacgagatcatcgagagaaacatcatcctggagaaggtgacccagagagacctgagaagaaagttcgtgtgcttcgtgcagaacagcatcggcaacaccacccagagcgtgcagctgaaggagaagagaggcgtggtgctgctgtacatcctgctgggcaccatcggcaccctggtggccgtgctggccgccagcgccctgctgtacagacactggatcgagatcgtgctgctgtacagaacctaccagagcaaggaccagaccctgggcgacaagaaggacttcgacgccttcgtgagctacgccaagtggagcagcttccccagcgaggccaccagcagcctgagcgaggagcacctggccctgagcctgttccccgacgtgctggagaacaagtacggctacagcctgtgcctgctggagagagacgtggcccccggcggcgtgtacgccgaggacatcgtgagcatcatcaagagaagcagaagaggcatcttcatcctgagccccaactacgtgaacggccccagcatcttcgagctgcaggccgccgtgaacctggccctggacgaccagaccctgaagctgatcctgatcaagttctgctacttccaggagcccgagagcctgccccacctggtgaagaaggccctgagagtgctgcccaccgtgacctggagaggcctgaagagcgtgccccccaacagcagattctgggccaagatgagataccacatgcccgtgaagaacagccagggcttcacctggaaccagctgagaatcaccagcagaatcttccagtggaagggcctgagcagaaccgagaccaccggcagaagcagccagcccaaggagtggtag

SEQ ID NO: 141345 - DNA, 1728 bp, Artificial Sequence
  derived and/or modified sequence
atgtggtctcttctcctctgcgggttaagcatcgccctgcctctctccgttaccgccgacgggtgtaaggatatattcatgaagaacgaaatcttgtcagcttcccagcccttcgctttcaattgtacctttccgccgatcaccagcggggaagtttccgtcacttggtacaagaattcctccaaaattccggttagtaagattatccaatcccgcatccaccaagacgaaacctggatcctattcctgcccatggagtggggcgactcgggcgtatatcagtgtgtcattaaaggaagagactcctgccatcgcattcatgtcaacctcactgtatttgaaaaacactggtgtgatacaagtatcggaggcctgcccaacctctcggatgagtacaaacagatcctgcacctgggcaaggatgatagcctgacatgccacttgcactttcccaaaagctgtgtgctaggccctatcaagtggtataaagattgcaatgaaataaaaggagagcgattcacagtactggaaactcgcctgttagtgtctaacgtgtccgctgaggaccgaggcaactatgcctgtcaggcaattctcacacattctggcaaacaatacgaggtgttgaacggcataacggttagcatcactgaacgcgcaggctacggggggtcagtccccaagataatttatccgaagaaccatagcatcgaagtgcagctgggtactaccctaatagtggattgcaacgttaccgataccaaagataataccaatctgcggtgctggcgcgtgaataataccctggtcgatgactactatgacgagagtaaacgcatcagggaaggggtcgaaacccatgttagtttccgtgagcataacctgtatacggtgaatatcacgttcttggaagttaagatggaagattacggcctgccgttcatgtgtcacgccggcgtttcaacagcctatatcatcctgcaactcccagctcccgacttccgagcatatctgattgggggcctgatcgcacttgtggctgtggccgtctcagtcgtgtacatctataacatctttaagatcgatatagttctgtggtatcgcagcgctttccactcgactgagaccatcgtggacggtaagttgtatgacgcctatgtgctgtatcctaaaccccataaggagtcccaaaggcatgccgttgacgctctagtccttaacatcctgccggaggtgttagaacggcagtgtggatacaagttgtttattttcgggagggatgagtttcctggccaggccgtggctaacgtcattgatgaaaatgtgaaactgtgcaggcggctcattgtcatcgttgtgcccgagagcctcggatttggcctcctgaagaacttgtccgaggagcagattgccgtgtactcagcccttatccaggatgggatgaaagtgatcctgatagaactagagaaaattgaagactacaccgtgatgcccgagtcaatccagtacatcaaacagaaacatggcgcaatcaggtggcatggtgatttcacagagcagtcccagtgtatgaagactaaattttggaaaacggtcagataccacatgcctccacgtagatgccgccctttcccccctgtccaattgttacagcacacaccttgttacagaactgctggaccggaactcggcagtagaagaaagaaatgcacgctaacaactggctag

SEQ ID NO: 141346 - DNA, 1728 bp, Artificial Sequence
  derived and/or modified sequence
atgtggtccttgttgctatgcgggctctcaatagccttgcctttatctgtgaccgccgatggctgcaaggatatcttcatgaagaacgaaattctcagcgcatcccagccttttgccttcaattgcacctttcctccaatcacgtccggtgaggtgagcgtgacctggtacaagaacagtagtaagatacctgtcagcaagatcatacagagccggattcatcaggatgaaacatggatattgtttctgcctatggagtggggcgactccggagtgtaccagtgtgtcattaagggaagagattcatgccacaggatccacgtcaacctgacagtcttcgaaaagcactggtgtgatacaagcatcggaggactgcctaatctgagtgatgagtacaagcagattctgcatctcggcaaagacgactcgttgacctgccacttgcactttcctaagagctgtgttttgggccccattaagtggtacaaagattgcaatgagattaagggtgagcgctttacggtgctggaaacgaggctcctggtttccaacgtgagcgcggaagatagaggtaattatgcctgtcaggccattttgactcactcgggcaaacagtacgaggtgcttaacggcattaccgtatccattaccgagagagccggttacggcggatccgtccccaagattatataccccaagaaccactccattgaggtccagctagggaccacacttattgtggactgtaatgtgacagacactaaggacaacacaaacttgaggtgctggcgggtgaataacactctggtcgatgactactacgacgaatccaaacgcatccgagagggggtggaaacccacgtctcattccgcgaacataatttgtacacagtgaatatcacgtttctggaagtgaagatggaagattacggcctcccatttatgtgccacgcgggggtttctacagcctacatcattcttcagttgcctgcgccggacttccgggcatacttgattggtggtctgatagccctcgtagccgtagctgtgtcggtagtgtacatctacaacattttcaagatcgatatcgtactctggtaccggagtgccttccatagcacggagacaattgtggacgggaaactctatgacgcttatgttctataccccaaaccccacaaggagtctcagcggcacgctgtggacgcactcgttctgaacatcctgcctgaggtcttggaaaggcaatgcggatacaaattattcatattcgggagagacgagttcccagggcaggccgttgccaacgtaatagatgagaacgtgaaactatgtcgtcggttaattgttattgttgtccctgagtccttgggattcggcctgctgaaaaatctcagcgaagaacagatcgctgtctactcagcactcattcaagatgggatgaaagtcatcttaatcgaactggaaaaaattgaagattataccgtcatgcccgaatcaatccagtatatcaaacagaagcatggagcaatccggtggcacggagattttacagagcagtctcagtgtatgaaaaccaagttttggaagaccgtcagataccacatgccacctaggcggtgcaggccgttcccgccagtgcaactgctgcaacataccccgtgttataggacggccggccctgaattggggagccggcgtaagaagtgtactcttacaaccggctag

SEQ ID NO: 141347 - DNA, 1728 bp, Artificial Sequence
  derived and/or modified sequence
atgtggagcctgctgctgtgtggcctgagcatcgccctgcccctgtctgtgacagcagatggctgcaaggacatcttcatgaagaatgagatcctgagcgccagccagccctttgccttcaactgcaccttcccccccatcaccagcggggaggtgtctgtgacctggtacaagaacagcagcaagatccctgtgtccaagatcatccagagccgcatccaccaggatgagacctggatcctcttcctgcccatggagtggggagacagcggcgtgtaccagtgtgtgatcaagggccgggacagctgccaccgcatccacgtgaacctgactgtgtttgagaagcactggtgtgacaccagcatcggcggcctgcccaacctgagtgatgagtacaagcagatcctgcacctgggcaaggatgacagcctgacctgccacctgcacttccccaagagctgtgtgctgggccccatcaagtggtacaaggactgcaatgagatcaagggggagcgcttcaccgtgctggagacccggctgctggtgtccaatgtgtctgctgaggaccggggcaactatgcctgccaggccatcctgacccacagcggcaagcagtatgaggtgctgaatggcatcaccgtgtccatcacagagcgggccggctacggcggctctgtgcccaagatcatctaccccaagaaccacagcattgaggtgcagctgggcaccaccctcatcgtggactgcaatgtgacagacaccaaggacaacaccaacctgcgctgctggagggtgaacaacaccctggtggatgactactatgatgagagcaagaggatccgggagggcgtggagacccacgtgtccttccgggagcacaacctgtacacagtgaacatcaccttcctggaggtgaagatggaggactatggcctgcccttcatgtgccacgccggcgtgtccacagcctacatcatcctgcagctgcctgccccagacttccgggcctacctgattggaggcctgattgccctggtggccgtggccgtgtctgtggtgtacatctacaacatcttcaagattgatattgtgctgtggtacagaagtgccttccacagcacagagaccatcgtggatggcaagctgtatgatgcctacgtgctgtaccccaagccccacaaggagagccagagacatgctgtggatgccctggtgctgaacatcctgcctgaggtgctggagcggcagtgtggctacaagctgttcatcttcggcagagatgagttccctggccaggccgtggccaacgtgattgatgaaaatgtgaagctgtgccggcggctgattgtgattgtggtgcctgagagcctgggcttcggcctgctgaagaacctgtctgaggagcagattgctgtgtacagcgccctgatccaggacggcatgaaggtgatcctgattgagctggagaagattgaggactacacagtgatgcctgagagcatccagtacatcaagcagaagcacggggccatccgctggcacggggacttcacagagcagagccagtgcatgaagaccaagttctggaagacagtgcgctaccacatgccaccccggcgctgccggcccttcccccctgtgcagctgctgcagcacaccccctgctacagaacagctggccctgagctgggcagcaggaggaagaagtgcaccctgaccaccggctag

SEQ ID NO: 141348 - DNA, 1728 bp, Artificial Sequence
  derived and/or modified sequence
atgtggagcctgctgctgtgcggcctgagcatcgccctgcccctgtccgtgaccgctgacggctgcaaagatatctttatgaaaaatgagattttaagtgcaagccagcctttcgcctttaattgtaccttcccccccataacaagcggagaagtgtctgtaacctggtacaaaaattccagtaaaatcccagtctctaaaatcattcagtctaggattcaccaggacgagacatggattttatttctgcccatggagtggggtgactcgggcgtataccagtgtgtcataaagggccgcgattcttgtcatcgtatacacgttaatctcacagtctttgaaaaacactggtgtgatacttcgatcgggggcttaccgaatctcagtgatgagtacaagcaaattctgcatctcggcaaagacgattcacttacatgccatctgcattttcctaagagctgcgtgttggggcctatcaagtggtacaaggactgcaatgagattaagggcgaaagatttactgtcctcgagacgcgcctgctggtgagcaacgtgagcgcagaggatcgaggcaactacgcatgccaggctattttgacccattctggaaaacagtacgaagtcttaaacggaatcacagtctctataaccgagagagctggctatggagggtcagtgcctaaaatcatctaccctaagaaccattcaattgaagtgcagctgggaacaacactgatagtggattgtaatgtgacggacacaaaggataacacaaatttacggtgctggcgggtgaacaatacattggtggatgattattacgacgagagtaaaaggatccgagagggcgtggaaacgcacgttagctttagggaacacaatctatatacggtgaatatcacatttctggaggtcaagatggaggattacggcctccctttcatgtgtcacgccggggtcagcacagcttacattattcttcaactgcccgctccagacttccgggcctacctcatcggagggcttattgcacttgtcgccgtagcagttagcgtcgtttatatttataatatctttaagattgacattgtcctgtggtataggagtgccttccactctacagagacgatcgtggatggcaaactgtacgatgcttatgtgctctacccaaagcctcacaaggaatcacagaggcatgccgtcgatgccttagtactaaacatcttgccagaggtgctggaaagacaatgcggatataagttattcatattcggtcgagacgaattccccggacaagccgttgccaacgtgatagacgaaaatgtaaagctgtgcaggaggctgattgttatagtcgtccccgagagcctcggctttggactgctgaagaatttaagcgaagaacagatcgccgtctattctgccctgatccaggacggcatgaaggtgatccttatagaattggaaaaaattgaggattacaccgtcatgccggaatcaatacagtacattaaacagaaacacggcgctattagatggcacggagactttactgaacagtcacagtgcatgaaaacgaagttctggaaaacagtcaggtatcatatgcctccaagacgctgccgtcccttccctcctgttcagcttttgcaacatacaccttgctatcggaccgccggaccagagctgggctcgcgacggaagaaatgcaccctcaccaccggctag

SEQ ID NO: 141349 - DNA, 1728 bp, Artificial Sequence
  derived and/or modified sequence
atgtggagcctgctgctgtgcggcctgagcatcgccctgcccctgagcgtcactgcagatggctgtaaagatatctttatgaagaatgagattcttagcgctagccaacccttcgcttttaactgtacatttcctcccatcactagtggcgaggtgagtgtgacctggtataaaaattcctctaagatacctgtttctaaaatcattcagtctcgcattcaccaggacgagacctggatcctttttttgccaatggagtggggcgattcaggcgtctaccagtgcgtgattaaaggccgagacagctgccaccgaattcacgtaaatctgaccgttttcgaaaaacactggtgtgacacgagcatcggaggcctgcccaatctcagcgatgagtacaaacagattctccacttaggcaaagatgacagtctcacttgtcatttacactttcctaaatcctgcgttcttgggcctatcaagtggtataaggactgcaatgaaattaagggcgagcgctttaccgtgcttgaaactcggctgctggtgagcaatgtgagcgctgaagatcgcggaaactacgcttgccaggctatcctgactcacagcgggaaacaatacgaagtcttgaacggaatcacagtctctattaccgagagggcaggctacggtgggtcagtgccaaagatcatttacccgaagaaccatagtatcgaagtgcagctgggcacaactctcatagtggattgcaatgtcactgacacaaaagacaatacaaatttgcggtgttggcgggtgaataacacattggttgacgattattatgacgagtctaaaagaatcagagaaggcgtagagacacacgtgagcttcagggaacataatctgtacaccgtgaatattacattcctagaggtgaagatggaggactatggcctgccgttcatgtgccatgccggggtttccacagcttacattatcctccaactcccagcccctgatttcagagcatatctgatcggaggactcattgcactagtggctgttgctgtgtctgtcgtgtatatctataatatttttaagatcgacatcgttctgtggtataggtctgcttttcactcgaccgaaactattgttgacggtaagctgtatgacgcctacgtcttatatccaaagccccataaggaaagccagcgacacgcagtcgacgcactggtgcttaatattctgccagaagtgctcgagcgtcaatgcggttataaactgttcattttcggacgcgacgagttcccagggcaggccgtggccaacgtgatcgacgaaaatgtcaagctctgccgcaggctcattgtcatcgttgtgcccgagtccctcgggttcgggcttctgaagaacctgagcgaggagcagattgcggtgtatagcgctctgattcaggacggaatgaaggtgatcctcattgaacttgagaagatcgaagactacaccgtgatgccagagagcatacagtacatcaagcaaaaacacggagcaatcaggtggcacggcgactttaccgaacagtcccaatgtatgaagacgaagttctggaaaaccgtgcggtaccatatgcccccacgtcgctgcagaccctttccccctgtgcagttgctgcagcacactccatgctaccggactgccggcccagaactgggatctcggcggaagaaatgtaccttgacaacggggtag

SEQ ID NO: 141350 - DNA, 1728 bp, Artificial Sequence
  derived and/or modified sequence
atgtggtcccttctcctctgtggcctgtctattgccctccccctgtctgtcaccgccgatggctgtaaggacatttttatgaaaaacgaaatactttccgccagccagccatttgccttcaattgcacgttccctccaatcactagcggagaggtctcagttacatggtataaaaattcatcgaagatcccagtgagtaagatcattcaatcccggatacaccaggacgaaacgtggatccttttcctgcccatggagtggggcgattcaggcgtgtaccagtgcgtgattaagggcagagactcttgccaccgcatccatgtgaacctcaccgtgtttgagaagcactggtgtgataccagcatcgggggactgcctaaccttagtgacgaatacaagcagattctacacctggggaaagacgatagtttgacctgtcaccttcacttccctaaatcatgtgttcttgggcctattaaatggtataaagactgtaacgagattaaaggagaaagatttacagtgctcgagacgagactcctggtgtcaaacgtctcagcagaggatcgtggaaattatgcctgccaggccattctcactcattccgggaagcaatatgaggtattgaatgggatcacggttagtattactgaaagagccggatatggtggaagcgtgccaaaaatcatctacccaaagaatcactcaattgaggtgcaacttgggaccaccctgatcgtggattgcaatgtcactgataccaaggacaatactaacctgagatgctggcgggtcaataacactcttgtggacgactactacgatgagagcaagcggatcagggagggggtcgagacccacgtgtctttccgggagcataacttatatacagttaacattacatttttggaagtgaaaatggaggattacgggcttcccttcatgtgccacgccggtgtgagcaccgcatacattattctgcagctcccggcacccgactttcgggcttacctgatcggcggattaattgctctggtggccgtggccgtttccgtcgtgtacatctacaacatatttaaaatcgacatcgtcctttggtaccgctcggcctttcactctactgagaccattgtcgacgggaagctgtatgacgcatacgtgctttatcctaagccgcacaaggaatcccagagacatgctgtggatgccctcgtgctcaatattttacccgaggtgctcgagcgccagtgcgggtacaagctatttatcttcggcagagatgaatttcccggtcaggccgtggcaaatgtaatcgacgaaaacgttaaactatgccgacggctaatagtgatcgttgtgccagagagtcttggcttcggcctgctgaagaatctcagtgaggaacagatcgccgtttatagcgctctgatccaagatggcatgaaagtgatcttgattgagctagagaagattgaagattataccgtgatgcctgagtccatccagtatattaagcagaagcacggtgctatcaggtggcatggtgatttcaccgaacagtctcagtgcatgaagaccaaattttggaagactgtgagataccatatgccccctagaagatgtcgaccttttccacccgtccagctgctgcagcacaccccttgctacaggaccgccggacctgagctcgggtcccggcgaaagaaatgcactttaaccaccggctag

SEQ ID NO: 141351 - DNA, 1728 bp, Artificial Sequence
  derived and/or modified sequence
atgtggagcttgctcctatgcggactatctatcgccctcccactgtctgtgactgcagacggctgtaaagacattttcatgaagaatgaaattctgagcgccagtcaaccctttgctttcaactgtacattccctccgatcacatccggagaggtgtccgtcacctggtataagaatagttcaaagataccagtctccaagattattcagtcacggattcatcaggatgagacctggatactgttcctaccgatggaatggggagacagtggagtttatcaatgtgtgatcaaggggagggattcatgtcaccgaattcatgtgaacctgacggtgtttgagaagcactggtgtgatacatctataggcggtttgccaaatttgtccgacgaatacaagcagatccttcaccttggaaaggatgacagtctgacctgccatctgcacttcccaaagtcttgcgtcctcggaccaattaaatggtacaaagactgcaatgaaattaaaggagagcgattcactgtcctggaaactaggctgctcgtatctaatgttagcgccgaagatagagggaactatgcttgccaggccatccttactcatagtggtaagcagtacgaagtgctgaacggaataactgtttcaatcaccgaacgcgcaggctacggaggcagcgtacctaaaattatttacccaaaaaaccacagcatcgaagtgcagctgggcaccaccctcatagtcgactgcaacgtcactgacactaaagataacacaaatctcagatgttggcgcgtcaacaacactctggtggacgattactatgatgagagcaagagaatcagggagggagtggagactcacgtcagctttcgagaacataacctgtacaccgtcaacattacctttctcgaggtgaaaatggaggattatggactgccgttcatgtgccacgctggtgtgagcactgcctacataattctacaactcccagctcccgacttcagagcttacttgattgggggactgattgctctggttgctgtggccgtgtcagtagtgtatatctataatatttttaagattgacatcgttctttggtatcgtagtgcctttcatagtacggagaccatagtggatggtaagttgtacgacgcttatgtgctctaccccaagccccacaaagagagtcagcgacacgccgtggatgccctcgttcttaacatacttccggaagttctcgaacgccagtgcggctacaagctttttatttttgggagggacgaatttcctggacaggcagtagccaacgtcatcgatgaaaatgtgaagttatgtcggcgacttatcgttattgtcgtgcctgaaagcttaggctttggcttgcttaaaaatttatctgaggagcaaatagccgtgtatagtgcgctaatccaggacggcatgaaagtaatattgattgaactggagaagatcgaggactacactgttatgcccgagagcattcaatacattaaacagaagcacggcgctattaggtggcacggcgattttaccgagcagtcccagtgtatgaaaaccaagttctggaagacggtaagataccacatgcctccccgtaggtgtcggccatttccacccgtccagctactccaacacactccgtgctataggacagctggacctgagcttggctccagaaggaaaaagtgcaccttgacaactggatag

SEQ ID NO: 141352 - DNA, 1728 bp, Artificial Sequence
  derived and/or modified sequence
atgtggagcctgctgctgtgcggcctgagcatcgccctgcccctgagcgtgaccgccgacggctgcaaggacatcttcatgaagaacgagatcctgagcgccagccagcccttcgccttcaactgcaccttcccccccatcaccagcggcgaggtgagcgtgacctggtacaagaacagcagcaagatccccgtgagcaagatcatccagagcagaatccaccaggacgagacctggatcctgttcctgcccatggagtggggcgacagcggcgtgtaccagtgcgtgatcaagggcagagacagctgccacagaatccacgtgaacctgaccgtgttcgagaagcactggtgcgacaccagcatcggcggcctgcccaacctgagcgacgagtacaagcagatcctgcacctgggcaaggacgacagcctgacctgccacctgcacttccccaagagctgcgtgctgggccccatcaagtggtacaaggactgcaacgagatcaagggcgagagattcaccgtgctggagaccagactgctggtgagcaacgtgagcgccgaggacagaggcaactacgcctgccaggccatcctgacccacagcggcaagcagtacgaggtgctgaacggcatcaccgtgagcatcaccgagagagccggctacggcggcagcgtgcccaagatcatctaccccaagaaccacagcatcgaggtgcagctgggcaccaccctgatcgtggactgcaacgtgaccgacaccaaggacaacaccaacctgagatgctggagagtgaacaacaccctggtggacgactactacgacgagagcaagagaatcagagagggcgtggagacccacgtgagcttcagagagcacaacctgtacaccgtgaacatcaccttcctggaggtgaagatggaggactacggcctgcccttcatgtgccacgccggcgtgagcaccgcctacatcatcctgcagctgcccgcccccgacttcagagcctacctgatcggcggcctgatcgccctggtggccgtggccgtgagcgtggtgtacatctacaacatcttcaagatcgacatcgtgctgtggtacagaagcgccttccacagcaccgagaccatcgtggacggcaagctgtacgacgcctacgtgctgtaccccaagccccacaaggagagccagagacacgccgtggacgccctggtgctgaacatcctgcccgaggtgctggagagacagtgcggctacaagctgttcatcttcggcagagacgagttccccggccaggccgtggccaacgtgatcgacgagaacgtgaagctgtgcagaagactgatcgtgatcgtggtgcccgagagcctgggcttcggcctgctgaagaacctgagcgaggagcagatcgccgtgtacagcgccctgatccaggacggcatgaaggtgatcctgatcgagctggagaagatcgaggactacaccgtgatgcccgagagcatccagtacatcaagcagaagcacggcgccatcagatggcacggcgacttcaccgagcagagccagtgcatgaagaccaagttctggaagaccgtgagataccacatgccccccagaagatgcagacccttcccccccgtgcagctgctgcagcacaccccctgctacagaaccgccggccccgagctgggcagcagaagaaagaagtgcaccctgaccaccggctag

SEQ ID NO: 141353 - protein, 541 aa, Artificial Sequence
  derived and/or modified sequence
MNCRELPLTLWVLISVSTAESCTSRPHITVVEGEPFYLKHCSCSLAHEIETTTKSWYKSSGSQEHVELNPRSSSRIALHDCVLEFWPVELNDTGSYFFQMKNYTQKWKLNVIRRNKHSCFTERQVTSKIVEVKKFFQITCENSYYQTLVNSTSLYKNCKKLLLENNKNPTIKKNAEFEDQGYYSCVHFLHHNGKLFNITKTFNITIVEDRSNIVPVLLGPKLNHVAVELGKNVRLNCSALLNEEDVIYWMFGEENGSDPNIHEEKEMRIMTPEGKWHASKVLRIENIGESNLNVLYNCTVASTGGTDTKSFILVRKADMADIPGHVFTRGMIIAVLILVAVVCLVTVCVIYRVDLVLFYRHLTRRDETLTDGKTYDAFVSYLKECRPENGEEHTFAVEILPRVLEKHFGYKLCIFERDVVPGGAVVDEIHSLIEKSRRLIIVLSKSYMSNEVRYELESGLHEALVERKIKIILIEFTPVTDFTFLPQSLKLLKSHRVLKWKADKSLSYNSRFWKNLLYLMPAKTVKPGRDEPEVLPVLSES

SEQ ID NO: 141354 - DNA, 1626 bp, Artificial Sequence
  derived and/or modified sequence
atgaattgccgcgaactgccccttaccctttgggtgctgatttccgtaagcacagccgagagttgcactagtagaccccacataacggttgttgaaggcgagcccttctatttgaaacattgcagctgctcactcgctcacgaaatcgaaacgactaccaagagctggtacaaatcatcagggtctcaggaacatgttgagctgaatccacgatctagctcccgtattgctctccatgactgtgtgttagagttctggcctgttgaattaaatgacaccggttcttatttttttcagatgaaaaattacacacagaaatggaaactgaatgtgatcaggaggaataagcacagctgctttacagaaaggcaggttaccagcaagatcgtcgaggtcaagaagttttttcagattacatgtgaaaacagctactaccagaccctggttaattcgactagtttgtacaagaattgtaaaaagttgctcctagagaacaacaaaaatcctactatcaagaaaaacgctgaattcgaagaccagggttattacagttgcgtccattttctgcaccacaacgggaaactgttcaacataactaaaacctttaatataaccattgtcgaggacagatcgaacatcgttcctgtgcttttaggtcccaagctgaatcatgtagcggtggagctgggaaaaaacgttagacttaattgctctgccctgctgaacgaggaagatgtgatctattggatgtttggagaggaaaatggtagcgaccccaacatccacgaagaaaaagagatgcggatcatgacccccgagggcaagtggcatgcaagcaaagtattgcgtattgaaaacatcggtgagagcaatctcaatgtgctgtataactgcaccgtagcgtcaactggtggtacagacaccaaatccttcatcctggttagaaaggcagacatggctgacataccaggccacgtgttcacacggggtatgatcatcgccgtcctcattctcgtggccgtggtgtgtctggtgaccgtctgcgtgatataccgggtagatctcgtgctcttttacaggcacctcactcgtcgcgatgaaacgctgaccgacggaaagacttatgatgcattcgtgtcttaccttaaagagtgtaggcccgaaaatggggaggagcacaccttcgccgtagaaattctgcctcgagtgctggagaagcacttcgggtataaactctgcatcttcgagagggatgttgtaccaggaggggcagtggtggatgagatccacagtttgatagaaaaaagtagacgcctaattatcgtgttaagtaagagctatatgtcaaatgaggtccggtatgagcttgagtctggcctgcacgaagcactggtagaaagaaaaattaaaattatcctgattgaatttaccccagtgactgattttacattcctaccccagagcctaaagctgctgaagtctcatagagtgctaaaatggaaggccgataaatccctgtcctataacagccgattttggaaaaacctcctatacctcatgcccgcgaagaccgtaaaaccggggagggatgagcccgaagtcctgcccgtcttgtccgagtcttag

SEQ ID NO: 141355 - DNA, 1626 bp, Artificial Sequence
  derived and/or modified sequence
atgaattgcagagagcttcctctgacactgtgggtcctcattagtgtgtcaaccgccgaatcatgtacatcgcgcccacatataaccgtggtggagggggagcctttttacctgaagcactgctcatgctcgctcgcgcacgagatcgaaaccaccactaagagctggtacaaatcgtccgggtcccaagaacatgtcgagctgaatccaaggtcctccagtcggattgcgttgcacgattgcgttctcgaattttggccagtcgaattgaatgatactgggtcctatttttttcagatgaagaactatacccagaaatggaagctgaatgtaatccgccgcaacaagcactcctgctttacggagcggcaggttaccagcaagattgtggaggttaagaagttctttcagattacatgcgagaatagttactaccagaccctggtgaacagcacgtccctgtataaaaattgcaaaaaacttctgctcgagaacaataagaatcccacaatcaagaagaatgccgaattcgaagatcagggctattacagctgcgtgcactttctccaccacaatgggaagctcttcaatataacaaaaacttttaacatcactatagtagaggaccggagcaatattgtcccagtgctgcttggccctaagctcaatcacgtagccgtggagctggggaaaaatgtaagactgaactgttctgcgctcctgaatgaggaggacgtgatttactggatgttcggagaggaaaatggcagcgatccaaatatccacgaggaaaaagaaatgagaataatgacaccagagggaaagtggcacgcctcaaaggtgctgcgaatagagaacataggagaaagcaacctgaatgtgctctataattgcaccgtggccagtactggaggaacagacacaaaaagctttatcctggttagaaaagcagatatggccgatattccaggccacgttttcacgcgcggtatgattatcgcagtgctcatcctcgtcgcggtagtatgtctggtgacagtctgcgtgatttaccgcgttgatcttgtcctgttttaccggcacctgacacgacgagatgagactctcacagatggtaaaacctatgatgccttcgttagctacctgaaagagtgtcggccagagaacggagaagagcacacattcgccgtagagattctcccccgcgtcctggagaaacattttgggtacaaactgtgtattttcgagagggatgtggttcctggcggggctgtggtcgatgaaatccactcactgattgaaaagtcccgacgacttattatcgtgctgtctaagtcctatatgtcaaacgaggttaggtacgaactggagagcgggcttcacgaagcactcgtggagcgaaaaatcaagataatcctgatagagtttaccccagtgaccgacttcacattcctcccccagagtcttaagctcttgaaaagtcacagggtgctgaaatggaaggcggacaaaagcctctcgtacaactctaggttttggaaaaatctactctatctcatgcctgccaaaacagttaagccaggccgcgacgaacctgaggtgttgcccgtgttatccgagagctag

SEQ ID NO: 141356 - DNA, 1626 bp, Artificial Sequence
  derived and/or modified sequence
atgaattgtcgggagttgccattaacactgtgggttctgattagtgtttcaacagctgagtcctgtacaagccgtccccacatcaccgtggtggagggggaaccattctatttgaagcattgcagctgttcattggcgcatgagatcgagacaactactaaatcttggtacaaatcatctggcagccaggagcacgtcgaactgaatcctaggagctcctctcggatcgctctccatgattgtgtgctcgagttctggcctgtcgagctaaatgacacggggtcttatttttttcagatgaagaactacacccaaaagtggaagctgaatgttataagaagaaacaagcactcctgcttcaccgaaagacaagtgacaagtaaaattgtggaggtcaaaaagtttttccagattacctgcgagaatagctattaccagactctggttaacagcaccagtctgtataaaaactgtaagaagttgctcctggagaataacaagaaccctaccatcaagaagaacgctgaattcgaggatcagggctactactcttgtgtgcactttctacatcacaacggcaagttattcaatataacaaaaacattcaatattacaatcgtggaagaccggtcaaatatcgtccccgtgctgctgggtcccaagctgaaccatgtggcagttgaactgggcaagaatgtgagacttaactgcagtgctctgctcaacgaggaagatgtgatctactggatgttcggtgaggagaatggaagcgatcctaacatccacgaggagaaagagatgaggattatgacaccagagggaaaatggcacgcttccaaggtcctgagaatcgagaacattggcgagtcaaatcttaacgtcctctacaactgtactgtggccagcacgggtgggaccgatacgaagagctttatcctggtcaggaaggctgacatggccgacattcccgggcacgtgttcactaggggaatgattattgctgtgctgatactggttgccgtggtatgcctggtcaccgtctgtgtcatttatagggtggatctggtcctattctacaggcatttaactagaagggatgagactcttacagatggcaagacctatgatgcttttgtgtcctatttgaaggagtgtcgccctgagaacggcgaggaacatactttcgctgtggaaatcctgcctcgtgtcctcgagaagcactttggatacaaactgtgtatttttgagcgtgatgtggtgcccggaggcgctgtcgttgatgagattcactcgctcatcgaaaaatccagacgccttatcatcgtgctgagtaaatcatacatgtccaatgaggtgcgatatgagttggaaagcgggctccacgaagctcttgtggagcggaagatcaaaatcattttaattgaatttacgcccgtcacagactttacttttctgccacaatctcttaagctcctcaagagtcaccgcgtgctgaaatggaaggccgataaaagcctaagctacaactcaagattttggaagaatctgctctacctcatgccggctaagacggtgaaaccgggcagggatgagcccgaagttctgccagtgctatctgagagttag

SEQ ID NO: 141357 - DNA, 3522 bp, Artificial Sequence
  derived and/or modified sequence
gccatttgaagcagaatccaaaccatgaattgtagagaattacccttgaccctttgggtgcttatatctgtaagcactgcagaatcttgtacttcacgtccccacattactgtggttgaaggggaacctttctatctgaaacattgctcgtgttcacttgcacatgagattgaaacaaccaccaaaagctggtacaaaagcagtggatcacaggaacatgtggagctgaacccaaggagttcctcgagaattgctttgcatgattgtgttttggagttttggccagttgagttgaatgacacaggatcttactttttccaaatgaaaaattatactcagaaatggaaattaaatgtcatcagaagaaataaacacagctgtttcactgaaagacaagtaactagtaaaattgtggaagttaaaaaattttttcagataacctgtgaaaacagttactatcaaacactggtcaacagcacatcattgtataagaactgtaaaaagctactactggagaacaataaaaacccaacgataaagaagaacgccgagtttgaagatcaggggtattactcctgcgtgcatttccttcatcataatggaaaactatttaatatcaccaaaaccttcaatataacaatagtggaagatcgcagtaatatagttccggttcttcttggaccaaagcttaaccatgttgcagtggaattaggaaaaaacgtaaggctcaactgctctgctttgctgaatgaagaggatgtaatttattggatgttcggggaagaaaatggatcggatcctaatatacatgaagagaaagaaatgagaattatgactccagaaggcaaatggcatgcttcaaaagtattgagaattgaaaatattggtgaaagcaatctaaatgttttatataattgcactgtggccagcacgggaggcacagacaccaaaagcttcatcttggtgagaaaagcagacatggctgatatcccaggccacgtcttcacaagaggaatgatcatagctgttttgatcttggtggcagtagtgtgcctagtgactgtgtgtgtcatttatagagttgacttggttctattttatagacatttaacgagaagagatgaaacattaacagatggaaaaacatatgatgcttttgtgtcttacctaaaagaatgccgacctgaaaatggagaggagcacacctttgctgtggagattttgcccagggtgttggagaaacattttgggtataagttatgcatatttgaaagggatgtagtgcctggaggagctgttgttgatgaaatccactcactgatagagaaaagccgaagactaatcattgtcctaagtaaaagttatatgtctaatgaggtcaggtatgaacttgaaagtggactccatgaagcattggtggaaagaaaaattaaaataatcttaattgaatttacacctgttactgacttcacattcttgccccaatcactaaagcttttgaaatctcacagagttctgaagtggaaggccgataaatctctttcttataactcaaggttctggaagaaccttctttacttaatgcctgcaaaaacagtcaagccaggtagagacgaaccggaagtcttgcctgttctttccgagtcttaatcttcagaaacagtgaacgccaaaaagaactcaagatattctggggactgagcatatgaacctgttcataacaaaggctgtgactcgaaataattaactttgtcaaaatcctgctcacaatttgaagatgaaacttgtcattaggttggcgggaatgagactaaagattgcgctgtgggctgtggtcacgtgctcccagaagacctggaattcaaaagaaatggagctattctttttctccctctttcataactggatgcagctgctcatactcaatcccatattcagcaagtgtgaagctggacgtgatgcaaaataaccgatgccctacaaaaagggcgcatctttaagagttttaatgccagtgcttaattcgaatgaggggattttaagtgtctgaagaggcattttctagggaccagtgggtgactgagtaactgaaatgctgctttcactccctaacaccatggatctggttgtgcataggatgtgggaggaggggctggcagggccgccttcagaggctgcagggcctcagcctcaggatgcatttaatgtatcctggccacagttgcagccaacggttcttgaaagctcggtaaggccctgcaacgcagagcctgcttatgtggatctatttatgggaacttcttaaaaggaccccagaatagctctttatctttcacaagagacacaaattctaattgagttaattatctgggcctttcactttggatgctctgaaacatttgttgattttgtgtgaatgtttatatcaaaatgtttgccaggttgtattagccattgaatagcaaaaaactgatagttacttgcttgttttttaaaaattacatattaaaaatgcccttggcataaggcagcatggtgtggcagttaagagatgggctgtgcagcccatcctgagctccagtcctgagtttgctacttacttctgtggcctctggaaccttatccaacctcttggtgcttcagtttcctcatctgtgaaattagaatttataataattgcacctacctcccaggggtaactaaatgaataaatataataaagtacttacagtggttcctgacacagactcagcactccgtcagtgttgccatgactatttttattatcattattaatgattacttagatcaattatttagcagtggactaatggaagctacagagcagggaagggaagcagatctagggaggaaggcagttttgatttgaggaggtttgcacatgtagagaagcatactggagaagcatatccagagggcgaaagatatctctccattgtgcatctgcctcttttgacgttggaagacacatgtcttaccccccaaagggagcccagcactgggagccttcttgatgatctcaaaaataatagctattcaagaaaatcaccaagtgactgtgaaaccgtcagttcggaaggctggttagaacatgtgggagcaacatgaatgttctacaaaagtttaaagcagagattgtttcaaatgggtgtagtagatattactgaaaaccaaaaaagagtgagattgtcagtgtaagaatgtgatttaatgtttgtagtgcttacaattttgtgtaccaactggatgactaaaaagagtaaaataatttaattaatagctcatattttatgtgtgaaaacatgttagtgaacatatataatcaaaatagatttcattgctattgcatagtctctaatacatagaatgattttgcttttctcttttattatacttgctttaaaatacttgaaatatattttgcattaaatgcatttcaagttaaatgtcttaaatgtatacattagatgtgtgttttaaaatgcataaaacacgttgaaa

SEQ ID NO: 141358 - DNA, 3854 bp, Artificial Sequence
  derived and/or modified sequence
acgcggggcgtctgggtggaggagccggtcctggagcacggctgcgaggagcacccggaccggagggtccccagaccgggacctccgagtcagggaggattctacgccagggagcgccccagactgagagcgccccagaccgctacactcccggacccggagcttcgcccgaccgcgggcagtgcccacctgcagcctccaccggccgggtcaggaggcggagatcgctgcttctcacctactttctgaacttggcctccgcagtcgcgacctggcgtgaaggaggagctgccgcccccgccccagcctcggggacgcctctctgaagagaagccatttgaagcagaatccaaaccatgaattgtagagaattacccttgaccctttgggtgcttatatctgtaagcactgcagaatcttgtacttcacgtccccacattactgtggttgaaggggaacctttctatctgaaacattgctcgtgttcacttgcacatgagattgaaacaaccaccaaaagctggtacaaaagcagtggatcacaggaacatgtggagctgaacccaaggagttcctcgagaattgctttgcatgattgtgttttggagttttggccagttgagttgaatgacacaggatcttactttttccaaatgaaaaattatactcagaaatggaaattaaatgtcatcagaagaaataaacacagctgtttcactgaaagacaagtaactagtaaaattgtggaagttaaaaaattttttcagataacctgtgaaaacagttactatcaaacactggtcaacagcacatcattgtataagaactgtaaaaagctactactggagaacaataaaaacccaacgataaagaagaacgccgagtttgaagatcaggggtattactcctgcgtgcatttccttcatcataatggaaaactatttaatatcaccaaaaccttcaatataacaatagtggaagatcgcagtaatatagttccggttcttcttggaccaaagcttaaccatgttgcagtggaattaggaaaaaacgtaaggctcaactgctctgctttgctgaatgaagaggatgtaatttattggatgttcggggaagaaaatggatcggatcctaatatacatgaagagaaagaaatgagaattatgactccagaaggcaaatggcatgcttcaaaagtattgagaattgaaaatattggtgaaagcaatctaaatgttttatataattgcactgtggccagcacgggaggcacagacaccaaaagcttcatcttggtgagaaaagcagacatggctgatatcccaggccacgtcttcacaagaggaatgatcatagctgttttgatcttggtggcagtagtgtgcctagtgactgtgtgtgtcatttatagagttgacttggttctattttatagacatttaacgagaagagatgaaacattaacagatggaaaaacatatgatgcttttgtgtcttacctaaaagaatgccgacctgaaaatggagaggagcacacctttgctgtggagattttgcccagggtgttggagaaacattttgggtataagttatgcatatttgaaagggatgtagtgcctggaggagctgttgttgatgaaatccactcactgatagagaaaagccgaagactaatcattgtcctaagtaaaagttatatgtctaatgaggtcaggtatgaacttgaaagtggactccatgaagcattggtggaaagaaaaattaaaataatcttaattgaatttacacctgttactgacttcacattcttgccccaatcactaaagcttttgaaatctcacagagttctgaagtggaaggccgataaatctctttcttataactcaaggttctggaagaaccttctttacttaatgcctgcaaaaacagtcaagccaggtagagacgaaccggaagtcttgcctgttctttccgagtcttaatcttcagaaacagtgaacgccaaaaagaactcaagatattctggggactgagcatatgaacctgttcataacaaaggctgtgactcgaaataattaactttgtcaaaatcctgctcacaatttgaagatgaaacttgtcattaggttggcgggaatgagactaaagattgcgctgtgggctgtggtcacgtgctcccagaagacctggaattcaaaagaaatggagctattctttttctccctctttcataactggatgcagctgctcatactcaatcccatattcagcaagtgtgaagctggacgtgatgcaaaataaccgatgccctacaaaaagggcgcatctttaagagttttaatgccagtgcttaattcgaatgaggggattttaagtgtctgaagaggcattttctagggaccagtgggtgactgagtaactgaaatgctgctttcactccctaacaccatggatctggttgtgcataggatgtgggaggaggggctggcagggccgccttcagaggctgcagggcctcagcctcaggatgcatttaatgtatcctggccacagttgcagccaacggttcttgaaagctcggtaaggccctgcaacgcagagcctgcttatgtggatctatttatgggaacttcttaaaaggaccccagaatagctctttatctttcacaagagacacaaattctaattgagttaattatctgggcctttcactttggatgctctgaaacatttgttgattttgtgtgaatgtttatatcaaaatgtttgccaggttgtattagccattgaatagcaaaaaactgatagttacttgcttgttttttaaaaattacatattaaaaatgcccttggcataaggcagcatggtgtggcagttaagagatgggctgtgcagcccatcctgagctccagtcctgagtttgctacttacttctgtggcctctggaaccttatccaacctcttggtgcttcagtttcctcatctgtgaaattagaatttataataattgcacctacctcccaggggtaactaaatgaataaatataataaagtacttacagtggttcctgacacagactcagcactccgtcagtgttgccatgactatttttattatcattattaatgattacttagatcaattatttagcagtggactaatggaagctacagagcagggaagggaagcagatctagggaggaaggcagttttgatttgaggaggtttgcacatgtagagaagcatactggagaagcatatccagagggcgaaagatatctctccattgtgcatctgcctcttttgacgttggaagacacatgtcttaccccccaaagggagcccagcactgggagccttcttgatgatctcaaaaataatagctattcaagaaaatcaccaagtgactgtgaaaccgtcagttcggaaggctggttagaacatgtgggagcaacatgaatgttctacaaaagtttaaagcagagattgtttcaaatgggtgtagtagatattactgaaaaccaaaaaagagtgagattgtcagtgtaagaatgtgatttaatgtttgtagtgcttacaattttgtgtaccaactggatgactaaaaagagtaaaataatttaattaatagctcatattttatgtgtgaaaacatgttagtgaacatatataatcaaaatagatttcattgctattgcatagtctctaatacatagaatgattttgcttttctcttttattatacttgctttaaaatacttgaaatatattttgcattaaatgcatttcaagttaaatgtcttaaatgtatacattagatgtgtgttttaaaatgcataaaacacgttgaaa

SEQ ID NO: 141359 - DNA, 1749 bp, Artificial Sequence
  derived and/or modified sequence
aaagctataaagctgtaagagaaattggctttctgagttgtgaaactgtgggcagaaagttgaggaagaaagaactcaagtacaacccaatgaggagaagccatttgaagcagaatccaaaccatgaattgtagagaattacccttgaccctttgggtgcttatatctgtaagcactgcagaatcttgtacttcacgtccccacattactgtggttgaaggggaacctttctatctgaaacattgctcgtgttcacttgcacatgagattgaaacaaccaccaaaagctggtacaaaagcagtggatcacaggaacatgtggagctgaacccaaggagttcctcgagaattgctttgcatgattgtgttttggagttttggccagttgagttgaatgacacaggatcttactttttccaaatgaaaaattatactcagaaatggaaattaaatgtcatcagaagaaataaacacagctgtttcactgaaagacaagtaactagtaaaattgtggaagttaaaaaattttttcagataacctgtgaaaacagttactatcaaacactggtcaacagcacatcattgtataagaactgtaaaaagctactactggagaacaataaaaacccaacgataaagaagaacgccgagtttgaagatcaggggtattactcctgcgtgcatttccttcatcataatggaaaactatttaatatcaccaaaaccttcaatataacaatagtggaagatcgcagtaatatagttccggttcttcttggaccaaagcttaaccatgttgcagtggaattaggaaaaaacgtaaggctcaactgctctgctttgctgaatgaagaggatgtaatttattggatgttcggggaagaaaatggatcggatcctaatatacatgaagagaaagaaatgagaattatgactccagaaggcaaatggcatgcttcaaaagtattgagaattgaaaatattggtgaaagcaatctaaatgttttatataattgcactgtggccagcacgggaggcacagacaccaaaagcttcatcttggtgagaaaagcagacatggctgatatcccaggccacgtcttcacaagaggaatgatcatagctgttttgatcttggtggcagtagtgtgcctagtgactgtgtgtgtcatttatagagttgacttggttctattttatagacatttaacgagaagagatgaaacattaacagatggaaaaacatatgatgcttttgtgtcttacctaaaagaatgccgacctgaaaatggagaggagcacacctttgctgtggagattttgcccagggtgttggagaaacattttgggtataagttatgcatatttgaaagggatgtagtgcctggaggagctgttgttgatgaaatccactcactgatagagaaaagccgaagactaatcattgtcctaagtaaaagttatatgtctaatgaggtcaggtatgaacttgaaagtggactccatgaagcattggtggaaagaaaaattaaaataatcttaattgaatttacacctgttactgacttcacattcttgccccaatcactaaagcttttgaaatctcacagagttctgaagtggaaggccgataaatctctttcttataactcaaggttctggaagaaccttctttacttaatgcctgcaaaaacagtcaagccaggtagagacgaaccggaagtcttgcctgttctttccgagtcttaa

SEQ ID NO: 141360 - DNA, 1626 bp, Artificial Sequence
  derived and/or modified sequence
atgaactgccgggagctgcccctgaccctgtgggtgctgatctctgtgtccacagctgagagctgcaccagccggccccacatcaccgtggtggagggggagcccttctacctgaagcactgcagctgcagcctggcccatgaaattgagaccaccaccaagtcctggtacaagagcagcggcagccaggagcacgtggagctgaaccccaggagcagcagccgcatcgccctgcatgactgtgtgctggagttctggcctgtggagctgaatgacaccggcagctacttcttccagatgaagaactacacccagaagtggaagctgaatgtcatcagaagaaacaagcacagctgcttcacagagcggcaggtgaccagcaagatcgtggaggtgaagaagttcttccagatcacctgtgaaaattcctactaccagaccctggtgaacagcaccagcctgtacaagaactgcaagaagctgctgctggagaacaacaagaaccccaccatcaagaagaatgctgagtttgaggaccagggctactacagctgtgtgcacttcctgcaccacaacgggaagctgttcaacatcaccaagaccttcaacatcaccatcgtggaggacaggagcaacatcgtgcctgtgctgctgggccccaagctgaaccacgtggccgtggagctgggcaagaatgtgcggctgaactgcagcgccctgctgaatgaggaggatgtgatctactggatgtttggagaggagaatggaagtgaccccaacatccacgaggagaaggagatgaggatcatgaccccagagggcaagtggcacgccagcaaggtgctgagaattgaaaatattggagagagcaacctgaatgtgctgtacaactgcaccgtggccagcactggaggaacagacaccaagagcttcatcctggtgaggaaggctgacatggctgacatccctggccacgtgttcacccggggcatgatcatcgctgtgctgatcctggtggccgtggtgtgcctggtgacagtgtgtgtgatctacagagtggacctggtgctcttctaccgccacctgaccaggagagatgagaccctgacagatggcaagacctatgatgcctttgtgtcctacctgaaggagtgcaggccagaaaatggagaggagcacacctttgctgtggagatcctgccccgggtgctggagaagcacttcggctacaagctgtgcatctttgaaagagatgtggtgcctggaggagctgtggtggatgagatccacagcctgattgagaagagcagaagactcatcatcgtgctgagcaagagctacatgagcaatgaggtgcgctatgagctggagagcggcctgcacgaggccctggtggagaggaagatcaagatcatcctgattgagttcacccctgtgacagacttcaccttcctgccccagagcctgaagctgctgaagagccaccgggtgctgaagtggaaggctgacaagagcctgagctacaacagccgcttctggaagaacctgctgtacctgatgcctgccaagacagtgaagccaggaagagatgagcctgaggtgctgcctgtgctgtctgagagctag

SEQ ID NO: 141361 - DNA, 1626 bp, Artificial Sequence
  derived and/or modified sequence
atgaactgccgggagctgcccctgaccctgtgggtgctgatcagcgttagtacagccgagtcgtgtacctctagaccgcacattaccgtggtggaaggcgagcctttctatctgaagcattgcagttgcagcctggctcacgagatagagactacaactaagagttggtacaaatccagcggaagtcaggagcatgtggagctgaatccaaggagctccagccggatcgctctgcatgattgtgtactggaattctggccagtggagcttaacgacactggctcctatttcttccagatgaaaaattacacacagaaatggaaactgaacgttatcaggaggaataaacacagttgctttacggagcgacaggtgacatccaaaatcgttgaagtgaagaagttctttcaaatcacctgtgaaaattcctactatcagaccttggtgaatagtacatctctatataaaaactgcaagaaactcttactcgaaaataacaaaaacccgactatcaagaaaaatgcagaattcgaagatcaaggctattacagctgtgtacacttcctgcatcacaacggaaaacttttcaatataacaaaaacatttaatataactatagtagaggatcgatccaatatcgtccctgtgctgctcggtcctaaactgaaccacgttgctgtggagctgggcaagaatgtgaggttgaactgctcagccctgctgaatgaggaggatgtaatctactggatgtttggcgaggagaacggcagtgacccaaacatccacgaggagaaggaaatgcggattatgactcctgaaggcaagtggcatgcctctaaggtactgagaattgaaaacatcggagagagcaatcttaatgtcctatacaattgcaccgtagctagtacgggcggaaccgacactaagagttttatcttggtgcggaaggcggacatggccgacattccaggccacgtgtttaccaggggaatgataatcgctgtcctcatcctggtcgctgttgtctgcctcgtgaccgtgtgtgtgatctatcgcgtcgacctggtgttgttttatcggcacctcacaagacgggacgaaacattaacggacgggaagacctacgacgcctttgtgtcctatttgaaagaatgcagaccagagaatggagaagaacacactttcgcagtcgaaattctgccccgagttcttgagaagcactttgggtataaactttgcatctttgagcgggatgtggttcccggaggcgccgtggtggatgagattcatagcctgatcgaaaagtcccggcgcctgatcatagtcctgagtaaaagttatatgagcaatgaggtgcgttatgaacttgagtcagggctgcacgaagccttagttgaaaggaagattaaaatcatcctcatagaattcacaccggttaccgatttcacctttttgcctcaatctctgaagttgctgaaaagccaccgcgtcttgaagtggaaggcggataagtcccttagctataattcccgcttttggaaaaatctcttgtacctcatgcctgccaaaaccgttaagcccggtcgggatgagcccgaagtactccctgtgcttagcgaaagttag

SEQ ID NO: 141362 - DNA, 1626 bp, Artificial Sequence
  derived and/or modified sequence
atgaactgccgggagctgcccctgaccctgtgggtgctgatcagcgtctccacggccgaaagttgtacctcgcgaccacatatcactgttgtagagggggaaccgttctatctcaagcattgctcctgtagcctggcccatgagatcgagaccaccaccaagtcatggtacaagtccagcgggtctcaagaacatgtggagcttaatccacggagctcctcccgcatcgccctacacgattgtgtgctggagttctggcctgtagagttaaacgataccggttcctactttttccagatgaagaattacacacagaaatggaagttgaatgtgatccggcggaataagcattcctgctttactgagaggcaggtaacctccaaaatcgtggaggtaaagaaattttttcagattacctgcgaaaacagttactaccaaacccttgttaatagcacttccctgtataaaaactgtaaaaaactgttgctcgaaaataacaaaaaccctactatcaaaaaaaacgctgaattcgaagaccaaggatactacagctgcgtccattttttacaccataacgggaaactctttaatatcacgaaaaccttcaacattactatcgttgaagacagatctaatatcgttcctgtgcttctcggaccaaagctgaaccatgtcgcagttgagctggggaagaatgtgagactgaattgctccgcccttctgaacgaggaggacgtgatttattggatgtttggagaggaaaacgggagtgaccccaacatccatgaggagaaagaaatgcgaataatgaccccagaggggaaatggcacgcctccaaggtgctgaggatagagaacatcggggagagcaatctcaatgtgctgtataactgtactgtggcaagtacaggcggcacggacactaagtcctttattctggtgcgaaaggccgatatggccgacatacccggacatgttttcacacgagggatgatcattgctgtcctcatcttggtggctgtggtttgccttgtcacggtctgcgttatttatagagtggacttagtattattttacagacatctgactagaagagacgaaaccttaactgacggtaaaacatacgacgcctttgtgtcgtatctcaaagaatgtagaccagagaatggtgaggagcacacgttcgccgtggaaatactgccgagggtgttagaaaagcatttcgggtataaattatgcatttttgaacgggacgtggtccccggtggagccgtcgtggatgaaattcatagtctgattgagaagtcacgcaggctcattatcgtgttatctaagagctatatgagcaatgaggtgagatacgagttggaatctggcctgcacgaggctttagtggagaggaagatcaaaatcatattaattgaattcactcccgtgaccgatttcacctttctgccgcagtccttgaaacttctgaaatcacaccgtgtgcttaaatggaaagctgacaagagcttgtcatacaatagccgtttttggaagaacctgctgtacttgatgcccgccaagactgtcaagcctgggcgggatgagcccgaggtcctgcctgttctgtcagaatcttag

SEQ ID NO: 141363 - DNA, 1626 bp, Artificial Sequence
  derived and/or modified sequence
atgaactgccgggagctgcccctgaccctgtgggtgctgatcagcgtctccaccgcggaaagttgcacctctagaccccacattaccgtggtggagggagaacctttctacctgaaacattgctcttgttcacttgcacatgaaattgagaccacaacaaaatcctggtacaagtcatctggaagtcaggaacacgtggagctgaaccctaggagctccagtagaattgccctgcacgattgtgtccttgaattttggcccgttgagctgaatgacaccggtagctacttcttccagatgaaaaattacacgcagaaatggaaactgaatgtgattcgccgaaacaagcacagttgttttaccgagagacaagtgacttccaagatcgttgaggtgaagaagttctttcagatcacttgtgagaattcctattaccagacattagtcaactctacctcactgtacaagaattgtaagaaacttctcctagagaacaacaagaacccaactatcaagaaaaacgccgagttcgaagatcagggctactatagctgcgtccattttctccaccacaacggcaagctgtttaatattaccaagacattcaatataacgatcgttgaggatagaagcaacattgtgccagtcttgctgggacccaaactaaaccacgtggcggttgaattgggcaagaatgttagattgaactgcagcgcactacttaatgaagaggacgtcatctactggatgtttggagaagagaacggatccgaccccaatattcacgaggaaaaagagatgcgaatcatgactcctgaggggaagtggcacgcttctaaggtgctgagaatagaaaacatcggtgagagcaatctgaatgtattgtataattgtactgtcgcctctacagggggaaccgacacaaagagctttatcttagtccggaaggccgatatggcagatattcccggccatgtgtttacacggggaatgatcattgcagtcctcatcctggttgccgtcgtgtgtctagtcacggtatgcgtgatataccgcgtggacttagtcctgttttataggcacctaacacgccgggacgagacattgaccgacggtaagacatatgacgcattcgtctcatatctcaaagaatgtagacccgaaaatggggaggagcacacatttgccgttgagattcttccacgggtcctggaaaagcatttcggatataagttgtgcatcttcgagagggatgtggtgccaggcggcgccgtggtggatgagatccacagcctgatcgagaaatcacgacggcttattatcgtactctctaagtcatacatgagcaacgaggtcagatacgaattggaatctgggctacacgaggcactcgtggagaggaagatcaagatcatcctgatagaattcactccagttaccgatttcacttttttgcctcagtccctcaaactgttgaagtcccatcgagtccttaaatggaaggccgacaaatcacttagctacaattcccggttttggaagaacttactatatctgatgcctgccaagaccgtcaaaccgggtagagacgagcccgaggtcctgcccgtcctgtcagaatcttag

SEQ ID NO: 141364 - DNA, 1626 bp, Artificial Sequence
  derived and/or modified sequence
atgaactgccgagagctgccactcactctttgggtgctcattagtgtgtcaacagcagaatcatgtactagccggccacacatcacagtggtggaaggcgagcctttctacctgaaacactgctcttgctcacttgcacacgagattgaaacaaccacaaagagttggtataagtcatcaggaagtcaggagcacgttgagcttaacccaaggagttcctcccggatcgccctccacgattgtgtgctggagttctggccagtggaactgaacgacacggggtcctattttttccagatgaaaaactacacgcagaaatggaaactcaacgtgattagaagaaataaacatagctgctttacagagcggcaggtcacctctaaaatcgtggaggtgaaaaaatttttccagattacctgcgagaacagttactatcagacgttagtgaacagtacgtccttgtataaaaattgcaagaaactactcctggaaaacaataagaatccgactataaagaagaatgctgaattcgaggatcaagggtactattcatgtgttcacttccttcaccacaacgggaaactgtttaatattaccaagacttttaatattacaatagtggaggatcgtagcaatatcgttccagtcctgctgggacccaagctcaatcacgtcgcagtggagctgggcaagaacgttcgtctgaactgtagcgctctgttgaatgaagaggacgttatatattggatgtttggagaagagaatgggagcgatcctaacattcacgaggagaaagagatgaggatcatgacacctgaaggcaaatggcacgcatctaaggtgttaaggatcgagaacatcggagaatcaaacctcaacgtcctatataattgcaccgtggccagcactgggggaaccgacactaaatccttcatcctggtgcggaaagcagatatggcagatatccccggacacgtgttcacaagggggatgatcattgccgttctcatcttggtggctgtggtgtgtcttgtcaccgtgtgtgtaatttaccgtgtagacctcgtgctcttctatcggcacttgaccagacgagatgagacgctgacagatggcaagacgtatgatgcattcgtcagctacctcaaagagtgtaggcccgagaacggagaggaacataccttcgccgtggagatccttcctcgcgtcctcgaaaagcatttcggatataaattatgtatcttcgagagggacgttgtccccggaggtgccgtggtcgatgagatccactcgctgattgaaaagagccgacgacttattatcgttctgtcaaagtcctacatgtcaaacgaagttcgctatgaactagaatccggcctgcacgaggctcttgtggaacggaaaattaagatcatcctcatcgaattcacaccagttactgacttcacttttttgccgcagtctctcaagctactgaagtcacatagggtgcttaagtggaaggcagataaaagtctgagctacaattcccgattttggaagaatctcctttatttaatgccagcaaaaaccgttaagccaggtcgggacgaaccggaggtgttgcccgtgctttccgagtcctag

SEQ ID NO: 141365 - DNA, 1626 bp, Artificial Sequence
  derived and/or modified sequence
atgaactgccgcgaactgcccctaaccctgtgggtgctcatctccgtgtcaactgctgagtcttgcacctcccggcctcacatcactgttgttgaaggcgagcccttttatctcaagcattgcagttgctcccttgcgcacgagatagaaactaccactaagtcatggtataagtcatcgggaagccaggagcatgtagaactgaaccctcggtcttcttcacggatcgcactccatgactgcgtgctagaattttggcctgtagaactgaacgacaccgggagctacttcttccaaatgaagaactacacacaaaaatggaaattaaacgtgatccggcgtaacaaacactcctgtttcaccgagcgccaggtgacaagcaaaattgttgaggtgaagaagttcttccagatcacatgcgaaaacagctactaccaaaccttggtgaatagcacttcgctgtacaaaaattgtaaaaaactgcttcttgagaataataagaatcctactataaagaagaatgccgaattcgaggatcagggctattacagctgtgtgcacttcctacaccacaacggtaaattgtttaatataacaaagaccttcaatatcacaattgtggaggatcgctccaatattgtccccgttctcttgggcccaaagctgaatcacgtagcagttgaactcggcaaaaacgtccgtctcaattgcagtgccctgctcaacgaggaggacgtgatttattggatgtttggagaggagaatggctccgatcctaacattcatgaagaaaaggagatgaggatcatgacacctgaaggtaagtggcacgcctctaaggtgctgcgaatcgagaacattggcgagtccaatctgaacgtgctgtacaactgcaccgtggcctcaaccggcggaactgatacaaagtcttttattctggtgcgcaaggctgacatggctgacatccctggtcatgtgttcacacgcggaatgatcattgccgtgctgattctggtggcagtggtgtgccttgtgaccgtgtgtgttatctatagggttgacttggtcttgttctatagacatctgacgaggcgtgatgaaacactcacagatggcaaaacttacgatgcgtttgtgtcctatttgaaagagtgtcggcctgagaatggggaggaacatacatttgccgtggagatcctgcccagggtgttggagaagcattttggttacaagctttgtatctttgaacgcgacgtcgtacccggtggtgccgttgtggatgagatccacagcttgatcgaaaagagtcggcgtctaatcattgtactcagcaaatcttacatgtccaacgaggtacgatatgaacttgaaagcggcctgcacgaagcgctggtcgaacgcaagattaagatcattctaatcgagttcacccccgttacagacttcaccttcctgccccagagcctgaagctattaaaaagccatagggtccttaaatggaaggctgataagtctttgagctataatagccgattttggaaaaacctactgtacctcatgcccgctaaaaccgtcaagcccggtagggatgaaccagaagtgctgccggtgctcagcgaatcatag

SEQ ID NO: 141366 - DNA, 1626 bp, Artificial Sequence
  derived and/or modified sequence
atgaactgtcgcgaacttcccctgactctatgggttctgatctccgtgagtactgccgaatcctgtacctccaggcctcacattacagtcgtagagggtgagccgttttacctgaagcactgtagctgctcactggcacatgaaattgagaccactaccaagtcctggtacaaatcaagcggttctcaggaacatgttgagttaaacccgagatcgtcgtcaaggatcgctctccacgactgcgtactcgagttctggccggtagaactcaacgacactggctcctatttttttcagatgaagaattatactcagaagtggaagctcaatgtcatccgacgcaacaagcactcttgcttcacagagagacaggttacctccaagattgtggaggttaagaaattcttccagattacatgtgagaacagttactaccagactcttgtcaacagcacctctctgtacaagaattgtaagaaactgctgctcgaaaacaacaagaacccgaccataaagaaaaatgctgaattcgaagaccagggctattatagctgtgtgcattttctgcatcataatgggaaactgttcaatatcacgaaaacttttaacatcactatagtggaagaccgcagtaatatcgtgccagttctcctgggccctaaactgaatcacgtggccgtggagctaggcaaaaatgtgcggctcaactgctccgcccttctgaatgaggaagacgtgatttactggatgttcggcgaagagaatggtagcgatccaaacatccatgaggagaaagagatgagaataatgacccctgagggaaaatggcatgcatcaaaggtcctgagaatagaaaacatcggagaatccaatttaaatgtgttatataactgcaccgtggcctccacggggggaactgacactaagtcatttattctcgtgcgaaaggctgatatggccgacataccaggccacgtgttcactaggggaatgattatagcagtgttgatcctggtagcagtcgtttgcttggtaacggtatgcgtgatttaccgggttgatctcgtattgttctaccgacatctaactcggagggatgagaccttaaccgacggcaagacttacgacgcatttgtgtcctacttgaaggagtgtcgcccagaaaacggcgaggaacatacctttgccgttgagattttgcctagagtcctggaaaaacactttggatataagctgtgtatcttcgaaagggacgtggtcccaggcggagccgtcgttgacgaaatccactccctgattgagaaatcacgcaggctgataatcgtgctcagcaagtcctacatgagcaacgaagtcaggtatgaactggagagtgggctgcacgaggccctggtggaacggaagataaagataatcctaatcgaatttacaccggtgaccgatttcaccttcctccctcaatcactgaagttgctcaaaagccatcgagtccttaagtggaaggctgacaagtcattatcctacaacagtagattctggaagaatctactctatctcatgccagccaagaccgtgaagccaggaagggatgagccagaagtgctaccagttctgtccgagagttag

SEQ ID NO: 141367 - DNA, 1626 bp, Artificial Sequence
  derived and/or modified sequence
atgaactgcagagagctgcccctgaccctgtgggtgctgatcagcgtgagcaccgccgagagctgcaccagcagaccccacatcaccgtggtggagggcgagcccttctacctgaagcactgcagctgcagcctggcccacgagatcgagaccaccaccaagagctggtacaagagcagcggcagccaggagcacgtggagctgaaccccagaagcagcagcagaatcgccctgcacgactgcgtgctggagttctggcccgtggagctgaacgacaccggcagctacttcttccagatgaagaactacacccagaagtggaagctgaacgtgatcagaagaaacaagcacagctgcttcaccgagagacaggtgaccagcaagatcgtggaggtgaagaagttcttccagatcacctgcgagaacagctactaccagaccctggtgaacagcaccagcctgtacaagaactgcaagaagctgctgctggagaacaacaagaaccccaccatcaagaagaacgccgagttcgaggaccagggctactacagctgcgtgcacttcctgcaccacaacggcaagctgttcaacatcaccaagaccttcaacatcaccatcgtggaggacagaagcaacatcgtgcccgtgctgctgggccccaagctgaaccacgtggccgtggagctgggcaagaacgtgagactgaactgcagcgccctgctgaacgaggaggacgtgatctactggatgttcggcgaggagaacggcagcgaccccaacatccacgaggagaaggagatgagaatcatgacccccgagggcaagtggcacgccagcaaggtgctgagaatcgagaacatcggcgagagcaacctgaacgtgctgtacaactgcaccgtggccagcaccggcggcaccgacaccaagagcttcatcctggtgagaaaggccgacatggccgacatccccggccacgtgttcaccagaggcatgatcatcgccgtgctgatcctggtggccgtggtgtgcctggtgaccgtgtgcgtgatctacagagtggacctggtgctgttctacagacacctgaccagaagagacgagaccctgaccgacggcaagacctacgacgccttcgtgagctacctgaaggagtgcagacccgagaacggcgaggagcacaccttcgccgtggagatcctgcccagagtgctggagaagcacttcggctacaagctgtgcatcttcgagagagacgtggtgcccggcggcgccgtggtggacgagatccacagcctgatcgagaagagcagaagactgatcatcgtgctgagcaagagctacatgagcaacgaggtgagatacgagctggagagcggcctgcacgaggccctggtggagagaaagatcaagatcatcctgatcgagttcacccccgtgaccgacttcaccttcctgccccagagcctgaagctgctgaagagccacagagtgctgaagtggaaggccgacaagagcctgagctacaacagcagattctggaagaacctgctgtacctgatgcccgccaagaccgtgaagcccggcagagacgagcccgaggtgctgcccgtgctgagcgagagctag

SEQ ID NO: 141368 - protein, 328 aa, Artificial Sequence
  derived and/or modified sequence
MGFWILAILTILMYSTAAKFSKQSWGLENEALIVRCPRQGKPSYTVDWYYSQTNKSIPTQERNRVFASGQLLKFLPAAVADSGIYTCIVRSPTFNRTGYANVTIYKKQSDCNVPDYLMYSTVSGSEKNSKIYCPTIDLYNWTAPLEWFKNCQALQGSRYRAHKSFLVIDNVMTEDAGDYTCKFIHNENGANYSVTATRSFTVKDEQGFSLFPVIGAPAQNEIKEVEIGKNANLTCSACFGKGTQFLAAVLWQLNGTKITDFGEPRIQQEEGQNQSFSNGLACLDMVLRIADVKEEDLLLQYDCLALNLHGLRRHTVRLSRKNPSKECF

SEQ ID NO: 141369 - protein, 211 aa, Artificial Sequence
  derived and/or modified sequence
MYSTVSGSEKNSKIYCPTIDLYNWTAPLEWFKNCQALQGSRYRAHKSFLVIDNVMTEDAGDYTCKFIHNENGANYSVTATRSFTVKDEQGFSLFPVIGAPAQNEIKEVEIGKNANLTCSACFGKGTQFLAAVLWQLNGTKITDFGEPRIQQEEGQNQSFSNGLACLDMVLRIADVKEEDLLLQYDCLALNLHGLRRHTVRLSRKNPSKECF

SEQ ID NO: 141370 - protein, 314 aa, Artificial Sequence
  derived and/or modified sequence
MGFWILAILTILMYSTAAKFSKQSWGLENEALIVRCPRQGKPSYTVDWYYSQTNKSIPTQERNRVFASGQLLKFLPAAVADSGIYTCIVRSPTFNRTGYANVTIYKKQSDCNVPDYLMYSTVSGSEKNSKIYCPTIDLYNWTAPLEWFKNCQALQGSRYRAHKSFLVIDNVMTEDAGDYTCKFIHNENGANYSVTATRSFTVKDEQGFSLFPVIGAPAQNEIKEVEIGTQFLAAVLWQLNGTKITDFGEPRIQQEEGQNQSFSNGLACLDMVLRIADVKEEDLLLQYDCLALNLHGLRRHTVRLSRKNPSKECF

SEQ ID NO: 141371 - DNA, 987 bp, Artificial Sequence
  derived and/or modified sequence
atggggttctggatcctggctattcttaccatcctgatgtactctacagccgccaagttctctaagcagagctggggcttagagaatgaggcgcttatcgtgcggtgcccacgtcagggcaaaccaagttacacagtagattggtattacagccaaactaataaaagcatccctacccaggagcggaatcgggtctttgcatcagggcagctgcttaagtttctgccagcagccgtggccgacagcggtatctacacttgtattgtgaggtctcccacatttaatcgcacagggtacgccaacgtgaccatctacaagaaacagtccgactgcaacgtacctgactacctgatgtatagcaccgtgtctggaagcgagaagaatagtaagatttattgtcccactatagatctatataattggactgcaccgctggagtggtttaagaactgtcaggctctgcagggctctcgatatcgggctcataagtcgttcctcgtaattgacaatgtaatgacagaagatgccggagattatacatgtaagtttattcacaatgaaaacggagccaattattccgtgactgcaacgcgatcctttactgtgaaagatgagcagggcttttcgttgtttccagttattggcgcccctgcgcagaatgaaataaaagaagtggaaattgggaaaaatgctaacctgacgtgctccgcgtgtttcgggaagggcacccagtttctggcagcagtgttatggcagcttaacggtacgaaaattacagacttcggagagccccggattcagcaggaagaagggcagaatcagagcttttccaacggtctcgcatgccttgacatggtgcttagaatcgccgatgtcaaggaagaggacctgctactccagtatgactgcctggccctaaacctacatggtctccgcaggcacactgtgaggctgagtagaaaaaacccctctaaggagtgtttttag

SEQ ID NO: 141372 - DNA, 780 bp, Artificial Sequence
  derived and/or modified sequence
atgggattctggatcctcgccatactcaccatactcatgtactccacagctgctaagttttcaaaacagagttggggtctggagaatgaagcactgatagtgcgctgcccgcggcagggcaagccttcctataccgtggactggtactactctcagacaaacaaatcaatccccacacaggaaagaaatagggtctttgcctcgggccaacttctgaagttccttcccgccgcggtggccgactcaggcatctacacatgcattgtgcggtccccaaccttcaatagaaccgggtatgccaacgtgacaatctacaaaaagcagtccgactgcaatgtgcctgactatctgatgtactcaacagtttctgggtcagaaaaaaacagtaaaatttattgtccaactatcgacctgtacaactggactgcaccactggagtggtttaaaaattgtcaagctttacaggggagccgttatagggcccacaagagtttcctcgttattgacaacgtgatgacagaggatgccggggactacacttgcaagtttattcataacgagaatggggccaattattccgtaaccgcaacccgtagttttaccgttaaggtttggtgtcaatctttctgtaaacttaagaagtcgctgattttctcaaatacgcactggatccagtctctcatgcgaggttttgtaatggtgtattacggcgtgcacaagtgttgtcgagtggtcttcaatctgtgtttacagtatttccagcaccatcagtggccgtag

SEQ ID NO: 141373 - DNA, 945 bp, Artificial Sequence
  derived and/or modified sequence
atggggttctggattctcgccatcctaactattctcatgtattctactgccgctaaattttctaagcagagttggggtctggaaaatgaggccttaattgtgagatgtccacggcaaggaaaacccagttatacggtggactggtactactctcagacaaacaagagcatacccactcaggaacggaacagggtcttcgctagtggccagctgctgaagtttctgcctgctgctgttgctgactctggtatttacacatgcattgtgcggtcacctactttcaacagaaccgggtacgctaatgtgacaatatataaaaagcagtctgattgcaatgttcctgattatctgatgtattcaacagtttcggggtcagagaaaaacagcaaaatctactgccccaccatagatctctacaattggaccgcaccacttgagtggtttaaaaactgccaggcgctgcagggttcccgttatcgggctcacaagtctttcctcgtcatagataacgtcatgacagaggatgccggtgattacacgtgcaagtttatccataacgagaatggcgctaactacagtgtgaccgctacaaggagctttaccgtaaaagatgaacaggggttttcgctgttcccggttattggagcacccgcccaaaatgagattaaggaggtcgaaatcggcactcagttcctcgccgctgttctctggcagttgaatggcacaaagatcactgatttcggcgaacccagaatccagcaagaggaagggcagaatcagtctttttccaatggtttagcatgtctggacatggtgctgcggatcgccgatgtgaaggaagaagatctgctgctgcagtacgattgcttggcgttgaacttgcatggcctcagaagacatacagtacgtctttctagaaaaaatccatccaaggaatgtttctag

SEQ ID NO: 141374 - DNA, 117 bp, Artificial Sequence
  derived and/or modified sequence
atgggcttttggatcctggctatacttacaatactcatgtacagcacagccgcaaagttttccaagcaatcgtgggggctcgagaatgaagccctgattgtgcgttgcccaaggtag

SEQ ID NO: 141375 - DNA, 3994 bp, Artificial Sequence
  derived and/or modified sequence
gtacatgatgcaccagcatttttgaacaagtcatagatttggccacaaatcaaatttcaggatgggaggagtgtctcccctttaaaatagaagagagtgagtagtctatgaggagggacctacaaagactggaaactattcttagctccgtcactgactccaagttcatcccctctgtctttcagtttggttgagatataggctactcttcccaactcagtcttgaagagtatcaccaactgcctcatgtgtggtgaccttcactgtcgtatgccagtgactcatctggagtaatctcaacaacgagttaccaatacttgctcttgattgataaacagaatggggttttggatcttagcaattctcacaattctcatgtattccacagcagcaaagtttagtaaacaatcatggggcctggaaaatgaggctttaattgtaagatgtcctagacaaggaaaacctagttacaccgtggattggtattactcacaaacaaacaaaagtattcccactcaggaaagaaatcgtgtgtttgcctcaggccaacttctgaagtttctaccagctgcagttgctgattctggtatttatacctgtattgtcagaagtcccacattcaataggactggatatgcgaatgtcaccatatataaaaaacaatcagattgcaatgttccagattatttgatgtattcaacagtatctggatcagaaaaaaattccaaaatttattgtcctaccattgacctctacaactggacagcacctcttgagtggtttaagaattgtcaggctcttcaaggatcaaggtacagggcgcacaagtcatttttggtcattgataatgtgatgactgaggacgcaggtgattacacctgtaaatttatacacaatgaaaatggagccaattatagtgtgacggcgaccaggtccttcacggtcaaggatgagcaaggcttttctctgtttccagtaatcggagcccctgcacaaaatgaaataaaggaagtggaaattggaaaaaacgcaaacctaacttgctctgcttgttttggaaaaggcactcagttcttggctgccgtcctgtggcagcttaatggaacaaaaattacagactttggtgaaccaagaattcaacaagaggaagggcaaaatcaaagtttcagcaatgggctggcttgtctagacatggttttaagaatagctgacgtgaaggaagaggatttattgctgcagtacgactgtctggccctgaatttgcatggcttgagaaggcacaccgtaagactaagtaggaaaaatccaagtaaggagtgtttctgagactttgatcacctgaactttctctagcaagtgtaagcagaatggagtgtggttccaagagatccatcaagacaatgggaatggcctgtgccataaaatgtgcttctcttcttcgggatgttgtttgctgtctgatctttgtagactgttcctgtttgctgggagcttctctgctgcttaaattgttcgtcctcccccactccctcctatcgttggtttgtctagaacactcagctgcttctttggtcatccttgttttctaactttatgaactccctctgtgtcactgtatgtgaaaggaaatgcaccaacaaccgtaaactgaacgtgttcttttgtgctcttttataacttgcattacatgttgtaagcatggtccgttctatacctttttctggtcataatgaacactcattttgttagcgagggtggtaaagtgaacaaaaaggggaagtatcaaactactgccatttcagtgagaaaatcctaggtgctactttataataagacatttgttaggccattcttgcattgatataaagaaatacctgagactgggtgatttatatgaaaagaggtttaattggctcacagttctgcaggctgtatgggaagcatggcggcatctgcttctggggacacctcaggagctttactcatggcagaaggcaaagcaaaggcaggcacttcacacagtaaaagcaggagcgagagagaggtgccacactgaaacagccagatctcatgagaagtcactcactattgcaaggacagcatcaaagagatggtgctaaaccattcatgatgaactcacccccatgatccaatcacctcccaccaggctccacctcgaatactggggattaccattcagcatgagatttgggcaggaacacagacccaaaccataccacacacattatcattgttaaactttgtaaagtatttaaggtacatggaacacacgggaagtctggtagctcagcccatttctttattgcatctgttattcaccatgtaattcaggtaccacgtattccagggagcctttcttggccctcagtttgcagtatacacactttccaagtactcttgtagcatcctgtttgtatcatagcactggtcacattgccttacctaaatctgtttgacagtctgctcaacacgactgcaagctccatgagggcagggacatcatctcttccatctttgggtccttagtgcaatacctggcagctagccagtgctcagctaaatatttgttgactgaataaatgaatgcacaaccaaattattgataccaaatgttttttttgtgtacatttctacttctctagctataagtcttaattatacaacaaaatactatttttatatttatgtttggtaaattcaataactttcctcatcatttggaaagtcaaattgtttattgcttccctacagttttttctgaatctagcaggattttaatgatatcattataatttgacacaataaaaggacaacatgaaactgatgaatctttattgggttaatttcagacactatataatcttttaaaaatgtaacattcttttttatatataaataattggtggcatcacaaatagccaaagcagggtggagagagtgatccttcctgggtgcaggcaagaaggggatatgttttctacagagttttcaaaacagtgataaagctgtctacaagtcattgtgctttttatcatcactatgcccagacaatgtgaaacatcagagatgaagtgctcttcccacagaggtggactgatccttctccccactcccttggtgtgtctctgaatgcaatgttgtcttggaaaacagctttccaagcatttcactcctgagcacttgccagtttcctcacttgttcttcacatatccaggcaaagacatcctgtttgctatatgaagcattgtatcccgtataaaaggaaggaaagagagaaatatatttttacactcatcactcctcaggggctgtacaatcatgtagaaattgtttaatgtgcctgtcaaatagccaaagagtgttaaaccctgagttcccacccatgtgtgtggtatggttaggattcatccagatacacagagagaggcacaacaggaggagaaaggataggggtgtggggacagcgggcccccaatatggtgtaatcgtggcaggtctctgcctgaagtgctatgtggggtttttcttgttttaattttgactttaacccctgatttgtaagtttttcataaaataaacagaatcataactcatgtagatggctataagtgccgtagtgttctgtgggtctctggtgtctgccagtgataagtgtggcaccccaggaaggctgtggaccccatcaaggtgctatgtgagggccatgcttggggtggtggtgggcccagtagaccctgcagccatccatccagcctgcccactcacactgcccttgtgtactcctgctttgctacgttatcattgatcaatgtccctggttacctatgtgtttgaattatcttcgtgttacaggtgtttaatgattttgctccttctagcttatttgtatttcacctgtttttctttaaatcaacatggttacactctgtttcagcaactgtataaattaaacacaaattattactactgcta

SEQ ID NO: 141376 - DNA, 1051 bp, Artificial Sequence
  derived and/or modified sequence
aaagagaggctggctgttgtatttagtaaagctataaagctgtaagagaaattggctttctgagttgtgaaactgtgggcagaaagttgaggaagaaagaactcaagtacaacccaatgaggttgagatataggctactcttcccaactcagtcttgaagagtatcaccaactgcctcatgtgtggtgaccttcactgtcgtatgccagtgactcatctggagtaatctcaacaacgagttaccaatacttgctcttgattgataaacagaatggggttttggatcttagcaattctcacaattctcatgtattccacagcagcaaagtttagtaaacaatcatggggcctggaaaatgaggctttaattgtaagatgtcctagacaaggaaaacctagttacaccgtggattggtattactcacaaacaaacaaaagtattcccactcaggaaagaaatcgtgtgtttgcctcaggccaacttctgaagtttctaccagctgcagttgctgattctggtatttatacctgtattgtcagaagtcccacattcaataggactggatatgcgaatgtcaccatatataaaaaacaatcagattgcaatgttccagattatttgatgtattcaacagtatctggatcagaaaaaaattccaaaatttattgtcctaccattgacctctacaactggacagcacctcttgagtggtttaagaattgtcaggctcttcaaggatcaaggtacagggcgcacaagtcatttttggtcattgataatgtgatgactgaggacgcaggtgattacacctgtaaatttatacacaatgaaaatggagccaattatagtgtgacggcgaccaggtccttcacggtcaaggtttggtgtcagagtttctgcaaattaaaaaagagcttaatctttagtaatactcattggattcaaagtctaatgagaggctttgtgatggtatactatggtgtacataaatgttgtcgagtggtttttaatctttgtttgcaatactttcaacatcatcaatggccttga

SEQ ID NO: 141377 - DNA, 898 bp, Artificial Sequence
  derived and/or modified sequence
gagttgtgaaactgtgggcagaaagttgaggaagaaagaactcaagtacaacccaatgagggccaacttctgaagtttctaccagctgcagttgctgattctggtatttatacctgtattgtcagaagtcccacattcaataggactggatatgcgaatgtcaccatatataaaaaacaatcagattgcaatgttccagattatttgatgtattcaacagtatctggatcagaaaaaaattccaaaatttattgtcctaccattgacctctacaactggacagcacctcttgagtggtttaagaattgtcaggctcttcaaggatcaaggtacagggcgcacaagtcatttttggtcattgataatgtgatgactgaggacgcaggtgattacacctgtaaatttatacacaatgaaaatggagccaattatagtgtgacggcgaccaggtccttcacggtcaaggatgagcaaggcttttctctgtttccagtaatcggagcccctgcacaaaatgaaataaaggaagtggaaattggaaaaaacgcaaacctaacttgctctgcttgttttggaaaaggcactcagttcttggctgccgtcctgtggcagcttaatggaacaaaaattacagactttggtgaaccaagaattcaacaagaggaagggcaaaatcaaagtttcagcaatgggctggcttgtctagacatggttttaagaatagctgacgtgaaggaagaggatttattgctgcagtacgactgtctggccctgaatttgcatggcttgagaaggcacaccgtaagactaagtaggaaaaatccaagtaaggagtgtttctgagactttgatcacctgaactttctctagcaagtgtaagcagaatggagtgtggttc

SEQ ID NO: 141378 - DNA, 2693 bp, Artificial Sequence
  derived and/or modified sequence
aggagggacctacaaagactggaaactattcttagctccgtcactgactccaagttcatcccctctgtctttcagtttggttgagatataggctactcttcccaactcagtcttgaagagtatcaccaactgcctcatgtgtggtgaccttcactgtcgtatgccagtgactcatctggagtaatctcaacaacgagttaccaatacttgctcttgattgataaacagaatggggttttggatcttagcaattctcacaattctcatgtattccacagcagcaaagtttagtaaacaatcatggggcctggaaaatgaggctttaattgtaagatgtcctagacaaggaaaacctagttacaccgtggattggtattactcacaaacaaacaaaagtattcccactcaggaaagaaatcgtgtgtttgcctcaggccaacttctgaagtttctaccagctgcagttgctgattctggtatttatacctgtattgtcagaagtcccacattcaataggactggatatgcgaatgtcaccatatataaaaaacaatcagattgcaatgttccagattatttgatgtattcaacagtatctggatcagaaaaaaattccaaaatttattgtcctaccattgacctctacaactggacagcacctcttgagtggtttaagaattgtcaggctcttcaaggatcaaggtacagggcgcacaagtcatttttggtcattgataatgtgatgactgaggacgcaggtgattacacctgtaaatttatacacaatgaaaatggagccaattatagtgtgacggcgaccaggtccttcacggtcaaggatgagcaaggcttttctctgtttccagtaatcggagcccctgcacaaaatgaaataaaggaagtggaaattggcactcagttcttggctgccgtcctgtggcagcttaatggaacaaaaattacagactttggtgaaccaagaattcaacaagaggaagggcaaaatcaaagtttcagcaatgggctggcttgtctagacatggttttaagaatagctgacgtgaaggaagaggatttattgctgcagtacgactgtctggccctgaatttgcatggcttgagaaggcacaccgtaagactaagtaggaaaaatccaagtaaggagtgtttctgagactttgatcacctgaactttctctagcaagtgtaagcagaatggagtgtggttccaagagatccatcaagacaatgggaatggcctgtgccataaaatgtgcttctcttcttcgggatgttgtttgctgtctgatctttgtagactgttcctgtttgctgggagcttctctgctgcttaaattgttcgtcctcccccactccctcctatcgttggtttgtctagaacactcagctgcttctttggtcatccttgttttctaactttatgaactccctctgtgtcactgtatgtgaaaggaaatgcaccaacaaccgtaaactgaacgtgttcttttgtgctcttttataacttgcattacatgttgtaagcatggtccgttctatacctttttctggtcataatgaacactcattttgttagcgagggtggtaaagtgaacaaaaaggggaagtatcaaactactgccatttcagtgagaaaatcctaggtgctactttataataagacatttgttaggccattcttgcattgatataaagaaatacctgagactgggtgatttatatgaaaagaggtttaattggctcacagttctgcaggctgtatgggaagcatggcggcatctgcttctggggacacctcaggagctttactcatggcagaaggcaaagcaaaggcaggcacttcacacagtaaaagcaggagcgagagagaggtgccacactgaaacagccagatctcatgagaagtcactcactattgcaaggacagcatcaaagagatggtgctaaaccattcatgatgaactcacccccatgatccaatcacctcccaccaggctccacctcgaatactggggattaccattcagcatgagatttgggcaggaacacagacccaaaccataccacacacattatcattgttaaactttgtaaagtatttaaggtacatggaacacacgggaagtctggtagctcagcccatttctttattgcatctgttattcaccatgtaattcaggtaccacgtattccagggagcctttcttggccctcagtttgcagtatacacactttccaagtactcttgtagcatcctgtttgtatcatagcactggtcacattgccttacctaaatctgtttgacagtctgctcaacacgactgcaagctccatgagggcagggacatcatctcttccatctttgggtccttagtgcaatacctggcagctagccagtgctcagctaaatatttgttgactgaataaatgaatgcacaaccaaattattgataccaaatgttttttttgtgtacatttctacttctctagctataagtcttaattatacaacaaaatactatttttatatttatgtttggtaaattcaataactttcctcatcatttggaaagtcaaattgtttattgcttccctacagttttttctgaatctagcaggattttaatgatatcattataatttgacacaataaaaggacaacatgaaactga

SEQ ID NO: 141379 - DNA, 545 bp, Artificial Sequence
  derived and/or modified sequence
gtgaaactgtgggcagaaagttgaggaagaaagaactcaagtacaacccaatgagggcataaggaaatcggaggcatgtttctgtctggctataacagttctcctactagatcctgaggccaaactattcacatgccattgttcctgaataccattgtggacataatcatctaattttggctattccatgcagagatatgctgctgtgactgctgacttgaatgttacgggatccccagcaggatctgggattctctctgttcttgaatgcgttgtttagttgagatataggctactcttcccaactcagtcttgaagagtatcaccaactgcctcatgtgtggtgaccttcactgtcgtatgccagtgactcatctggagtaatctcaacaacgagttaccaatacttgctcttgattgataaacagaatggggttttggatcttagcaattctcacaattctcatgtattccacagcagcaaagtttagtaaacaatcatggggcctggaaaatgaggctttaattgtaagatgtcctagaca

SEQ ID NO: 141380 - DNA, 987 bp, Artificial Sequence
  derived and/or modified sequence
atgggcttctggatcctggccatcctgaccatcctgatgtacagcacagctgccaagttcagcaagcagagctggggcctggagaatgaggccctgattgtgcgctgcccccggcagggcaagcccagctacacagtggactggtactacagccagaccaacaagagcatccccacccaggagaggaacagagtgtttgccagcggccagctgctgaagttcctgcctgctgctgtggccgacagcggcatctacacctgcatcgtgcgcagccccaccttcaacagaacaggctacgccaacgtgaccatctacaagaagcagagcgactgcaatgtgcctgactacctgatgtacagcacagtgtctggcagcgagaagaacagcaagatctactgccccaccatcgacctgtacaactggacagcccccctggagtggttcaagaactgccaggccctgcagggcagccgctaccgggcccacaagagcttcctggtgattgacaacgtgatgacagaagatgctggggactacacctgcaagttcatccacaatgaaaatggagccaactacagcgtgacagccaccaggagcttcaccgtgaaggatgagcagggcttcagcctcttccctgtgattggagccccagcccagaatgagatcaaggaggtggagatcggcaagaatgccaacctgacctgcagcgcctgcttcggcaagggcacccagttcctggccgctgtgctgtggcagctgaatggcaccaagatcacagactttggagagccccgcatccagcaggaggagggccagaaccagagcttcagcaatggcctggcctgcctggacatggtgctgagaattgctgatgtgaaggaggaggacctgctgctgcagtatgactgcctggccctgaacctgcacggcctgcggcggcacacagtgcggctgagcaggaagaaccccagcaaggagtgcttctag

SEQ ID NO: 141381 - DNA, 780 bp, Artificial Sequence
  derived and/or modified sequence
atgggcttctggatcctggccatcctgaccatcctgatgtacagcacagctgccaagttcagcaagcagagctggggcctggagaatgaggccctgattgtgcgctgcccccggcagggcaagcccagctacacagtggactggtactacagccagaccaacaagagcatccccacccaggagaggaacagagtgtttgccagcggccagctgctgaagttcctgcctgctgctgtggccgacagcggcatctacacctgcatcgtgcgcagccccaccttcaacagaacaggctacgccaacgtgaccatctacaagaagcagagcgactgcaatgtgcctgactacctgatgtacagcacagtgtctggcagcgagaagaacagcaagatctactgccccaccatcgacctgtacaactggacagcccccctggagtggttcaagaactgccaggccctgcagggcagccgctaccgggcccacaagagcttcctggtgattgacaacgtgatgacagaagatgctggggactacacctgcaagttcatccacaatgaaaatggagccaactacagcgtgacagccaccaggagcttcaccgtgaaggtgtggtgccagagcttctgcaagctgaagaagagcctcatcttcagcaacacccactggatccagagcctgatgaggggctttgtgatggtgtactacggcgtgcacaagtgctgccgggtggtgttcaacctgtgcctgcagtacttccagcaccaccagtggccctag

SEQ ID NO: 141382 - DNA, 945 bp, Artificial Sequence
  derived and/or modified sequence
atgggcttctggatcctggccatcctgaccatcctgatgtacagcacagctgccaagttcagcaagcagagctggggcctggagaatgaggccctgattgtgcgctgcccccggcagggcaagcccagctacacagtggactggtactacagccagaccaacaagagcatccccacccaggagaggaacagagtgtttgccagcggccagctgctgaagttcctgcctgctgctgtggccgacagcggcatctacacctgcatcgtgcgcagccccaccttcaacagaacaggctacgccaacgtgaccatctacaagaagcagagcgactgcaatgtgcctgactacctgatgtacagcacagtgtctggcagcgagaagaacagcaagatctactgccccaccatcgacctgtacaactggacagcccccctggagtggttcaagaactgccaggccctgcagggcagccgctaccgggcccacaagagcttcctggtgattgacaacgtgatgacagaagatgctggggactacacctgcaagttcatccacaatgaaaatggagccaactacagcgtgacagccaccaggagcttcaccgtgaaggatgagcagggcttcagcctcttccctgtgattggagccccagcccagaatgagatcaaggaggtggagatcggcacccagttcctggccgctgtgctgtggcagctgaatggcaccaagatcacagactttggagagccccgcatccagcaggaggagggccagaaccagagcttcagcaatggcctggcctgcctggacatggtgctgagaattgctgatgtgaaggaggaggacctgctgctgcagtatgactgcctggccctgaacctgcacggcctgcggcggcacacagtgcggctgagcaggaagaaccccagcaaggagtgcttctag

SEQ ID NO: 141383 - DNA, 117 bp, Artificial Sequence
  derived and/or modified sequence
atgggcttctggatcctggccatcctgaccatcctgatgtacagcacagctgccaagttcagcaagcagagctggggcctggagaatgaggccctgattgtgcgctgccccaggtag

SEQ ID NO: 141384 - DNA, 987 bp, Artificial Sequence
  derived and/or modified sequence
atgggcttctggatcctggccatcctgaccatcctgatgtacagcacggccgcgaagttctccaaacagtcatggggactcgaaaatgaagccctgatcgtgcgctgccctaggcagggcaagccatcgtataccgttgactggtactactctcagacaaataagagcatccctactcaggaacgaaacagggtctttgcatcaggacagcttctcaaattcctacctgccgctgtggcagactccggcatttacacatgcatagttagatctcctactttcaatcgaactggttacgcgaatgtaaccatctataaaaagcaaagtgactgtaatgtgcccgactatctaatgtatagcacggtttccggctcagagaaaaactcaaaaatttactgccccactatcgacttgtataactggacagcgcccctagagtggtttaagaactgtcaggcccttcagggctcccgctatcgagctcataagtccttcctggtcatcgacaatgtgatgactgaggacgccggggattacacttgcaagttcattcataatgaaaacggcgctaactattctgtgacagctacccgctcgtttacagtgaaagatgaacaagggttctccctattccccgtcattggcgcccctgcacagaacgaaataaaagaggtggagatcggaaagaacgcaaacttgacctgtagcgcatgctttggcaaagggactcaattcttggctgcagtgctgtggcagctgaatggaactaaaatcaccgactttggggagcctaggatacagcaggaagaaggacagaaccagagtttcagtaacggacttgcttgcttggacatggtgctcaggatcgctgatgttaaggaagaagatcttctcctgcagtacgattgtttggccctgaatctccacggtcttcggaggcacaccgtgagactgtcaaggaaaaacccaagcaaggaatgtttctag

SEQ ID NO: 141385 - DNA, 780 bp, Artificial Sequence
  derived and/or modified sequence
atgggcttctggatcctggccatcctgaccatcctgatgtacagcacagcggcgaaattctctaaacaaagttggggcctcgaaaacgaggctcttattgtccgttgtccgcgtcaaggaaaacctagctacaccgtggattggtactactcacagaccaataaaagtattccaacccaggagcgcaaccgggtgttcgcctccggacagttgctgaaattcctcccggccgcggtcgcagactccggaatctacacatgtattgtccgctcccctacctttaaccggaccggctatgccaacgtgaccatttataagaaacagtctgactgtaatgtgccggattatctgatgtactccacagtatcaggctcagagaaaaactccaagatttactgtcctaccatcgacctttacaattggactgctccactggaatggttcaagaattgtcaggctcttcaggggtcccgctacagagctcacaagagctttttagtgatcgacaacgtcatgactgaggacgcaggcgactatacctgcaaatttatacataacgagaacggagccaactactccgtcaccgccacccgttcatttaccgtgaaagtgtggtgccaatccttctgcaagctaaaaaaatccctcatcttttccaatactcattggatccagagcctcatgaggggcttcgtgatggtgtactacggggtacacaaatgttgccgcgttgtattcaatttatgtctgcagtacttccagcatcaccagtggccctag

SEQ ID NO: 141386 - DNA, 945 bp, Artificial Sequence
  derived and/or modified sequence
atgggcttctggatcctggccatcctgaccatcctgatgtacagcacagctgctaaattttcaaaacagagttgggggttagaaaacgaagcattgatcgtcagatgcccgcgacaggggaaaccttcctatacagttgactggtactactcccaaacgaataaatctatacccacacaggagaggaaccgggtctttgcgagtggacagctgctgaagttcctcccggctgccgtggccgactctggaatctatacatgcatcgtcaggtctcctacattcaatagaactggatatgctaacgtgacgatctacaaaaagcagagtgattgcaatgttcctgattacctgatgtattctacagtgtctggctccgagaagaattcgaaaatttattgtccaaccatagacctctacaattggaccgccccattggaatggtttaagaactgtcaagcccttcagggaagtcggtacagggcacacaaaagcttcctggtaatagacaatgtgatgaccgaagatgccggggattacacctgtaagttcatacataacgaaaacggcgcaaattactccgtgacagcaacaaggtccttcaccgtgaaggatgaacaggggttctccttattcccagtgatcggggcccctgcccaaaatgagatcaaggaggtcgaaataggaacacagtttctggccgctgttttgtggcagttaaatggcacaaagataacagacttcggtgagccacgcattcaacaagaggaggggcaaaatcagtcattctccaacggcctcgcgtgcttggatatggtgttgaggatcgccgatgtgaaggaggaggaccttcttcttcaatatgactgtctggccctgaacctgcatgggctgagacgccacactgtccgcttatccagaaaaaatccgagcaaggaatgtttctag

SEQ ID NO: 141387 - DNA, 117 bp, Artificial Sequence
  derived and/or modified sequence
atgggcttctggatcctggccatcctgaccatcctgatgtacagcactgccgctaaattctcaaagcagagttggggactggagaacgaggcactcattgtaaggtgtcctcgctag

SEQ ID NO: 141388 - DNA, 987 bp, Artificial Sequence
  derived and/or modified sequence
atgggtttttggatcctcgctatattaactattctcatgtactccactgctgccaagttcagcaagcagtcctggggcttggagaatgaagctctcattgtccggtgcccacgacaaggtaaaccttcctataccgtggactggtattatagccagacaaacaaatctatccctactcaagagagaaacagggtgttcgcatcgggccagttgctcaagttcctgccggcagccgtagcagacagtggtatttatacttgcatagtccgcagccctaccttcaatagaaccgggtacgcaaacgtgacgatttacaagaagcagagcgactgcaacgtgccagactacttaatgtattcaactgtgagcggtagcgagaagaactccaagatttactgtccaacaatcgatttatataattggactgccccattggaatggttcaaaaattgccaggcactccagggctcgcggtatagggctcacaaatcgttcttggttattgataacgtaatgactgaagatgccggagattacacctgcaagtttatccacaacgagaatggtgcaaactactccgttaccgccactaggtcattcacggtcaaagacgaacaggggttctctctttttccagtgatcggagctcccgcacagaatgaaatcaaagaggtggaaatcggcaaaaatgccaacctaacatgtagtgcctgctttgggaaagggacgcagttcctagccgcagtgctgtggcagctcaatgggactaaaattaccgatttcggcgagcctaggatccagcaggaggaaggccagaaccaatcattctccaatgggctggcctgccttgacatggttctacgaatagccgacgtcaaggaagaggacttactgctgcagtatgactgtctcgcactgaatctccacggactgagaagacatacagtccggctttcccgcaagaatcctagcaaggaatgtttttag

SEQ ID NO: 141389 - DNA, 780 bp, Artificial Sequence
  derived and/or modified sequence
atgggcttttggatcttagcaatcctgaccatcctcatgtacagcaccgctgccaagttctctaagcagagctggggactcgaaaatgaagctctcatcgtgcggtgtcctagacaaggaaagccctcatatactgtagattggtactattcccagactaacaagtctattcccacccaggaacgaaatagagtgtttgccagcggccaattactgaagttcctccccgctgctgtagccgacagtgggatttatacatgtatcgtaagaagcccaaccttcaacagaacgggctacgccaatgtgaccatttacaagaagcagtctgattgtaatgtgcccgactacctgatgtattcaaccgtgagtggatctgaaaaaaactctaaaatctactgtcccacaattgatttgtataattggacggcccctctcgaatggtttaaaaattgccaggctcttcaggggtcgcgctaccgggctcacaagtcatttttagtgatcgataacgtgatgaccgaggacgctggcgactacacctgcaaatttatccacaatgagaacggggcaaattacagtgtgactgctacaaggtcattcactgtaaaggtctggtgtcagtccttttgcaagctcaaaaagtcactcattttcagcaatactcactggatccaatcccttatgcggggtttcgtaatggtttactacggcgtgcacaaatgttgccgcgtggtctttaatctgtgcctgcagtacttccaacatcaccagtggccctag

SEQ ID NO: 141390 - DNA, 945 bp, Artificial Sequence
  derived and/or modified sequence
atgggtttctggatcctggcgatcctgacaattctgatgtattccaccgcagcaaaattctctaaacagagttggggtttggaaaacgaggcactaatcgttaggtgtcccaggcaggggaagccaagctacacggtggattggtactacagccagaccaataaaagtattcccacacaggagaggaacagggtcttcgcaagtggccagctgctcaagttcctgcctgccgcagtggccgattctgggatctacacatgcatcgttaggtcgcctacctttaaccgcacgggttacgctaacgtaaccatatataagaagcaaagcgactgcaatgtacccgactaccttatgtattccactgtgtctggttctgaaaagaatagtaaaatttattgccctaccatcgacttgtacaattggacagccccactggagtggtttaaaaattgtcaggcattacagggctcacggtacagagcgcataagagcttcctcgtcatcgacaacgtgatgacggaggacgctggagactatacgtgcaagtttattcataatgaaaatggggctaattactcggttacagccacacgtagtttcacagtcaaggacgaacagggctttagtctgtttccagtcatcggggctccggctcaaaacgaaatcaaagaagtggaaatcggtacccagttccttgcagctgtgttgtggcagcttaacgggaccaagattacagacttcggcgagcctagaattcagcaagaggaggggcagaatcagtcattttccaatggactcgcctgccttgacatggtgctgcggatcgcggacgtcaaggaagaggacctcctcctgcagtacgactgtcttgcgctgaacctgcatggcctgaggagacacacagtgagactgtccaggaagaatccatcgaaggagtgcttctag

SEQ ID NO: 141391 - DNA, 117 bp, Artificial Sequence
  derived and/or modified sequence
atgggtttctggatattggccattctgactattctgatgtactccactgccgcaaagtttagcaagcagtcttgggggctggaaaacgaggccctgatcgtgagatgcccacgatag

SEQ ID NO: 141392 - DNA, 987 bp, Artificial Sequence
  derived and/or modified sequence
atgggattctggattctggcaatcctgaccattttaatgtatagcaccgccgccaaattctctaagcagtcgtgggggctggaaaacgaggccctaattgtccggtgccctcgacagggcaagccctcctacactgtagactggtattacagccaaacaaacaagagtatacctacacaggaaagaaacagggtgttcgcgtcgggtcagcttctgaagttccttccagccgccgtggccgattctggcatctacacctgcattgttcgctcaccaacattcaaccgtacaggttacgcaaatgtgacaatctataagaaacaaagtgattgcaacgttcccgattatctgatgtatagcactgtctcaggttccgagaaaaactccaaaatatactgtccgaccattgatctctacaactggaccgccccactggaatggttcaaaaactgtcaggctctgcaaggctcacgttatcgagctcataagtcctttctggtaatcgacaacgttatgacagaagacgccggtgattacacgtgcaagtttatccacaatgagaatggtgctaactactccgtaaccgctacaagatccttcaccgtgaaagatgaacagggcttcagtctgttccccgttatcggtgctcctgcccaaaacgaaataaaggaggttgagattggcaaaaacgccaatttaacctgtagcgcctgcttcggtaaagggacacaattcttagctgccgtgctctggcaactcaatgggactaagattaccgattttggcgaacccagaattcaacaagaggaggggcaaaatcagtctttctctaacggtctggcttgcttggacatggtattacggatcgccgatgtgaaagaggaggatctgttactccagtatgactgccttgcccttaatttgcatggactgagacgtcacacggttaggctgtcccgcaagaacccaagcaaagagtgcttttag

SEQ ID NO: 141393 - DNA, 780 bp, Artificial Sequence
  derived and/or modified sequence
atgggcttttggattttggccatactcacaattcttatgtatagcacggccgccaagttctctaagcaaagctggggattggaaaacgaagctctcattgtccgatgcccacgtcagggcaagccctcttacacagtggactggtattattctcagacaaataagtccatccctacgcaagagcgaaatagagtctttgcctccggtcaacttctaaaattcctgccagctgccgtcgccgatagcggaatatacacatgtattgtcaggagccctacatttaaccgtactgggtatgccaacgtaactatctacaagaagcaatccgactgtaacgtgcctgattatctgatgtattctaccgtttcgggttccgagaagaattcaaagatatactgccctactattgatctgtacaattggacagcacctttggaatggtttaagaactgccaagcactgcaagggtcacgttacagggcccacaagtctttcctggtcattgataacgtaatgactgaagatgccggagactatacctgcaagttcatccataatgagaatggtgcaaactactcagttacagccacccgatcattcactgtgaaagtatggtgtcagtcattttgcaaactcaagaagtccttaattttctctaacactcactggatccagagcctgatgagaggattcgtgatggtatactacggcgtgcacaagtgctgcagggtcgtgtttaacctgtgcctgcaatacttccaacaccatcagtggccgtag

SEQ ID NO: 141394 - DNA, 945 bp, Artificial Sequence
  derived and/or modified sequence
atggggttttggatccttgccatcttgacaattcttatgtatagcaccgctgctaaattcagcaaacagtcatggggtttagagaatgaagcactaattgttagatgccctcggcagggcaaaccttcgtatactgtggattggtattactcccagaccaataaatccatccctactcaagagagaaacagagtgttcgcctctggtcagctccttaaattcctcccagctgcagtggccgattctgggatatatacatgtattgttcgttcaccaactttcaatcgaacaggatacgctaacgtgacaatttataagaaacaatccgactgtaacgtgccggactacctgatgtacagcacggtatctggatcagaaaaaaatagcaagatctattgtccaacaattgacctgtataattggacagccccactcgagtggttcaagaattgtcaagccctgcaggggtctcgatatagggcccacaaatctttcctcgtgatcgataatgtgatgaccgaagacgcgggcgactatacatgtaagtttatccataacgagaatggggctaactatagcgtgacagctacccgatcatttactgtaaaagatgagcaaggcttttctctctttcctgtaatcggggcacccgcacaaaacgagattaaggaggtggaaataggtactcagttcttggcagccgtgttgtggcagctgaatggcacaaaaataacagacttcggagaaccgcgaatccagcaagaggagggccagaatcagagtttttccaatgggttggcgtgcctggacatggtgctacgaatcgccgacgtgaaggaagaggatctcctgttacagtacgactgcctggccctcaatttacacggtctacggaggcatacagtgcgtctgagtcggaagaacccttccaaggaatgcttttag

SEQ ID NO: 141395 - DNA, 117 bp, Artificial Sequence
  derived and/or modified sequence
atgggattttggatactcgccatcttaactattcttatgtattctaccgccgctaaattcagtaagcagtcgtggggactcgaaaacgaagccctcatcgtgagatgccctcgctag

SEQ ID NO: 141396 - DNA, 987 bp, Artificial Sequence
  derived and/or modified sequence
atgggcttctggatcctcgccatcctgactatcctcatgtactcaacagccgcaaaatttagtaagcaaagctggggattggagaatgaggcattgattgtacgctgcccacgacaaggaaaaccctcttacacggtggactggtactattcacagacaaataaatctatccctactcaagagcgcaacagggtgtttgccagtggccagttattgaagtttctgcccgcggccgtggccgattctggtatctacacatgcatcgtgagatccccaacattcaaccgcaccggatacgctaatgtgacaatctataagaaacaaagtgattgcaacgttcccgattatctgatgtatagcactgtctcaggttccgagaaaaactccaaaatatactgtccgaccattgatctctacaactggaccgccccactggaatggttcaaaaactgtcaggctctgcaaggctcacgttatcgagctcataagtcctttctggtaatcgacaacgttatgacagaagacgccggtgattacacgtgcaagtttatccacaatgagaatggtgctaactactccgtaaccgctacaagatccttcacagtaaaagacgaacagggattctcactgtttcctgtcattggcgcacccgcgcaaaatgagatcaaagaagtagaaatcggaaagaacgcaaatctcacctgtagcgcatgcttcggtaaaggcacccagttccttgcagccgttctgtggcagttaaacggcactaagataacagacttcggagaacctagaatacaacaggaagaggggcaaaaccaaagctttagcaacgggctcgcgtgtctcgacatggtgctgcgcattgcagacgtgaaagaggaagatttactgctacagtatgactgcctcgctctaaacttgcacggattgagaaggcacactgtgcgcttatcaaggaagaatcccagcaaagaatgcttttag

SEQ ID NO: 141397 - DNA, 780 bp, Artificial Sequence
  derived and/or modified sequence
atgggcttttggattttggccatactcacaattcttatgtatagcacggccgccaagttctctaagcaaagctggggattggaaaacgaagctctcattgtccgatgcccacgtcagggcaagccctcttacacagtggactggtattattctcagacaaataagtccatccctacgcaagagcgaaatagagtctttgcctccggtcaacttctaaaattcctgccagctgccgtcgccgatagcggaatatacacatgtattgtcaggagccctacatttaaccgtactgggtatgccaacgtcacaatttacaaaaaacagtccgattgcaatgtcccagattaccttatgtactctactgtttcggggagtgaaaaaaactctaaaatttactgtccaaccatagatctgtacaattggacggcgcctctagaatggttcaaaaactgccaagcattacagggatcccgttacagagctcacaagtcctttttggtaattgataatgttatgactgaggacgcaggcgattacacatgcaagttcatacacaacgagaatggagcgaactactccgtgaccgctacccgaagtttcactgtcaaggtatggtgccagagcttttgcaaactaaaaaaatcccttattttttccaatacacactggatccagtcccttatgagaggattcgttatggtgtactacggtgtgcacaaatgttgtagagtagtgtttaacttatgtctccagtatttccagcatcatcaatggccttag

SEQ ID NO: 141398 - DNA, 945 bp, Artificial Sequence
  derived and/or modified sequence
atggggttttggatccttgccatcttgacaattcttatgtatagcaccgctgctaaattcagcaaacagtcatggggtttagagaatgaagcactaattgttagatgccctcggcagggcaaaccttcgtatactgtggattggtattactcccagaccaataaatccatccctactcaagagagaaacagagtgttcgcctctggtcagctccttaaattcctcccagctgcagtggccgattctgggatatatacatgtattgttcgttcaccaactttcaatcgaacaggatacgctaatgtgaccatctataaaaaacagtctgactgcaacgtcccagattatctgatgtattctactgtttcaggaagcgaaaaaaattctaagatttactgcccaacgattgatctttataactggacggcaccgctggagtggttcaagaattgccaggccctgcaaggtagccgatacagagcccacaaatcctttcttgtgatcgacaatgtgatgaccgaagacgctggggactatacgtgcaaattcattcataatgaaaacggggcgaattacagcgttactgctacccgatcttttacagttaaggacgaacagggattcagcctctttcctgtgatcggcgcacctgcccagaacgaaatcaaggaagttgaaattggcacgcagtttctagccgctgttctttggcaattgaacggcacaaagataacagacttcggtgaacctcggatacaacaggaagaaggacaaaaccaatctttctctaatggcctggcttgtttagacatggtgctgcgcatcgccgacgttaaagaagaggatctactccttcaatatgattgcctggcactcaatcttcacgggcttcggcggcataccgtcagactgtcacgtaaaaatccaagcaaagagtgtttttag

SEQ ID NO: 141399 - DNA, 987 bp, Artificial Sequence
  derived and/or modified sequence
atgggcttctggatcctggccatcctgaccatcctgatgtacagcaccgccgccaagttcagcaagcagagctggggcctggagaacgaggccctgatcgtgagatgccccagacagggcaagcccagctacaccgtggactggtactacagccagaccaacaagagcatccccacccaggagagaaacagagtgttcgccagcggccagctgctgaagttcctgcccgccgccgtggccgacagcggcatctacacctgcatcgtgagaagccccaccttcaacagaaccggctacgccaacgtgaccatctacaagaagcagagcgactgcaacgtgcccgactacctgatgtacagcaccgtgagcggcagcgagaagaacagcaagatctactgccccaccatcgacctgtacaactggaccgcccccctggagtggttcaagaactgccaggccctgcagggcagcagatacagagcccacaagagcttcctggtgatcgacaacgtgatgaccgaggacgccggcgactacacctgcaagttcatccacaacgagaacggcgccaactacagcgtgaccgccaccagaagcttcaccgtgaaggacgagcagggcttcagcctgttccccgtgatcggcgcccccgcccagaacgagatcaaggaggtggagatcggcaagaacgccaacctgacctgcagcgcctgcttcggcaagggcacccagttcctggccgccgtgctgtggcagctgaacggcaccaagatcaccgacttcggcgagcccagaatccagcaggaggagggccagaaccagagcttcagcaacggcctggcctgcctggacatggtgctgagaatcgccgacgtgaaggaggaggacctgctgctgcagtacgactgcctggccctgaacctgcacggcctgagaagacacaccgtgagactgagcagaaagaaccccagcaaggagtgcttctag

SEQ ID NO: 141400 - DNA, 780 bp, Artificial Sequence
  derived and/or modified sequence
atgggcttctggatcctggccatcctgaccatcctgatgtacagcaccgccgccaagttcagcaagcagagctggggcctggagaacgaggccctgatcgtgagatgccccagacagggcaagcccagctacaccgtggactggtactacagccagaccaacaagagcatccccacccaggagagaaacagagtgttcgccagcggccagctgctgaagttcctgcccgccgccgtggccgacagcggcatctacacctgcatcgtgagaagccccaccttcaacagaaccggctacgccaacgtgaccatctacaagaagcagagcgactgcaacgtgcccgactacctgatgtacagcaccgtgagcggcagcgagaagaacagcaagatctactgccccaccatcgacctgtacaactggaccgcccccctggagtggttcaagaactgccaggccctgcagggcagcagatacagagcccacaagagcttcctggtgatcgacaacgtgatgaccgaggacgccggcgactacacctgcaagttcatccacaacgagaacggcgccaactacagcgtgaccgccaccagaagcttcaccgtgaaggtgtggtgccagagcttctgcaagctgaagaagagcctgatcttcagcaacacccactggatccagagcctgatgagaggcttcgtgatggtgtactacggcgtgcacaagtgctgcagagtggtgttcaacctgtgcctgcagtacttccagcaccaccagtggccctag

SEQ ID NO: 141401 - DNA, 945 bp, Artificial Sequence
  derived and/or modified sequence
atgggcttctggatcctggccatcctgaccatcctgatgtacagcaccgccgccaagttcagcaagcagagctggggcctggagaacgaggccctgatcgtgagatgccccagacagggcaagcccagctacaccgtggactggtactacagccagaccaacaagagcatccccacccaggagagaaacagagtgttcgccagcggccagctgctgaagttcctgcccgccgccgtggccgacagcggcatctacacctgcatcgtgagaagccccaccttcaacagaaccggctacgccaacgtgaccatctacaagaagcagagcgactgcaacgtgcccgactacctgatgtacagcaccgtgagcggcagcgagaagaacagcaagatctactgccccaccatcgacctgtacaactggaccgcccccctggagtggttcaagaactgccaggccctgcagggcagcagatacagagcccacaagagcttcctggtgatcgacaacgtgatgaccgaggacgccggcgactacacctgcaagttcatccacaacgagaacggcgccaactacagcgtgaccgccaccagaagcttcaccgtgaaggacgagcagggcttcagcctgttccccgtgatcggcgcccccgcccagaacgagatcaaggaggtggagatcggcacccagttcctggccgccgtgctgtggcagctgaacggcaccaagatcaccgacttcggcgagcccagaatccagcaggaggagggccagaaccagagcttcagcaacggcctggcctgcctggacatggtgctgagaatcgccgacgtgaaggaggaggacctgctgctgcagtacgactgcctggccctgaacctgcacggcctgagaagacacaccgtgagactgagcagaaagaaccccagcaaggagtgcttctag

SEQ ID NO: 141402 - DNA, 117 bp, Artificial Sequence
  derived and/or modified sequence
atgggcttctggatcctggccatcctgaccatcctgatgtacagcaccgccgccaagttcagcaagcagagctggggcctggagaacgaggccctgatcgtgagatgccccagatag

SEQ ID NO: 141403 - RNA, 117 nt, Artificial Sequence
  derived and/or modified sequence
augggauuuuggauacucgccaucuuaacuauucuuauguauucuaccgccgcuaaauucaguaagcagucguggggacucgaaaacgaagcccucaucgugagaugcccucgcuag

SEQ ID NO: 141404 - protein, 387 aa, Artificial Sequence
  derived and/or modified sequence
MNVSGCPGAGNASQAGGGGGWHPEAVIVPLLFALIFLVGTVGNTLVLAVLLRGGQAVSTTNLFILNLGVADLCFILCCVPFQATIYTLDGWVFGSLLCKAVHFLIFLTMHASSFTLAAVSLDRYLAIRYPLHSRELRTPRNALAAIGLIWGLSLLFSGPYLSYYRQSQLANLTVCHPAWSAPRRRAMDICTFVFSYLLPVLVLGLTYARTLRYLWRAVDPVAAGSGARRAKRKVTRMILIVAALFCLCWMPHHALILCVWFGQFPLTRATYALRILSHLVSYANSCVNPIVYALVSKHFRKGFRTICAGLLGRAPGRASGRVCAAARGTHSGSVLERESSDLLHMSEAAGALRPCPGASQPCILEPCPGPSWQGPKAGDSILTVDVA

SEQ ID NO: 141405 - DNA, 1364 bp, Artificial Sequence
  derived and/or modified sequence
gagttgcagcggccgcagccccgggagcttcccgctcgcggagacccagacggctgcaggagcccgggcagcctcggggtcagcggcaccatgaacgtctcgggctgcccaggggccgggaacgcgagccaggcgggcggcgggggaggctggcaccccgaggcggtcatcgtgcccctgctcttcgcgctcatcttcctcgtgggcaccgtgggcaacacgctggtgctggcggtgctgctgcgcggcggccaggcggtcagcactaccaacctgttcatccttaacctgggcgtggccgacctgtgtttcatcctgtgctgcgtgcccttccaggccaccatctacaccctggacggctgggtgttcggctcgctgctgtgcaaggcggtgcacttcctcatcttcctcaccatgcacgccagcagcttcacgctggccgccgtctccctggacaggtatctggccatccgctacccgctgcactcccgcgagctgcgcacgcctcgaaacgcgctggcagccatcgggctcatctgggggctgtcgctgctcttctccgggccctacctgagctactaccgccagtcgcagctggccaacctgaccgtgtgccatcccgcgtggagcgcccctcgccgccgcgccatggacatctgcaccttcgtcttcagctacctgcttcctgtgctggttctcggcctgacctacgcgcgcaccttgcgctacctctggcgcgccgtcgacccggtggccgcgggctcgggtgcccggcgcgccaagcgcaaggtgacacgcatgatcctcatcgtggccgcgctcttctgcctctgctggatgccccaccacgcgctcatcctctgcgtgtggttcggccagttcccgctcacgcgcgccacttatgcgcttcgcatcctctcgcacctggtctcctacgccaactcctgcgtcaaccccatcgtttacgcgctggtctccaagcacttccgcaaaggcttccgcacgatctgcgcgggcctgctgggccgtgccccaggccgagcctcgggccgtgtgtgcgctgccgcgcggggcacccacagtggcagcgtgttggagcgcgagtccagcgacctgttgcacatgagcgaggcggcgggggcccttcgtccctgccccggcgcttcccagccatgcatcctcgagccctgtcctggcccgtcctggcagggcccaaaggcaggcgacagcatcctgacggttgatgtggcctgaaagcacttagcgggcgcgctgggatgtcacagagttggagtcattgttgggggaccgtggggagagctttgcctgttaataaaacgcacaaaccatttcacacacagtga

SEQ ID NO: 141406 - DNA, 1164 bp, Artificial Sequence
  derived and/or modified sequence
atgaatgtgtccggctgccctggcgccggtaacgcttcccaggctgggggcggaggagggtggcaccccgaagccgtgattgttcctctgctctttgctttgatcttcctggtgggaacggtcgggaacactctcgtgctggctgtgctgctccgcggaggccaagctgtcagcactactaacctttttattctgaatcttggtgtggctgacctttgcttcattctttgctgtgtcccgtttcaagccaccatttataccctggatgggtgggtatttggtagcctcttgtgcaaggctgtgcacttcctgatcttccttacaatgcacgctagcagttttacactcgctgcagtgtcacttgaccgatatctggctatccggtaccccctgcactcgagggagctgcggaccccccgaaacgccctcgcagccattggtttgatatgggggttgtccctcttgttttccggaccttatctcagttattataggcagtcacagctcgcaaaccttactgtctgccacccagcttggtccgccccgagacgcagggctatggacatatgtaccttcgtcttttcatacctgctccccgtcctggtgctgggcttgacatatgcacgcactttacgatacctctggagggcagtggacccggttgcagccggatcaggggcccgacgtgccaaacgaaaagttacgaggatgattttaatagtggcggccctgttttgcctgtgctggatgccacatcacgcactaatcttgtgcgtctggttcggacagtttccactcacaagggctacgtatgcccttcgaattttgtctcatcttgtgagctacgcgaacagctgcgtgaaccccattgtttacgctctagttagtaagcattttcgaaagggatttcggaccatttgtgctggactgctgggacgagcaccaggcagggccagtgggagagtgtgtgcagctgctagaggcacccattccggctctgtcctggagcgagaatcgtctgatctgctacacatgtctgaagccgctggcgctctgcgcccttgtcctggggcctctcaaccctgcattttagaaccgtgcccaggaccttcatggcaggggcccaaggcaggcgactcaattctaaccgttgatgtggcctag

SEQ ID NO: 141407 - DNA, 1164 bp, Artificial Sequence
  derived and/or modified sequence
atgaatgtgtctggctgccctggagctggaaatgccagccaggccggcggcggcggcggctggcaccctgaggccgtgattgtgcccctgctgtttgccctgatcttcctggtgggcaccgtgggcaacaccctggtgctggccgtgctgctgcggggcggccaggccgtgtccaccaccaacctcttcatcctgaacctgggcgtggccgacctgtgcttcatcctgtgctgcgtgcccttccaggccaccatctacaccctggatggctgggtgtttggcagcctgctgtgcaaggctgtgcacttcctgatcttcctgaccatgcacgccagcagcttcaccctggccgctgtgtccctggaccgctacctggccatccgctaccccctgcacagccgggagctgcggaccccaagaaatgccctggccgccatcggcctcatctggggcctgagcctgctcttcagcggcccctacctgagctactaccggcagagccagctggccaacctgactgtgtgccacccagcctggagcgccccccggcggcgggccatggacatctgcacctttgtgttctcctacctgctgcctgtgctggtgctgggcctgacctacgcccggaccctgcgctacctgtggagggctgtggaccctgtggccgccggcagcggggcccggcgggccaagaggaaggtgaccaggatgatcctgattgtggccgccctcttctgcctgtgctggatgccccaccacgccctgatcctgtgtgtgtggtttggccagttccccctgacccgggccacctacgccctgcgcatcctgagccacctggtgtcctatgccaacagctgtgtgaaccccatcgtgtatgccctggtgtccaagcacttcaggaagggcttccgcaccatctgtgccggcctgctgggccgggcccctggccgggccagcggccgggtgtgtgccgccgcccggggcacccacagcggctctgtgctggagcgggagagcagtgacctgctgcacatgtctgaggccgccggggccctgcggccctgccctggggccagccagccctgcatcctggagccctgccccggccccagctggcagggccccaaggccggggacagcatcctgactgtggatgtggcctag

SEQ ID NO: 141408 - DNA, 1164 bp, Artificial Sequence
  derived and/or modified sequence
atgaacgtgagcggctgccccggcgccggcaacgccagccaggccggggggggaggaggctggcaccctgaggccgtgatcgtgcccctgttatttgcgctaatttttctcgtcggtaccgtaggcaatactctggtcctggccgtattgttgaggggcggacaggccgtgtcaactacaaacttgttcatactgaacctcggcgtggccgatctgtgtttcattctgtgctgtgtaccttttcaggccacaatctataccctggatggatgggtgtttggatccctgctgtgcaaagcagtccattttctcatcttcctgacaatgcatgcttcgagcttcaccctggccgcggtatcactagatcgttatctggccattcgctatcccctgcactctcgcgaacttcgcacaccccgaaacgcgcttgcggcaatagggctaatttggggtttgagcctcctttttagtggcccatacctgagttactatcggcagtcccaactggctaaccttacagtctgtcaccctgcttggtcggccccacgtagaagagccatggatatttgtaccttcgtgttcagctatctcttgcctgtgttggtcctcgggctgacctacgccagaacactcaggtatctctggagagccgttgacccagtagccgcggggtctggagctcgacgagccaagcgcaaagttacacgcatgatcctgatcgttgctgctctattttgtctgtgttggatgcctcatcatgccctgattctttgcgtctggttcggtcagtttccattaactagagctacttacgccctgaggatcctgtcccatctggttagttatgccaatagttgcgtaaacccaattgtttacgcactcgtttccaaacacttcagaaagggatttagaaccatttgcgccgggctacttggaagagctccggggcgggcaagtgggagagtctgcgccgcagccagggggacgcacagcggtagtgtactggagcgagagagcagcgacctcttacatatgtccgaagccgcaggcgctcttaggccgtgccctggggccagccaaccctgtattctggaaccttgcccggggccatcttggcagggtcccaaggcaggcgactcgattcttaccgtggacgtcgcttag

SEQ ID NO: 141409 - DNA, 1164 bp, Artificial Sequence
  derived and/or modified sequence
atgaatgtgtctggctgcccaggcgctggcaatgcttcccaggcaggaggcggaggcggatggcatcctgaggcagtgattgtacctctgctgttcgccctcatcttcttggtggggactgtggggaacaccctcgttttggccgtcctgttgcggggaggccaagcggttagtaccacgaatttatttattctgaacctaggagtggcagacctgtgctttattttgtgctgcgttccattccaagctacaatttacaccctggacggctgggtgttcgggtcactgctatgtaaagcggtgcactttcttatattcctgaccatgcacgccagtagctttacactggctgccgttagcctcgacagatatttagcaattaggtacccgctccattctagggaactcagaacaccacgcaacgctttggccgctatcgggctgatctggggactgagcctgctcttctctgggccatacctgtcttattatcggcagtctcaattggccaacctgaccgtgtgtcatcccgcttggtcagcccctcggaggcgcgctatggatatctgcaccttcgtattctcgtatctgcttcctgtgctggtgctggggctgacctacgccaggacgctgcgctatctctggcgcgctgtcgacccagtagctgcaggcagcggagcacggagagccaaaaggaaggtgaccaggatgatcctcatagtcgccgcactcttctgcctgtgttggatgccccaccacgccctgatactgtgtgtgtggtttggccagtttcctcttacgagggcaacctacgcccttcgtattctgagccatcttgtcagctatgccaattcgtgtgtgaaccctatcgtatacgctttggtgagtaaacattttcgcaaaggtttcaggaccatttgcgcagggctgctgggaagggcaccaggcagggcttctggtagagtgtgcgccgctgcgcgtggcacgcacagcggatctgtgctcgagcgcgagtccagcgatcttctgcatatgtctgaagccgctggcgctttacggccatgccccggagcatcccagccctgcatcttggaaccatgcccaggtccctcgtggcaagggccaaaagccggagatagcatcctgacagtcgatgttgcttag

SEQ ID NO: 141410 - DNA, 1164 bp, Artificial Sequence
  derived and/or modified sequence
atgaacgtgagcggctgccccggcgccggcaacgccagccaggccggcggcggcggcggctggcaccccgaggccgtgatcgtgcccctgctgttcgccctgatcttcctggtgggcaccgtgggcaacaccctggtgctggccgtgctgctgagaggcggccaggccgtgagcaccaccaacctgttcatcctgaacctgggcgtggccgacctgtgcttcatcctgtgctgcgtgcccttccaggccaccatctacaccctggacggctgggtgttcggcagcctgctgtgcaaggccgtgcacttcctgatcttcctgaccatgcacgccagcagcttcaccctggccgccgtgagcctggacagatacctggccatcagataccccctgcacagcagagagctgagaacccccagaaacgccctggccgccatcggcctgatctggggcctgagcctgctgttcagcggcccctacctgagctactacagacagagccagctggccaacctgaccgtgtgccaccccgcctggagcgcccccagaagaagagccatggacatctgcaccttcgtgttcagctacctgctgcccgtgctggtgctgggcctgacctacgccagaaccctgagatacctgtggagagccgtggaccccgtggccgccggcagcggcgccagaagagccaagagaaaggtgaccagaatgatcctgatcgtggccgccctgttctgcctgtgctggatgccccaccacgccctgatcctgtgcgtgtggttcggccagttccccctgaccagagccacctacgccctgagaatcctgagccacctggtgagctacgccaacagctgcgtgaaccccatcgtgtacgccctggtgagcaagcacttcagaaagggcttcagaaccatctgcgccggcctgctgggcagagcccccggcagagccagcggcagagtgtgcgccgccgccagaggcacccacagcggcagcgtgctggagagagagagcagcgacctgctgcacatgagcgaggccgccggcgccctgagaccctgccccggcgccagccagccctgcatcctggagccctgccccggccccagctggcagggccccaaggccggcgacagcatcctgaccgtggacgtggcctag

SEQ ID NO: 141411 - protein, 260 aa, Artificial Sequence
  derived and/or modified sequence
MASLEVSRSPRRSRRELEVRSPRQNKYSVLLPTYNERENLPLIVWLLVKSFSESGINYEIIIIDDGSPDGTRDVAEQLEKIYGSDRILLRPREKKLGLGTAYIHGMKHATGNYIIIMDADLSHHPKFIPEFIRKQKEGNFDIVSGTRYKGNGGVYGWDLKRKIISRGANFLTQILLRPGASDLTGSFRLYRKEVLEKLIEKCVSKGYVFQMEMIVRARQLNYTIGEVPISFVDRVYGESKLGGNEIVSFLKGLLTLFATT

SEQ ID NO: 141412 - DNA, 783 bp, Artificial Sequence
  derived and/or modified sequence
atggccagcctggaggtgagcagaagccccagaagaagcagaagagagctggaggtgagaagccccagacagaacaagtacagcgtgctgctgcccacctacaacgagagagagaacctgcccctgatcgtgtggctgctggtgaagagcttcagcgagagcggcatcaactacgagatcatcatcatcgacgacggcagccccgacggcaccagagacgtggccgagcagctggagaagatctacggcagcgacagaatcctgctgagacccagagagaagaagctgggcctgggcaccgcctacatccacggcatgaagcacgccaccggcaactacatcatcatcatggacgccgacctgagccaccaccccaagttcatccccgagttcatcagaaagcagaaggagggcaacttcgacatcgtgagcggcaccagatacaagggcaacggcggcgtgtacggctgggacctgaagagaaagatcatcagcagaggcgccaacttcctgacccagatcctgctgagacccggcgccagcgacctgaccggcagcttcagactgtacagaaaggaggtgctggagaagctgatcgagaagtgcgtgagcaagggctacgtgttccagatggagatgatcgtgagagccagacagctgaactacaccatcggcgaggtgcccatcagcttcgtggacagagtgtacggcgagagcaagctgggcggcaacgagatcgtgagcttcctgaagggcctgctgaccctgttcgccaccacctag

SEQ ID NO: 141413 - DNA, 1075 bp, Artificial Sequence
  derived and/or modified sequence
gcttccggcatctggctcagttccgccatggcctccttggaagtcagtcgtagtcctcgcaggtctcggcgggagctggaagtgcgcagtccacgacagaacaaatattcggtgcttttacctacctacaacgagcgcgagaacctgccgctcatcgtgtggctgctggtgaaaagcttctccgagagtggaatcaactatgaaattataatcatagatgatggaagcccagatggaacaagggatgttgctgaacagttggagaagatctatgggtcagacagaattcttctaagaccacgagagaaaaagttgggactaggaactgcatatattcatggaatgaaacatgccacaggaaactacatcattattatggatgctgatctctcacaccatccaaaatttattcctgaatttattaggaagcaaaaggagggtaattttgatattgtctctggaactcgctacaaaggaaatggaggtgtatatggctgggatttgaaaagaaaaataatcagccgtggggccaattttttaactcagatcttgctgagaccaggagcatctgatttaacaggaagtttcagattataccgaaaagaagttctagagaaattaatagaaaaatgtgtttctaaaggctacgtcttccagatggagatgattgttcgggcaagacagttgaattatactattggcgaggttccaatatcatttgtggatcgtgtttatggtgaatccaagttgggaggaaatgaaatagtatctttcttgaaaggattattgactctttttgctactacataaaagaaagatactcatttatagttacgttcatttcaggttaaacatgaaagaagcctggttactgatttgtataaaatgtactcttaaagtataaaatataaggtaaggtaaatttcatgcatctttttatgaagaccacctattttatatttcaaattaaataattttaaagttgctggcctaatgagcaatgttctcaattttcgttttcattttgctgtattgagacctataaataaatgtatatttttttttgcataaagta

SEQ ID NO: 141414 - DNA, 783 bp, Artificial Sequence
  derived and/or modified sequence
atggctagcttggaagttagccgcagccctaggcgcagcagacgcgaactggaggtaagatcaccacggcagaataagtattccgttttactcccgacttataacgaacgcgaaaatttaccgttgatagtgtggcttcttgtgaaaagcttcagtgagagtggcattaattacgaaattatcatcatcgatgacggctctcccgatggaactcgggacgtagcagaacagttggaaaaaatttatgggtctgatcgtatcctgctgcggcctcgggaaaagaaactcgggttgggtaccgcctacatccacggcatgaagcacgctactggtaactatatcattatcatggatgcggacctctcacaccacccaaagtttatccctgaatttattagaaaacagaaggaaggcaactttgatattgtctctgggactaggtataagggcaatggaggagtctacgggtgggaccttaagcgaaagattattagtcggggtgctaatttcctgacacagatcctgctccggcccggtgccagtgacttaaccggctcatttcgcctgtacagaaaggaagtgctggagaagttgattgaaaaatgtgtgtccaaaggatacgtatttcaaatggagatgatcgtaagagcaagacagctgaattacacaataggggaagtaccaatatcattcgtcgatagagtgtacggggagagtaaactcggtggcaacgagattgtgtcctttcttaagggactgcttacgctattcgccaccacttag

SEQ ID NO: 141415 - DNA, 783 bp, Artificial Sequence
  derived and/or modified sequence
atggccagcctggaggtgagccgcagccccaggaggagccggcgggagctggaggtgcgcagcccccggcagaacaagtacagcgtgctgctgcccacctacaatgaaagagagaacctgcccctgattgtgtggctgctggtgaagagcttcagcgagagcggcatcaactatgagatcatcatcattgatgatggcagcccagatggcaccagagatgtggccgagcagctggagaagatctacggcagtgaccgcatcctgctgcggccccgggagaagaagctgggcctgggcacagcctacatccacggcatgaagcacgccaccggcaactacatcatcatcatggatgctgacctgagccaccaccccaagttcatccctgagttcatcaggaagcagaaggagggcaactttgacatcgtgtctggcacccgctacaagggaaatggaggagtgtatggctgggacctgaagaggaagatcatcagcagaggagccaacttcctgacccagatcctgctgcggcctggggccagtgacctgaccggcagcttccggctgtacaggaaggaggtgctggagaagctgattgaaaaatgtgtgtccaagggctacgtgttccagatggagatgattgtgcgggcccggcagctgaactacaccatcggggaggtgcccatcagctttgtggacagagtgtatggagagagcaagctgggcggcaatgagatcgtgtccttcctgaagggcctgctgaccctgtttgccaccacctag

SEQ ID NO: 141416 - DNA, 783 bp, Artificial Sequence
  derived and/or modified sequence
atggccagcctggaggtgagccggagcccccggcggagccggcgggaactggaagtgaggtcccccaggcaaaataagtactccgtactcctacccacttataatgagcgagaaaacttgccactcattgtatggctgctagtaaagtcattttccgagtctggcatcaactacgagatcattatcatcgacgacgggtcccctgatgggactcgcgatgtcgccgaacagctcgaaaaaatctacggcagcgatcgtattcttttaaggccccgggagaagaaactcgggcttggtacagcttatatccatggaatgaaacacgccacggggaactacatcatcatcatggacgctgacctgagccaccaccctaaatttattccagaattcatcagaaagcaaaaggaaggcaatttcgatatcgtgtctggaacccgttataaaggtaatggtggcgtgtacggatgggacctcaaaagaaaaataatctccagaggggccaattttttgacacagatcttgctgcgcccaggtgccagcgacttgaccgggtcatttcgcttgtatcggaaggaggtgttagagaagctaatcgaaaagtgtgtatccaaggggtatgtattccagatggaaatgatcgtccgcgcaagacagctcaactatactatcggcgaggtgcccatatcattcgttgaccgggtgtatggggagagcaaattgggcggcaacgaaattgtctcattcctgaagggccttttaactttgttcgcgaccacttag

SEQ ID NO: 141417 - DNA, 783 bp, Artificial Sequence
  derived and/or modified sequence
atggcctcactggaggtctcccggtcaccaagacggtcccggagagaactcgaagttcggagtcctaggcagaacaagtattccgtgcttttgcccacatacaacgaacgagaaaacttgcccctgattgtatggttgcttgtgaagagcttcagtgagtcagggataaattacgaaataatcattattgatgacgggtcccctgatgggacccgcgacgtcgccgagcaactggagaaaatttatggatcagatagaatcctgttacgcccaagagagaaaaagttgggcctggggaccgcctacatacatgggatgaaacatgccacaggaaattacattatcataatggatgccgacctttctcaccatcctaaatttattcccgaatttatccgaaagcaaaaagaaggaaacttcgacattgtatctggaacgcgctataagggcaacggtggtgtttacggatgggatctgaaaagaaagatcataagccgcggagccaacttcctgacccaaattctgctgagacctggagcttctgacttgaccggcagcttccgtttataccggaaggaagtgctggagaagctgatcgaaaaatgtgtttctaagggatacgtgtttcagatggagatgattgtgcgcgcacggcagctgaattacaccatcggggaagtgccaatctcttttgtagaccgggtatacggggagtcaaaattgggaggaaacgagatcgtcagctttctgaaaggattgctcacgctgttcgccacaacttag

SEQ ID NO: 141418 - protein, 942 aa, Artificial Sequence
  derived and/or modified sequence
MKRRAGLGGSMRSVVGFLSQRGLHGDPLLTQDFQRRRLRGCRNLYKKDLLGHFGCVNAIEFSNNGGQWLVSGGDDRRVLLWHMEQAIHSRVKPIQLKGEHHSNIFCLAFNSGNTKVFSGGNDEQVILHDVESSETLDVFAHEDAVYGLSVSPVNDNIFASSSDDGRVLIWDIRESPHGEPFCLANYPSAFHSVMFNPVEPRLLATANSKEGVGLWDIRKPQSSLLRYGGNLSLQSAMSVRFNSNGTQLLALRRRLPPVLYDIHSRLPVFQFDNQGYFNSCTMKSCCFAGDRDQYILSGSDDFNLYMWRIPADPEAGGIGRVVNGAFMVLKGHRSIVNQVRFNPHTYMICSSGVEKIIKIWSPYKQPGCTGDLDGRIEDDSRCLYTHEEYISLVLNSGSGLSHDYANQSVQEDPRMMAFFDSLVRREIEGWSSDSDSDLSESTILQLHAGVSERSGYTDSESSASLPRSPPPTVDESADNAFHLGPLRVTTTNTVASTPPTPTCEDAASRQQRLSALRRYQDKRLLALSNESDSEENVCEVELDTDLFPRPRSPSPEDESSSSSSSSSSEDEEELNERRASTWQRNAMRRRQKTTREDKPSAPIKPTNTYIGEDNYDYPQIKVDDLSSSPTSSPERSTSTLEIQPSRASPTSDIESVERKIYKAYKWLRYSYISYSNNKDGETSLVTGEADEGRAGTSHKDNPAPSSSKEACLNIAMAQRNQDLPPEGCSKDTFKEETPRTPSNGPGHEHSSHAWAEVPEGTSQDTGNSGSVEHPFETKKLNGKALSSRAEEPPSPPVPKASGSTLNSGSGNCPRTQSDDSEERSLETICANHNNGRLHPRPPHPHNNGQNLGELEVVAYSSPGHSDTDRDNSSLTGTLLHKDCCGSEMACETPNAGTREDPTDTPATDSSRAVHGHSGLKRQRIELEDTDSENSSSEKKLKT

SEQ ID NO: 141419 - DNA, 2829 bp, Artificial Sequence
  derived and/or modified sequence
atgaagcgccgcgccgggctgggaggctcaatgcgtagtgtggtggggtttcttagccagagaggacttcatggcgaccctctccttacccaggactttcaacggaggcgcctgagggggtgccgaaatctgtacaaaaaagacctgctgggacactttggatgtgtgaatgcaatagagttcagtaacaatggaggccagtggttagtgtccggtggggacgaccgccgagtgctgctgtggcacatggaacaggcaattcattcacgggtgaagccaatccagctgaaaggggagcatcatagcaacattttctgtctagcgtttaattcaggcaacactaaggttttctcgggtggtaatgacgagcaagtgatccttcacgacgtcgagagctctgagaccctggacgtgttcgctcacgaagacgcagtttatggtctgtccgtctctcccgttaacgacaatatcttcgcgtcctcctctgatgacgggagagtgctgatctgggacatccgcgaatcgccacacggtgagccattttgcctcgcaaactacccttcagccttccactctgtcatgtttaacccagtcgaaccaagactgctggccacagcaaatagcaaggagggagtgggattgtgggacatcaggaagcctcaatcgagtctcctccgctacggcggcaacctgtctttgcagtctgcaatgagcgtgaggttcaacagtaatggcacacagttgctggcactgaggcggaggctgcctcccgtcctgtacgatattcactcccgccttcctgtgttccagtttgacaatcagggctactttaatagctgtacgatgaagtcatgttgctttgcaggtgaccgagaccaatatatcctgagtggtagcgacgacttcaatctttacatgtggcggatacctgccgatccagaagcagggggaattgggcgcgtggtgaacggagccttcatggtgctgaaaggtcacaggtctatcgttaaccaggtccgctttaacccacatacctacatgatctgttccagcggagtagaaaaaatcataaagatctggtcgccgtataaacagcctgggtgcacgggagatttggacgggcgtattgaggacgattcgcgctgtctctatacccatgaagagtatatatccctggtgctcaattctggaagcggtctttcccatgactatgccaatcagagcgttcaggaggaccctcggatgatggccttctttgatagcttggtcaggagagagatagaagggtggtcaagcgactctgacagtgatctttcggaaagcacaattttacagcttcatgctggagtgtccgagagatcaggctacacagacagtgagagctctgcatcccttccccgctcccctccaccaacagtggacgaaagcgcagacaatgccttccatttgggtcctctgagggtaacaaccaccaatactgtcgcttcgaccccacctacgcccacctgtgaagatgccgcctcccgtcaacagcgcttgagcgctctgcgtcgctatcaggacaaacggctcctggcattgtctaatgaatcagatagcgaagaaaacgtctgtgaggttgagctcgatactgatctctttccaaggcctcgctccccatcacctgaggacgagtctagctcttcatctagcagcagctcaagcgaggatgaggaagagttgaatgaacgacgggccagtacatggcaacgcaatgccatgcgtaggaggcagaaaacaactcgtgaggacaaaccctcggctcctataaagccaactaatacatatattggggaagacaattacgattatccccagattaaggtggacgacctgtccagttctccaacctcctcccctgagcggtcaacaagcaccttggaaattcagccaagcagggcctcccccacctccgacatagagtcagttgagcggaagatttacaaggcctacaaatggttgcggtattcatatataagctattcaaacaataaggatggcgaaaccagtctcgttaccggggaagctgacgaagggcgcgctggaacgtcgcacaaggataaccctgccccaagttcgagtaaggaggcctgcttgaatatcgctatggcgcagagaaaccaggatctgcctcccgaaggctgcagtaaggacacatttaaagaggagaccccgcggactccatccaacggcccagggcatgagcacagctctcatgcctgggctgaggttcctgaaggcacatctcaggacactgggaattctggtagcgtagaacacccttttgagaccaagaaactgaacgggaaagcgctctcatcccgcgcagaggagccccccagtccgcctgtcccaaaggcttctggatccaccctgaacagcggttctggtaattgtccccggactcagtccgatgactcagaggagaggtcactggagaccatctgtgcaaatcataataatggaagattgcatccccgccctccccatcctcacaataacggccagaatctcggcgagttggaagttgtagcatactcgtcccctgggcacagcgacaccgaccgagacaattcatcccttaccgggactttgttgcacaaagactgctgcggatccgagatggcctgcgaaacccctaatgccggtactcgcgaggacccaacagatacgcctgctactgattcaagcagggccgtgcacggacactctggcctgaagcgtcagagaatagagctggaggacacagattccgaaaactcgagctcagaaaagaagctcaagacgtag

SEQ ID NO: 141420 - DNA, 2829 bp, Artificial Sequence
  derived and/or modified sequence
atgaagagaagagctggcctgggcggctccatgaggtctgtggtgggcttcctgagccagaggggcctgcacggggaccccctgctgacccaggacttccagaggcggcggctgcggggctgcaggaacctgtacaagaaggacctgctgggccacttcggctgtgtgaatgccatcgagttcagcaacaacggcggccagtggctggtgtctggaggagatgaccggcgggtgctgctgtggcacatggagcaggccatccacagccgggtgaagcccatccagctgaagggggagcaccacagcaacatcttctgcctggccttcaacagcggcaacaccaaggtgttcagcggcggcaatgatgagcaggtgatcctgcatgatgtggagagcagcgagaccctggatgtgtttgcccatgaagatgctgtgtatggcctgtctgtgtcccctgtgaatgacaacatctttgccagcagcagtgatgatggccgggtgctgatctgggacatccgggagagcccccatggagagcccttctgcctggccaactaccccagcgccttccacagcgtgatgttcaaccctgtggagccccggctgctggccacagccaacagcaaggagggcgtgggcctgtgggacatcaggaagccccagagcagcctgctgcgctatggaggcaacctgagcctgcagagcgccatgtctgtgcgcttcaacagcaatggcacccagctgctggccctgcggcggcggctgccccctgtgctgtatgacatccacagccggctgcctgtgttccagtttgacaaccagggctacttcaacagctgcaccatgaagagctgctgctttgctggggaccgggaccagtacatcctgagcggcagtgatgacttcaacctgtacatgtggaggatcccagctgaccctgaggccggcggcatcggccgggtggtgaatggagccttcatggtgctgaagggccacaggagcatcgtgaaccaggtgcgcttcaacccccacacctacatgatctgcagcagtggagtggagaagatcatcaagatctggagcccctacaagcagcccggctgcacaggagacctggatggaagaattgaagatgacagccgctgcctgtacacccatgaggagtacatcagcctggtgctgaacagcggcagcggcctgagccatgactatgccaaccagagcgtgcaggaggaccccaggatgatggccttctttgacagcctggtgcggcgggagattgagggctggagcagtgacagcgacagcgacctgtctgagagcaccatcctgcagctgcacgccggcgtgtctgagaggagcggctacacagattctgagagcagcgccagcctgcccaggagccccccacccaccgtggatgagagcgctgacaatgccttccacctgggccccctgcgggtgaccaccaccaacacagtggccagcaccccacccacccccacctgtgaagatgctgccagccggcagcagaggctgagcgccctgcggcgctaccaggacaagaggctgctggccctgagcaatgaaagtgacagtgaagaaaatgtgtgtgaggtggagctggacacagacctcttcccccggcccaggagccccagcccagaagatgagagcagcagcagcagcagcagcagcagcagtgaagatgaggaggagctgaatgaaagaagagccagcacctggcagagaaatgccatgagaagacggcagaagaccacccgggaggacaagcccagcgcccccatcaagcccaccaacacctacatcggggaggacaactatgactacccccagatcaaggtggatgacctgagcagcagccccaccagcagccctgagaggagcaccagcaccctggagatccagcccagccgggccagccccaccagtgacattgaatctgtggagaggaagatctacaaggcctacaagtggctgcgctacagctacatctcctacagcaacaacaaggatggagagaccagcctggtgactggagaggctgatgagggccgggccggcaccagccacaaggacaacccagcccccagcagcagcaaggaggcctgcctgaacatcgccatggcccagaggaaccaggacctgcccccagagggctgcagcaaggacaccttcaaggaggagacccccaggacccccagcaatggacctggccacgagcacagcagccacgcctgggccgaggtgcctgagggcaccagccaggacaccggcaacagcggctctgtggagcacccctttgagaccaagaagctgaatggcaaggccctgagcagcagagctgaggagccccccagcccccctgtgcccaaggccagcggcagcaccctgaacagcggcagcggcaactgccccaggacccagagtgatgacagcgaggagaggagcctggagaccatctgtgccaaccacaacaacggccgcctgcaccccaggcctccccacccccacaacaacggccagaacctgggggagctggaggtggtggcctacagcagccctggccacagcgacacagaccgggacaacagcagcctgaccggcaccctgctgcacaaggactgctgcggcagcgagatggcctgtgagaccccaaatgccggcacccgggaggaccccacagacaccccagccacagacagcagcagagctgtgcacggccacagcggcctgaagaggcagagaattgagctggaggacacagattctgagaacagcagcagcgagaagaagctgaagacctag

SEQ ID NO: 141421 - DNA, 2829 bp, Artificial Sequence
  derived and/or modified sequence
atgaagcggcgggccggcctgggcggcagcatgcggagcgtggtgggttttttgtcccagaggggcctgcatggtgatccgctgctcacacaggattttcagcggagacggctgcgaggttgtaggaatctgtataaaaaggacctgctgggacatttcggatgcgtgaacgccattgagtttagtaacaatggcggccaatggctggtcagcggcggggacgatagacgtgtcctgctatggcatatggagcaggcaatacacagccgcgtcaagcccattcagttgaagggagaacatcattccaacatcttctgtttggcatttaactccggtaatactaaggtcttttctgggggaaatgatgagcaggtcatcttacacgatgtggagtctagcgagaccctcgatgtgtttgcgcacgaagatgcggtgtatggcctatctgtgagtcctgtcaatgataacatctttgccagtagtagtgacgacggtcgtgtgctgatatgggacatcagggagagtccacacggggaacctttctgcctggccaattacccaagcgcctttcactcagtcatgttcaaccctgttgaaccacggctgcttgcaacagccaacagcaaagagggcgtcggactgtgggatatccgcaagccccagagttctctgctgagatatggcggcaatcttagtcttcagagcgctatgagcgttaggttcaactcgaatggcacacaactactcgcactgcggcggcgcttgccgcccgtgttgtacgatatccattcgcggcttcctgtgtttcagtttgataatcagggttattttaactcctgtactatgaaaagctgctgtttcgccggcgatagagatcagtacattcttagcgggagcgacgactttaatctgtatatgtggcggattcccgccgacccagaagcaggtgggattggcagggtggtcaacggagctttcatggtcctcaaagggcataggagcatcgtaaaccaggtgcggttcaatcctcacacttacatgatctgttcaagtggagttgagaagattatcaagatctggtcaccttataagcagcccggctgtacaggtgatcttgatggcaggatcgaagacgactcacggtgtctttacacccacgaagaatacatttctcttgtgctcaattctgggtctggactctcccacgattacgcaaatcaatccgtgcaagaggaccccagaatgatggccttctttgactctctggtgagaagagaaatcgaaggatggtccagcgattccgacagtgatctgtccgaatcaacgattctccaacttcacgctggggtttccgagagatctggctataccgactctgaatcctctgccagcctgccacgttcccctccacccactgttgacgaatctgctgacaacgcttttcacctgggcccactgcgcgtcaccacaacgaacacagttgccagcacccctcccacgccgacgtgcgaagacgccgcttccagacaacagcgactgtctgcattgaggcggtatcaagacaaaagactgctggccctatctaatgagtccgactctgaggaaaatgtatgtgaggtagagttagatacagacctatttcctcgtcccaggtctcccagtcctgaagacgaatcttcctcatcaagcagctcgtcctcctctgaggacgaagaagaactcaatgagcgacgggcttccacgtggcagcgcaacgccatgcggcgcagacagaagacaacgcgcgaggacaagccctccgcacccattaaaccaactaacacttacattggggaagacaactacgactacccacagattaaagtggatgatctgtctagctccccaacttcttcacccgagcggagtacttcaactttagagatccaacctagccgcgccagcccaacatcagacatcgagtctgtagagagaaaaatttacaaagcatataagtggcttcggtattcctacattagctactcgaataataaagacggtgaaacttccctagttaccggcgaggcagatgaagggcgcgctggcactagtcacaaggataatcccgcccctagctcctccaaggaagcttgcctcaacattgccatggctcagcgaaatcaagatctgcctccggaggggtgttcaaaggacaccttcaaggaggaaactcctcgcaccccttccaacggtccgggacacgaacattcatcacatgcttgggctgaagttcccgaaggcacctcccaggacaccggcaattccggatctgtcgaacaccctttcgaaaccaagaaactgaacggaaaggcgctgtcctctcgagccgaggagcctccctcccccccagtgcctaaagctagcggttcaacattaaatagcggtagtggaaattgtccccgaacccagtctgacgatagtgaagaaagatcactcgaaactatctgcgctaaccacaataacggtcgtctgcacccaagaccaccccatccacataacaacgggcagaacctgggcgaactcgaggtagtggcttacagctctccaggacatagtgacaccgaccgtgataattcgtcactcactgggaccctgctccataaggattgttgcggaagcgagatggcctgtgaaacccccaatgctggtacacgggaggatccaactgatacgcctgccactgactcatctagagccgtacacggacattctgggctaaagaggcagcggattgagctggaagacactgacagtgaaaattcatctagtgaaaagaaactgaagacttag

SEQ ID NO: 141422 - DNA, 2829 bp, Artificial Sequence
  derived and/or modified sequence
atgaagcggagagccggactgggtggctcaatgcgctcagtggtggggtttctatcacaaagaggtcttcacggagatccattacttacccaggattttcagcggagacggctgcggggatgtcgcaatttatacaagaaagatctcttaggtcactttggatgcgttaacgctatcgagttctccaacaacggcggtcagtggctcgtcagtggcggtgacgatagaagagtcttgctgtggcacatggagcaggccatccacagcagagtgaaaccaattcagctgaaaggtgagcatcacagcaacattttttgcctggctttcaacagcggaaacactaaggttttttcaggtggcaatgacgagcaggtcatcctccatgacgtggagtcaagtgaaaccctagatgtttttgcccacgaggacgctgtgtatgggctctccgtgtcgcctgtgaacgacaacattttcgccagcagctctgatgacgggcgagtgcttatctgggacatccgcgagagtccgcatggtgaacctttctgtttggctaactacccatctgcttttcattccgtaatgtttaatccagtcgaaccaaggttgcttgccacagcaaattccaaggaaggtgtggggctgtgggacatacgaaaaccacagtcttccttgctccggtatggaggtaacctttctctgcaatccgcgatgtcagtgaggttcaacagcaatgggacacagttgctcgcgttgaggagaagactaccacccgtcttatatgacattcactctcggcttccggtgttccaattcgataatcagggttactttaactcgtgcaccatgaagtcttgctgctttgctggggaccgcgaccagtatattttgtccggaagcgacgactttaatttatatatgtggagaattccggcagaccctgaagccggaggtatcgggcgagtggtcaacggcgcattcatggtcctcaaaggacatcggagcattgtcaaccaggtaaggtttaacccccatacatatatgatttgttcaagtggcgtggagaagatcatcaaaatatggtcaccttataagcaaccagggtgcactggggatcttgacgggcgtattgaggacgactcaaggtgtttatacacccatgaggagtacatcagtctggtgctcaattctggcagcggcctgagccatgactacgcaaatcagtccgtgcaggaggatccaaggatgatggctttctttgacagtctggtccgtagggagatcgaaggatggagcagtgattctgattctgatctcagtgaaagcactatcttacagctccatgcaggcgtctccgagcgctcaggatacacagattccgagagcagcgcatctcttcccaggagcccccctcccaccgtggacgaatccgctgataatgcatttcacctgggtccactgcgagtcaccactaccaacacagttgcatctaccccccctacaccaacttgcgaagacgcagcatctaggcagcagcgactgtctgctctaaggagatatcaggataagcgccttttggccctgagcaatgaatcagattcagaggagaatgtttgcgaggtggaactcgacaccgatctgtttcccaggccgcgttctccaagtccggaagacgagagcagttcatcgagttcgtcatcctcttccgaagatgaagaagagctgaacgaacggagagctagtacctggcagagaaacgcgatgagacggagacaaaagaccacacgggaggacaaacccagcgcccctataaagcctactaacacatatattggggaggacaattatgattatccccagatcaaagtggatgacctgtcttcatctccaacctctagccccgagaggtccactagcaccctggagattcagccctcccgcgctagccccacaagtgatatcgaaagtgtcgagcggaagatttataaggcgtataaatggctgcgatatagttatataagctactcgaacaataaagacggcgagacatcattggtgactggagaggccgacgaagggagggctggcactagccacaaggacaacccagcccctagttcatcaaaggaagcctgtctaaatatcgctatggcacagagaaaccaagaccttccccctgaaggctgcagcaaagatacttttaaggaggagaccccccgtaccccctctaatggcccaggccatgagcactcttctcatgcatgggccgaagtccccgagggtacatcacaggacacagggaactccgggagcgtggaacacccttttgaaacaaaaaaattaaacgggaaggccttgtcttcacgcgctgaggagccacccagcccaccggtacccaaagccagtggcagtactctcaattcaggcagcggtaattgcccacggacccaatcagatgatagtgaggagcgcagtttggaaacaatttgcgctaaccataacaacggacgactgcacccccgacctccccatcctcacaataacggccagaatttgggcgagctggaagtcgtggcatactcaagccctggccattctgatactgatcgggataactcatcgctgactggaacccttttacacaaagactgttgcgggtcggagatggcatgtgagacgcctaacgccggtactcgcgaagatcctactgataccccagcgaccgactcaagcagagctgttcacggccacagtggacttaagaggcagcggattgagctggaagatacggatagcgagaacagtagctcggagaagaagcttaaaacatag

SEQ ID NO: 141423 - DNA, 5953 bp, Artificial Sequence
  derived and/or modified sequence
tgtctgcacacctcgctctgcctgccatggctggttaaagaaccatccggatcgcagcgcggggggagggccgggtggggggagcagcggccgcgcgtgaggccgagggaggggcggcggcgcgagcggcggcggcggcggttccagcatgaagaggagagctggcctggggggcagcatgaggtcagtggtgggcttcttgtcccagcggggcttgcatggggaccccctgctcactcaggactttcagaggagacgcctgcggggctgcagaaacctctacaagaaggacctcctcggccacttcggctgtgtcaatgccattgaattctccaacaatggaggccagtggctggtctcaggaggagatgaccgccgggttctgctatggcacatggaacaagccatccactccagggtcaagcccatacagctgaaaggagagcaccattccaacattttttgcctggctttcaacagtgggaacactaaagtgttctctggaggcaatgatgagcaagttatcctccatgatgttgaaagcagtgagacattggacgtgtttgctcatgaagatgcagtatatggcttgtctgtgagcccagtgaatgacaacatttttgccagttcctcagatgatggccgggttctcatttgggacattcgggaatccccccatggagagcccttctgcctggcaaactatccatcagcctttcatagtgtcatgtttaaccctgtggagcccaggttgttggccacagccaattcaaaggaaggagtgggactctgggacattcgaaaacctcagagttctctcctgcgctatggtggaaacctgtccctccaaagtgccatgagtgtacgattcaacagcaacgggacccagctcctggccctgaggcgacgcctgccccctgtgctctatgacatccattcccgcctgcctgtgtttcagtttgacaatcagggttacttcaactcatgcaccatgaaaagctgctgttttgcaggagatcgtgaccagtatatcctttcgggctctgatgacttcaacctgtacatgtggagaattcctgcagatccagaagcaggtggcattggtagggtggtcaacggagccttcatggtgctgaaagggcatcgatctattgttaaccaagtccgatttaatccccacacctacatgatctgctcttctggtgtagaaaagattatcaagatctggagcccatacaagcagccaggatgtactggagacctcgacggtcggattgaggacgattcccgctgcctctatacccatgaagagtacatcagccttgtgctgaacagtgggagtggcctgtcgcatgactacgccaaccagtcggtccaggaagacccccggatgatggccttctttgactcactggtacgccgagagatcgagggctggagctctgactcagacagtgacctcagtgagagtactatcctccaactgcacgctggggtcagcgagcgctcaggctacactgactcagagtcttcggcctcattgcctcgctccccgcctcccacagtagatgagtctgccgacaacgccttccacctggggcccctgcgggtcaccaccacaaacacagtagcctcaactccaccaacacccacgtgtgaggatgcagcctctcgccagcagcgtctgtctgctctgcggcgctaccaagacaaacgcctcctggccctttccaatgagtccgattctgaggagaatgtctgtgaggtggaactagacacagatctctttccccggccacggtcacccagccccgaagatgaatccagcagttccagcagctctagcagctctgaggatgaggaggagctgaatgaacgccgagcctctacctggcagcggaatgccatgcggcgccgacagaagacaacccgagaagacaagcccagtgccccaatcaagcccaccaacacttacattggagaagacaactatgattacccccagatcaaagtggatgacctctcctcctccccaacctcgtcccctgagcggagcacttccacgctagagattcaaccaagccgggcatcaccaacttctgacatagaatcagttgagcgaaaaatttataaagcttacaagtggctccgctactcttatatctcctactcaaataacaaagatggagagacctccttggtgaccggggaggcagatgaagggagagcaggaaccagccacaaagacaacccagccccttcttccagtaaggaagcctgtctaaacatagcaatggcccagaggaaccaggacctgccacctgaaggctgcagcaaggacacttttaaagaagagactcctagaactcccagcaatggcccaggccatgagcacagcagccatgcttgggcagaggtgccagagggtacctctcaggacactggcaatagcggctctgtagagcacccttttgaaaccaagaagctcaatggaaaggccctgagcagtcgggctgaggagccgccttctcctcctgtccccaaggcatctggctccactctcaacagcgggtctggcaactgtcccaggacccagtctgatgacagtgaggagaggagcctcgaaaccatctgtgccaaccacaacaatggacgcttacaccctcgtccccctcaccctcacaataacgggcagaacttgggggagctggaggtggtggcctactcttccccaggacactcagacactgaccgtgataactcgtccctgacagggacactcctacacaaagattgttgcgggtctgaaatggcctgtgagacccccaatgctggaacaagagaggaccccactgacaccccagccacagatagtagcagggctgttcatggccacagtggcctcaaaaggcaacgaattgaattggaagatacagattcagagaattcctcctcagagaagaaattaaaaacatgataaatacaaagggaaaacaaaaagctacaaaagtagccttacaaaaaaaaaaaaattgtttagtgaatacagaggaaaggaaaaacaagtattaaaggcacatgaaaccagggcctgaaattttgtgtctgatgctgctcccttctatccaacattcaacaacgggtctgaatgtctagctggccattggcttgtgctgtgttaagaaaggggaaaaaaaaataacccaagtgactcctttctagtgagacgtgagcgtagtgtgccgcgcaaggctctgtggaagtaaatctttgttgagacgttcgacttgttcttgtgtacgcacaatggcacgtgtgcgcttattgtctcataagaccttccttttagttctccatcagaaaggacctatgaatttgtactttttgccatctcaccctgtttacatgccataggtgttctggtctggatgatgggtgcctgttaaatcaggttgtgctgccagtgagttgtagatttatgctggaagaatggagaatggaaacaggccttcagcccattggctgcgctggagaggaaagcatggttcctttcttaaagaaatcttccatgttttctctaagtaacacttctttattgagcatttaatgtggacatactataaaaaagaatttttaatgctaatgagaggtttagcacttaagatcagattcaagagaatatagattcctgataaatttcactgtttgcaaattgagcagtgctgcaacatgtactgtatgaaggccataaaatagagctagtcatggataacagactttaaccagttaggtgctagatcctaagaggcactcacaaggccagcaggtgcttccttggctcccatgatcgatcgaggcatagtgaaagaagggcaaagacagctttccagagctttgtgctcaggctactaaagtagttgttataggtgtgttaacgaagaagcttagtgaggagcagaatgtggtactatattcatttaactcaacccagaaccattggtcagaattggtgggactggcatcttccctcagacttgcagttgatagaggctgtggtgttctcactagactttgcagagcagtaggcatctcaaggtaacagattcttattgagtaggtctattaggagtcagaaggtgttggggaggagtctctggcttatgactcctggttcccattagtcttaagtcttctggttcccataaaagactcagttttattgaggtagatacaggtttagaagagaaaagagcaacagattttcagcgttgcagtcactcggttatctatgaagggttgtgcaaaacaggaaggtctgggaatgaccagatatcttgttggcataaatgttatgaaaaggcagaatactggcaagaaatgaggaagagagagaaaaacaatataactttcttgagtgcaaaggtgctagacaactaggagcccagctgggattggtgtagggagggccgaacgctgactagtgtggcctcactgccccaggcttcctttcagaggaaggcctgtcctgctggaactggagccaaggggaggctgcctatgaaggcagaagatgtggatgaattcaggcactgggggtgggggggttatttataaacacaaggtggttggtttaagccaaaaggagataccatcctgataagctctgtgaaagagaagatgtgcctggtgtgtgtaatgcggctggggtatgaaaacactgagaaggagatgaaggagtgtgtgtagcatgggggtgtgtacaacttaacacctggacttttactgggggagtgggaaagtgattctgtaaccaacattagaattactttggatttgtaatcagattggttctatgatttgtctttgactattcacagataattgtaaatgctggttttataagcccaagtcattttacatttgcttttccaaaatgtattaaattggaattttttaatcctttatatacaaaaaaaatacgatcactcagtgtgtgtttctcttccccttcttagtcagcacacccagtcctttattttattctattctatttattttattttaataagtacttagcctcttctgacttctcaaaggacaatcggatacatatcttcctgaaaagaagtagttaaagttcccttgggaactagctacttggtagttacaattcccaaatgcagaacttggtcttttcatgttaaaagccttaatctcatttgggtactcaaaagagaaatcagagtttattctggttaacttgagaagccaagaaagatcatttttagcaagtatgccttccatccttggcagaggcttcccagcatcctaggctcagcttaccgggtgataggccccataagacacacacatgagcagggtgagaaatgcttgctttatagctgctccaccctcatctccagagattttgtgtctatggttgtgggtctggaaacctggcaggaaccacttctagagtacctttgcctaaactcttttagaattgaggccccaactttgatggcacatttaatacccaatttcttccataatagatatttttaatagcaggacagatggcactgattagatcaagaactatttggaagtgcctcttatgtttttttcctgcattctgtacataaagttttaagtggcaggtccagatatgtaaaatcatttctctctattttccagctggttttgttaatgattctctaggacagcaggtaaatgagttaagttgttggcttggggcaagtgaagtttgtgactatgcttgatttaataagctgagagtctcttgtttgtctgtcaaggtgccttcctctgctgaagccttacctccttctcacccagtaacggttaactcttctcttgtgtatatgcaaataaacctattattcacttctcacgtcttcctcttctcttccagggaagacttggttgctta

SEQ ID NO: 141424 - DNA, 4803 bp, Artificial Sequence
  derived and/or modified sequence
gaggggaaggagaggatgtcttctataaaaaagacctaaaatggttgacagctccttaattcgctttatcccaagtgcaaagtgatctctcctgatgcctgccctgaaagtgtaggtcggggaggggggcgaggttaccgctctacaaagtttgacggcaaactcttcctccgcgtactttaaaaggaggagatgaccgccgggttctgctatggcacatggaacaagccatccactccagggtcaagcccatacagctgaaaggagagcaccattccaacattttttgcctggctttcaacagtgggaacactaaagtgttctctggaggcaatgatgagcaagttatcctccatgatgttgaaagcagtgagacattggacgtgtttgctcatgaagatgcagtatatggcttgtctgtgagcccagtgaatgacaacatttttgccagttcctcagatgatggccgggttctcatttgggacattcgggaatccccccatggagagcccttctgcctggcaaactatccatcagcctttcatagtgtcatgtttaaccctgtggagcccaggttgttggccacagccaattcaaaggaaggagtgggactctgggacattcgaaaacctcagagttctctcctgcgctatggtggaaacctgtccctccaaagtgccatgagtgtacgattcaacagcaacgggacccagctcctggccctgaggcgacgcctgccccctgtgctctatgacatccattcccgcctgcctgtgtttcagtttgacaatcagggttacttcaactcatgcaccatgaaaagctgctgttttgcaggagatcgtgaccagtatatcctttcgggctctgatgacttcaacctgtacatgtggagaattcctgcagatccagaagcaggtggcattggtagggtggtcaacggagccttcatggtgctgaaagggcatcgatctattgttaaccaagtccgatttaatccccacacctacatgatctgctcttctggtgtagaaaagattatcaagatctggagcccatacaagcagccaggatgtactggagacctcgacggtcggattgaggacgattcccgctgcctctatacccatgaagagtacatcagccttgtgctgaacagtgggagtggcctgtcgcatgactacgccaaccagtcggtccaggaagacccccggatgatggccttctttgactcactggtacgccgagagatcgagggctggagctctgactcagacagtgacctcagtgagagtactatcctccaactgcacgctggggtcagcgagcgctcaggctacactgactcagagtcttcggcctcattgcctcgctccccgcctcccacagtagatgagtctgccgacaacgccttccacctggggcccctgcgggtcaccaccacaaacacagtagcctcaactccaccaacacccacgtgtgaggatgcagcctctcgccagcagcgtctgtctgctctgcggcgctaccaagacaaacgcctcctggccctttccaatgagtccgattctgaggagaatgtctgtgaggtggaactagacacagatctctttccccggccacggtcacccagccccgaagatgaatccagcagttccagcagctctagcagctctgaggatgaggaggagctgaatgaacgccgagcctctacctggcagcggaatgccatgcggcgccgacagaagacaacccgagaagacaagcccagtgccccaatcaagcccaccaacacttacattggagaagacaactatgattacccccagatcaaagtggatgacctctcctcctccccaacctcgtcccctgagcggagcacttccacgctagagattcaaccaagccgggcatcaccaacttctgacatagaatcagttgagcgaaaaatttataaagcttacaagtggctccgctactcttatatctcctactcaaataacaaagatggagagacctccttggtgaccggggaggcagatgaagggagagcaggaaccagccacaaagacaacccagccccttcttccagtaaggaagcctgtctaaacatagcaatggcccagaggaaccaggacctgccacctgaaggctgcagcaaggacacttttaaagaagagactcctagaactcccagcaatggcccaggccatgagcacagcagccatgcttgggcagaggtgccagagggtacctctcaggacactggcaatagcggctctgtagagcacccttttgaaaccaagaagctcaatggaaaggccctgagcagtcgggctgaggagccgccttctcctcctgtccccaaggcatctggctccactctcaacagcgggtctggcaactgtcccaggacccagtctgatgacagtgaggagaggagcctcgaaaccatctgtgccaaccacaacaatggacgcttacaccctcgtccccctcaccctcacaataacgggcagaacttgggggagctggaggtggtggcctactcttccccaggacactcagacactgaccgtgataactcgtccctgacagggacactcctacacaaagattgttgcgggtctgaaatggcctgtgagacccccaatgctggaacaagagaggaccccactgacaccccagccacagatagtagcagggctgttcatggccacagtggcctcaaaaggcaacgaattgaattggaagatacagattcagagaattcctcctcagagaagaaattaaaaacatgataaatacaaagggaaaacaaaaagctacaaaagtagccttacaaaaaaaaaaaaattgtttagtgaatacagaggaaaggaaaaacaagtattaaaggcacatgaaaccagggcctgaaattttgtgtctgatgctgctcccttctatccaacattcaacaacgggtctgaatgtctagctggccattggcttgtgctgtgttaagaaaggggaaaaaaaaataacccaagtgactcctttctagtgagacgtgagcgtagtgtgccgcgcaaggctctgtggaagtaaatctttgttgagacgttcgacttgttcttgtgtacgcacaatggcacgtgtgcgcttattgtctcataagaccttccttttagttctccatcagaaaggacctatgaatttgtactttttgccatctcaccctgtttacatgccataggtgttctggtctggatgatgggtgcctgttaaatcaggttgtgctgccagtgagttgtagatttatgctggaagaatggagaatggaaacaggccttcagcccattggctgcgctggagaggaaagcatggttcctttcttaaagaaatcttccatgttttctctaagtaacacttctttattgagcatttaatgtggacatactataaaaaagaatttttaatgctaatgagaggtttagcacttaagatcagattcaagagaatatagattcctgataaatttcactgtttgcaaattgagcagtgctgcaacatgtactgtatgaaggccataaaatagagctagtcatggataacagactttaaccagttaggtgctagatcctaagaggcactcacaaggccagcaggtgcttccttggctcccatgatcgatcgaggcatagtgaaagaagggcaaagacagctttccagagctttgtgctcaggctactaaagtagttgttataggtgtgttaacgaagaagcttagtgaggagcagaatgtggtactatattcatttaactcaacccagaaccattggtcagaattggtgggactggcatcttccctcagacttgcagttgatagaggctgtggtgttctcactagactttgcagagcagtaggcatctcaaggtaacagattcttattgagtaggtctattaggagtcagaaggtgttggggaggagtctctggcttatgactcctggttcccattagtcttaagtcttctggttcccataaaagactcagttttattgaggtagatacaggtttagaagagaaaagagcaacagattttcagcgttgcagtcactcggttatctatgaagggttgtgcaaaacaggaaggtctgggaatgaccagatatcttgttggcataaatgttatgaaaaggcagaatactggcaagaaatgaggaagagagagaaaaacaatataactttcttgagtgcaaaggtgctagacaactaggagcccagctgggattggtgtagggagggccgaacgctgactagtgtggcctcactgccccaggcttcctttcagaggaaggcctgtcctgctggaactggagccaaggggaggctgcctatgaaggcagaagatgtggatgaattcaggcactgggggtgggggggttatttataaacacaaggtggttggtttaagccaaaaggagataccatcctgataagctctgtgaaagagaagatgtgcctggtgtgtgtaatgcggctggggtatgaaaacactgagaaggagatgaaggagtgtgtgtagcatgggggtgtgtacaacttaacacctggacttttactgggggagtgggaaagtgattctgtaaccaacattagaattactttggatttgtaatcagattggttctatgatttgtctttgactattcacagataattgtaaatgctggttttataagcccaagtcattttacatttgcttttccaaaatgtattaaattggaattttttaatcctttatatacaaaaaaaata

SEQ ID NO: 141425 - DNA, 2791 bp, Artificial Sequence
  derived and/or modified sequence
attgcagggggaggggaaggagaggatgtcttctataaaaaagacctaaaatggttgacagctccttaattcgctttatcccaagtgcaaagtgatctctcctgatgcctgccctgaaagtgaggagatgaccgccgggttctgctatggcacatggaacaagccatccactccagggtcaagcccatacagctgaaaggagagcaccattccaacattttttgcctggctttcaacagtgggaacactaaagtgttctctggaggcaatgatgagcaagttatcctccatgatgttgaaagcagtgagacattggacgtgtttgctcatgaagatgcagtatatggcttgtctgtgagcccagtgaatgacaacatttttgccagttcctcagatgatggccgggttctcatttgggacattcgggaatccccccatggagagcccttctgcctggcaaactatccatcagcctttcatagtgtcatgtttaaccctgtggagcccaggttgttggccacagccaattcaaaggaaggagtgggactctgggacattcgaaaacctcagagttctctcctgcgctatggtggaaacctgtccctccaaagtgccatgagtgtacgattcaacagcaacgggacccagctcctggccctgaggcgacgcctgccccctgtgctctatgacatccattcccgcctgcctgtgtttcagtttgacaatcagggttacttcaactcatgcaccatgaaaagctgctgttttgcaggagatcgtgaccagtatatcctttcgggctctgatgacttcaacctgtacatgtggagaattcctgcagatccagaagcaggtggcattggtagggtggtcaacggagccttcatggtgctgaaagggcatcgatctattgttaaccaagtccgatttaatccccacacctacatgatctgctcttctggtgtagaaaagattatcaagatctggagcccatacaagcagccaggatgtactggagacctcgacggtcggattgaggacgattcccgctgcctctatacccatgaagagtacatcagccttgtgctgaacagtgggagtggcctgtcgcatgactacgccaaccagtcggtccaggaagacccccggatgatggccttctttgactcactggtacgccgagagatcgagggctggagctctgactcagacagtgacctcagtgagagtactatcctccaactgcacgctggggtcagcgagcgctcaggctacactgactcagagtcttcggcctcattgcctcgctccccgcctcccacagtagatgagtctgccgacaacgccttccacctggggcccctgcgggtcaccaccacaaacacagtagcctcaactccaccaacacccacgtgtgaggatgcagcctctcgccagcagcgtctgtctgctctgcggcgctaccaagacaaacgcctcctggccctttccaatgagtccgattctgaggagaatgtctgtgaggtggaactagacacagatctctttccccggccacggtcacccagccccgaagatgaatccagcagttccagcagctctagcagctctgaggatgaggaggagctgaatgaacgccgagcctctacctggcagcggaatgccatgcggcgccgacagaagacaacccgagaagacaagcccagtgccccaatcaagcccaccaacacttacattggagaagacaactatgattacccccagatcaaagtggatgacctctcctcctccccaacctcgtcccctgagcggagcacttccacgctagagattcaaccaagccgggcatcaccaacttctgacatagaatcagttgagcgaaaaatttataaagcttacaagtggctccgctactcttatatctcctactcaaataacaaagatggagagacctccttggtgaccggggaggcagatgaagggagagcaggaaccagccacaaagacaacccagccccttcttccagtaaggaagcctgtctaaacatagcaatggcccagaggaaccaggacctgccacctgaaggctgcagcaaggacacttttaaagaagagactcctagaactcccagcaatggcccaggccatgagcacagcagccatgcttgggcagaggtgccagagggtacctctcaggacactggcaatagcggctctgtagagcacccttttgaaaccaagaagctcaatggaaaggccctgagcagtcgggctgaggagccgccttctcctcctgtccccaaggcatctggctccactctcaacagcgggtctggcaactgtcccaggacccagtctgatgacagtgaggagaggagcctcgaaaccatctgtgccaaccacaacaatggacgcttacaccctcgtccccctcaccctcacaataacgggcagaacttgggggagctggaggtggtggcctactcttccccaggacactcagacactgaccgtgataactcgtccctgacagggacactcctacacaaagattgttgcgggtctgaaatggcctgtgagacccccaatgctggaacaagagaggaccccactgacaccccagccacagatagtagcagggctgttcatggccacagtggcctcaaaaggcaacgaattgaattggaagatacagattcagagaattcctcctcagagaagaaattaaaaacatgataaatacaaagggaaaacaaaaagctacaaaagtagccttacaaaaaaaaaaaaa

SEQ ID NO: 141426 - DNA, 2829 bp, Artificial Sequence
  derived and/or modified sequence
atgaagagaagagccggcctgggcggcagcatgagaagcgtggtgggcttcctgagccagagaggcctgcacggcgaccccctgctgacccaggacttccagagaagaagactgagaggctgcagaaacctgtacaagaaggacctgctgggccacttcggctgcgtgaacgccatcgagttcagcaacaacggcggccagtggctggtgagcggcggcgacgacagaagagtgctgctgtggcacatggagcaggccatccacagcagagtgaagcccatccagctgaagggcgagcaccacagcaacatcttctgcctggccttcaacagcggcaacaccaaggtgttcagcggcggcaacgacgagcaggtgatcctgcacgacgtggagagcagcgagaccctggacgtgttcgcccacgaggacgccgtgtacggcctgagcgtgagccccgtgaacgacaacatcttcgccagcagcagcgacgacggcagagtgctgatctgggacatcagagagagcccccacggcgagcccttctgcctggccaactaccccagcgccttccacagcgtgatgttcaaccccgtggagcccagactgctggccaccgccaacagcaaggagggcgtgggcctgtgggacatcagaaagccccagagcagcctgctgagatacggcggcaacctgagcctgcagagcgccatgagcgtgagattcaacagcaacggcacccagctgctggccctgagaagaagactgccccccgtgctgtacgacatccacagcagactgcccgtgttccagttcgacaaccagggctacttcaacagctgcaccatgaagagctgctgcttcgccggcgacagagaccagtacatcctgagcggcagcgacgacttcaacctgtacatgtggagaatccccgccgaccccgaggccggcggcatcggcagagtggtgaacggcgccttcatggtgctgaagggccacagaagcatcgtgaaccaggtgagattcaacccccacacctacatgatctgcagcagcggcgtggagaagatcatcaagatctggagcccctacaagcagcccggctgcaccggcgacctggacggcagaatcgaggacgacagcagatgcctgtacacccacgaggagtacatcagcctggtgctgaacagcggcagcggcctgagccacgactacgccaaccagagcgtgcaggaggaccccagaatgatggccttcttcgacagcctggtgagaagagagatcgagggctggagcagcgacagcgacagcgacctgagcgagagcaccatcctgcagctgcacgccggcgtgagcgagagaagcggctacaccgacagcgagagcagcgccagcctgcccagaagccccccccccaccgtggacgagagcgccgacaacgccttccacctgggccccctgagagtgaccaccaccaacaccgtggccagcaccccccccacccccacctgcgaggacgccgccagcagacagcagagactgagcgccctgagaagataccaggacaagagactgctggccctgagcaacgagagcgacagcgaggagaacgtgtgcgaggtggagctggacaccgacctgttccccagacccagaagccccagccccgaggacgagagcagcagcagcagcagcagcagcagcagcgaggacgaggaggagctgaacgagagaagagccagcacctggcagagaaacgccatgagaagaagacagaagaccaccagagaggacaagcccagcgcccccatcaagcccaccaacacctacatcggcgaggacaactacgactacccccagatcaaggtggacgacctgagcagcagccccaccagcagccccgagagaagcaccagcaccctggagatccagcccagcagagccagccccaccagcgacatcgagagcgtggagagaaagatctacaaggcctacaagtggctgagatacagctacatcagctacagcaacaacaaggacggcgagaccagcctggtgaccggcgaggccgacgagggcagagccggcaccagccacaaggacaaccccgcccccagcagcagcaaggaggcctgcctgaacatcgccatggcccagagaaaccaggacctgccccccgagggctgcagcaaggacaccttcaaggaggagacccccagaacccccagcaacggccccggccacgagcacagcagccacgcctgggccgaggtgcccgagggcaccagccaggacaccggcaacagcggcagcgtggagcaccccttcgagaccaagaagctgaacggcaaggccctgagcagcagagccgaggagccccccagcccccccgtgcccaaggccagcggcagcaccctgaacagcggcagcggcaactgccccagaacccagagcgacgacagcgaggagagaagcctggagaccatctgcgccaaccacaacaacggcagactgcaccccagacccccccacccccacaacaacggccagaacctgggcgagctggaggtggtggcctacagcagccccggccacagcgacaccgacagagacaacagcagcctgaccggcaccctgctgcacaaggactgctgcggcagcgagatggcctgcgagacccccaacgccggcaccagagaggaccccaccgacacccccgccaccgacagcagcagagccgtgcacggccacagcggcctgaagagacagagaatcgagctggaggacaccgacagcgagaacagcagcagcgagaagaagctgaagacctag

SEQ ID NO: 141427 - protein, 207 aa, Artificial Sequence
  derived and/or modified sequence
MYSAPSACTCLCLHFLLLCFQVQVLVAEENVDFRIHVENQTRARDDVSRKQLRLYQLYSRTSGKHIQVLGRRISARGEDGDKYAQLLVETDTFGSQVRIKGKETEFYLCMNRKGKLVGKPDGTSKECVFIEKVLENNYTALMSAKYSGWYVGFTKKGRPRKGPKTRENQQDVHFMKRYPKGQPELQKPFKYTTVTKRSRRIRPTHPA

SEQ ID NO: 141428 - protein, 22 aa, Artificial Sequence
  derived and/or modified sequence
GEDGDKYAQLLVETDTFGSQVR

SEQ ID NO: 141429 - DNA, 624 bp, Artificial Sequence
  derived and/or modified sequence
atgtacagcgcccccagcgcctgcacctgcctgtgcctgcacttcctgctgctgtgcttccaggtgcaggtgctggtggccgaggagaacgtggacttcagaatccacgtggagaaccagaccagagccagagacgacgtgagcagaaagcagctgagactgtaccagctgtacagcagaaccagcggcaagcacatccaggtgctgggcagaagaatcagcgccagaggcgaggacggcgacaagtacgcccagctgctggtggagaccgacaccttcggcagccaggtgagaatcaagggcaaggagaccgagttctacctgtgcatgaacagaaagggcaagctggtgggcaagcccgacggcaccagcaaggagtgcgtgttcatcgagaaggtgctggagaacaactacaccgccctgatgagcgccaagtacagcggctggtacgtgggcttcaccaagaagggcagacccagaaagggccccaagaccagagagaaccagcaggacgtgcacttcatgaagagataccccaagggccagcccgagctgcagaagcccttcaagtacaccaccgtgaccaagagaagcagaagaatcagacccacccaccccgcctag

SEQ ID NO: 141430 - DNA, 624 bp, Artificial Sequence
  derived and/or modified sequence
atgtacagtgctcctagcgcctgtacctgcctgtgcctgcactttctgctgctctgtttccaggtgcaggtgcttgtggctgaagaaaatgttgattttaggattcacgtcgaaaaccagacaagggcaagggacgacgtctcccgaaaacagctgagactgtaccagttgtacagccgcactagtgggaagcatatccaggttctgggacgcagaatctccgcgcgaggagaggatggggacaagtacgcccagcttctggtagagacagacacattcggcagtcaagttcgtattaagggcaaagaaaccgaattctacctatgcatgaacagaaagggcaaactggtggggaaaccggacggcacatccaaggaatgtgtcttcattgagaaggtgcttgagaacaactataccgctttgatgtcagctaagtactctggctggtatgtgggtttcacaaaaaagggccgcccacggaaggggccaaagacccgggaaaatcagcaggacgttcacttcatgaagcggtaccctaaggggcagcctgaacttcaaaaaccttttaagtacacaaccgtgaccaagcgatcaaggaggatccgccctacacacccagcgtag

SEQ ID NO: 141431 - DNA, 624 bp, Artificial Sequence
  derived and/or modified sequence
atgtacagcgcccccagcgcctgcacctgcctgtgcctgcacttcctgctgctgtgcttccaggtgcaggtgctggtggccgaggagaatgtggacttccgcatccacgtggagaaccagacccgggccagagatgatgtgtccaggaagcagctgcggctgtaccagctgtacagcaggaccagcggcaagcacatccaggtgctgggccgccgcatcagcgcccggggggaggatggagacaagtatgcccagctgctggtggagacagacaccttcggcagccaggtgcgcatcaagggcaaggagacagagttctacctgtgcatgaacaggaagggcaagctggtgggcaagccagatggcaccagcaaagaatgtgtgttcatcgagaaggtgctggagaacaactacacagccctgatgtctgccaagtacagcggctggtacgtgggcttcaccaagaagggccggcccaggaagggccccaagacccgggagaaccagcaggatgtgcacttcatgaagcgctaccccaagggccagcctgagctgcagaagcccttcaagtacaccaccgtgaccaagaggagccgccgcatccggcccacccacccagcctag

SEQ ID NO: 141432 - DNA, 624 bp, Artificial Sequence
  derived and/or modified sequence
atgtacagcgcccccagcgcctgcacctgcctgtgcctgcacttccttctcctgtgcttccaggtccaggtcctggtggctgaagagaatgtcgacttccggatccacgtggagaaccagacaagggctcgcgatgacgtctctcgaaagcaactgcgactgtatcagctatacagtcgaacaagtggtaaacatatacaggtgctgggccgcaggattagcgctcggggggaggacggcgacaagtatgcacagctactcgtcgaaacagacacttttgggtcacaggtccgcatcaagggcaaggagactgaattctatctgtgcatgaacagaaagggtaaactggtggggaagccagacggcacttccaaggaatgtgtattcatagaaaaggtgctagaaaacaactacacagcactgatgtctgctaaatatagcgggtggtatgttggatttactaagaaaggccgtccccggaaaggaccaaagactagggagaaccagcaggacgtgcactttatgaagcgttacccaaagggccagccagaacttcagaaaccgttcaagtacactacagtcacaaagaggtcgcggcgcatccggccgacacatcccgcttag

SEQ ID NO: 141433 - DNA, 624 bp, Artificial Sequence
  derived and/or modified sequence
atgtattccgcccctagtgcctgcacttgcttgtgtctgcactttctcttgctgtgtttccaagtccaggtgttggtggctgaggagaatgtcgattttcggatccacgtggaaaatcagactcgggctcgcgacgatgtgagccggaagcagcttaggctgtaccagctatacagtcgtaccagtggaaagcatatacaggtcctgggcagaagaatctccgcgaggggagaagatggcgataagtatgctcagcttctcgtcgagactgatacgttcggctctcaggttagaatcaaggggaaggagaccgagttctacctctgtatgaatcggaagggtaaactggtgggcaaaccagatggtactagtaaggagtgcgtcttcatcgagaaggtcttggagaataactatacagccctcatgagcgccaagtactctgggtggtatgtgggttttacgaagaaaggtaggccaaggaagggccctaaaacccgggagaaccagcaggatgtccactttatgaaacgatacccaaagggacagcccgagcttcaaaaaccttttaaatacaccaccgtgactaagagatcaagacggatcaggcccactcatcccgcttag

SEQ ID NO: 141434 - DNA, 621 bp, Artificial Sequence
  derived and/or modified sequence
atgtactccgccccttcggcctgtacctgcctgtgtctgcatttcttgcttctgtgttttcaagtgcaggttctggtcgcagaagaaaatgtggacttccggattcacgtggagaatcaaaccagagcacgggatgacgtgtccaggaaacagttgagactgtaccaactgtactcgcgtacctccgggaagcacatacaggtgcttggacgtcggatttccgcacgtggggaggacggagacaagtatgcacagctccttgtggaaaccgatactttcggttcacaagtccgcatcaaaggcaaggagacggagttttacttgtgcatgaatagaaaaggaaaactcgttggaaaacccgacggaacctcaaaagaatgtgtgttcatcgagaaagtgctcgagaacaactacactgcacttatgtccgcgaagtattcgggttggtacgtgggatttactaaaaagggccgccccagaaaaggtcctaagacccgcgagaaccagcaagatgtccactttatgaaacgctaccctaagggccagcccgagcttcagaagcctttcaagtacactacggtcaccaagcgctcccgaaggatcagaccaacccacccagcg

SEQ ID NO: 141435 - DNA, 621 bp, Artificial Sequence
  derived and/or modified sequence
atgtacagcgctccaagcgcctgcacttgtctgtgcctccatttcttgctgttgtgcttccaggttcaggtgctggtagcggaagaaaatgtggattttcgcatccacgtggagaatcagacccgcgcacgagatgacgtgagccgcaagcagctacgcctgtatcagctgtatagtaggactagcggtaaacacatacaggtgctgggacgccgcatttccgcccgtggcgaggacggagacaaatacgctcagctactggtggagactgatacatttgggagccaggtgaggattaagggtaaggagacggagttctacctgtgcatgaatcggaagggtaagctggtcggcaaaccggatggcacttcaaaggagtgcgtgttcatcgaaaaagttcttgaaaacaactacacagcattgatgtccgccaaatattctggttggtacgtgggatttacgaagaagggccgtcctaggaaaggcccgaaaacccgcgaaaatcagcaagacgtgcatttcatgaagcgctatccaaagggacagccggagttgcagaagccgttcaaatatactaccgttactaagcgcagcagacgtatccggccaacacacccagcg

SEQ ID NO: 141436 - DNA, 621 bp, Artificial Sequence
  derived and/or modified sequence
atgtactctgccccttcggcttgtacctgcctgtgtctccatttcctcctgctctgcttccaagtgcaggtgctggtggccgaggagaacgtcgacttccggatccacgtcgaaaaccagactagggctcgggatgacgtttcccgcaaacagctgcgcctgtaccagctttacagccgtacttcgggaaagcacatccaggtgcttggtagaaggatcagcgcgcgcggcgaggacggtgataagtacgcacagctcttggtcgaaacggacacttttggatcgcaggtccgaattaagggcaaggaaaccgagttctacctctgcatgaaccgcaaggggaagctggtgggaaagccagatggaacctcaaaggaatgcgtgttcatcgaaaaggtcctggagaacaattacactgcgctgatgtcagccaagtactccggctggtacgtgggattcaccaaaaagggacggccgcggaaagggccgaaaacccgcgaaaatcagcaagacgtgcattttatgaaaagatatccgaaaggacaacccgaattgcaaaagccgtttaagtacaccaccgtgacgaagcggtcccgcagaatcagaccaactcaccctgca

SEQ ID NO: 141437 - DNA, 621 bp, Artificial Sequence
  derived and/or modified sequence
atgtactccgccccctccgcctgtacttgcctttgccttcatttcctcctcctgtgcttccaagtgcaagttctggtggcagaggaaaacgtggacttccgcatccacgtggagaaccagactcgcgcccgggatgacgtgtcgcggaagcagcttagactctaccaactctactcgagaaccagcggtaagcatatccaggtcctgggacgccgcatctcggcgcggggcgaggatggagacaagtatgcgcagctgctcgtggaaactgatactttcggaagccaggtgcgcatcaagggaaaggagactgagttctacctgtgcatgaatcgcaagggaaagctcgttggcaagccggacggcacctcgaaagaatgcgtgttcatcgaaaaggtgctggaaaacaattacactgccctgatgtccgctaagtactcgggttggtatgtgggattcacgaagaagggcagaccacggaagggacctaagaccagggaaaaccagcaggacgtgcacttcatgaaacggtaccctaagggacaaccggaactccagaaaccatttaagtacaccactgtgaccaagcggtcgagacgcattcgccccacccatcctgct

SEQ ID NO: 141438 - DNA, 621 bp, Artificial Sequence
  derived and/or modified sequence
atgtactccgcgccctcggcatgcacgtgtctttgtctccattttctcctcctctgctttcaggtgcaagtgctggtcgccgaggaaaacgtggatttccggatccacgtcgaaaaccagactcgggcaagagatgacgtctcccgcaagcaacttcggctgtaccagctgtactcaagaacgtccggtaagcacatccaagtccttggacggcggatttcggcacgcggagaagatggagataagtacgcccagctgcttgttgaaaccgatacctttggatcacaggtgcgaataaagggaaaagaaaccgagttttacctttgcatgaatagaaagggaaagctggtgggtaaacctgatggtactagcaaggaatgcgtgttcattgaaaaggtgctggagaacaattacaccgcactcatgtcagcgaaatactcgggttggtacgtcgggttcactaagaagggtcggccacgcaagggacccaagacccgtgagaatcaacaggatgtgcacttcatgaagcgctacccaaagggccaaccagagctgcagaagccttttaagtacaccactgtgactaagagaagcagaaggattcggcctacccatccagca

SEQ ID NO: 141439 - DNA, 621 bp, Artificial Sequence
  derived and/or modified sequence
atgtactcggcaccttctgcatgcacgtgtctctgccttcactttctgctgctgtgtttccaagtgcaagtgttggtcgcagaggaaaacgtggattttcgtatccatgtggagaaccagaccagagcacgcgatgatgtcagccgtaagcagcttcggctgtaccagctgtactcaagaacgtccggaaaacatatccaggtgctcggccggcgcatttccgctagaggcgaagatggagacaaatacgcacaacttcttgtggaaactgatacttttgggtcgcaagtccggattaaaggaaaggaaactgagttttacctttgtatgaatcgcaaggggaagctcgtgggaaaacctgatggcactagtaaggaatgcgtgtttatcgaaaaagtgctggaaaacaattacaccgctcttatgagcgccaagtattcgggatggtacgtgggattcacgaagaaggggcgtccacggaaaggcccaaagacccgagagaaccagcaagacgtgcatttcatgaagagataccccaagggacaacctgagctgcagaagccattcaagtacaccactgtcacgaagcgcagcagaagaattcgccccacccaccccgct

SEQ ID NO: 141440 - DNA, 621 bp, Artificial Sequence
  derived and/or modified sequence
atgtactcggcgccgtcggcatgcacgtgcctttgtctccattttctcctgctgtgcttccaggtgcaagtgctcgtcgctgaagagaatgtggacttcagaattcacgtcgaaaatcagaccagggccagggatgacgtttcccgaaaacaacttcggctgtatcagctgtactcacgcacctcgggcaagcacatccaggtcctgggccggcgcatcagcgctaggggagaggatggagataagtacgcccaattgctggtcgaaactgacacgtttggatcacaggtgagaatcaagggaaaagaaacggaattctatctctgcatgaacagaaaaggaaagttggtcggaaagcccgacggaacgtccaaagagtgcgttttcatagagaaggtgctggaaaacaattacactgcgctgatgtccgcaaagtactcgggatggtacgtgggatttaccaagaagggaaggccgcggaagggtccaaagactcgcgagaaccagcaggatgtgcatttcatgaagagatacccaaagggccagcctgaactccaaaaacctttcaagtacacgaccgtgaccaaacggagccggagaatccggccgacccaccccgcg

SEQ ID NO: 141441 - DNA, 621 bp, Artificial Sequence
  derived and/or modified sequence
atgtattccgcaccttcagcttgtacttgcctgtgcctgcactttttgctactctgtttccaagtgcaagtcctggtcgctgaggagaacgtggattttcggatccatgtggagaatcaaacgcgggcaagagacgatgtcagtcgaaagcaactgcggctttaccagctttacagccgcactagtggcaagcatatccaggtgctcggacgtcgtatctccgcccgcggcgaagatggggataaatatgctcagcttttggttgagactgacactttcggatctcaggtgcgaatcaaagggaaggagaccgagttctatctatgtatgaatcggaagggaaagttggttggcaagccagatggcacatccaaagaatgtgtttttatcgaaaaggtgctcgagaacaactatacggcgctgatgtccgctaaatattctggctggtacgtgggattcaccaagaagggcaggccacgcaaggggcctaagaccagggaaaaccagcaagatgttcatttcatgaaacgctaccctaagggacagccagagttacagaaaccatttaagtacacaacagtcaccaaaaggtcacggaggatcaggccaacccacccagct

SEQ ID NO: 141442 - DNA, 621 bp, Artificial Sequence
  derived and/or modified sequence
atgtattctgcccccagtgcgtgtacctgcttatgcctgcatttcttactgttgtgtttccaggtgcaggtgctggtcgccgaggagaacgtcgatttccgaatccatgtggaaaatcagaccagagctagagatgatgtgtctcgcaaacagttgcgtctttatcagctttatagtcggactagtggcaagcatatccaggtattggggcgccggatctccgctcgaggggaagacggtgataaatatgcacaactacttgtggagaccgatactttcgggagccaggtccgaataaaggggaaagagaccgaattctacctctgtatgaatcggaagggcaagttggtgggaaagccagacgggacctccaaggagtgtgtgtttattgagaaagttctggaaaataactatactgctctcatgagcgccaagtatagcggatggtatgtgggctttactaaaaaggggcgcccaaggaaggggccaaagacccgggagaaccagcaagacgtacattttatgaagcggtatcctaaaggccagcctgagctccaaaagccattcaaatacacgaccgtcacaaaacggagtagacggattagacctactcatccagcc

SEQ ID NO: 141443 - DNA, 621 bp, Artificial Sequence
  derived and/or modified sequence
atgtattccgcaccctcagcgtgtacgtgtttgtgtctgcatttcttgttgctgtgttttcaagtgcaagtattggtggcagaagagaatgtagactttcgcattcatgttgagaatcagacacgcgcgcgcgatgatgtttcaagaaaacaacttcgtctttaccaactttactcaaggacatcaggaaaacatatacaagtgctgggccggcgcatctccgcgcgcggcgaagatggtgataaatacgcgcagctgctggtcgaaacagatacctttggctctcaagtccggataaaaggcaaagagacagagttttatctttgcatgaaccgcaaagggaagttagttggtaaaccagatggaacatcaaaagaatgtgtatttatcgagaaagtccttgaaaataattatacggcgctgatgtcagccaaatattcgggctggtatgtcggatttacaaaaaaaggcagaccgcgtaagggacctaaaacaagagagaatcagcaagatgtgcattttatgaagcggtatccgaaaggccagcctgagctgcaaaaaccgtttaaatatacgactgtcacaaaacgcagcagacggattcgtccaacgcatccagct

SEQ ID NO: 141444 - DNA, 621 bp, Artificial Sequence
  derived and/or modified sequence
atgtactcggcgccttcagcatgtacctgcttgtgtctccattttctgctgctgtgtttccaagtgcaagtgctggtcgctgaagaaaatgtggactttcggatacatgtggagaaccaaacgagagcccgcgatgatgtctcccgaaagcagttgcgactgtaccagctctacagccgcacctccgggaaacacattcaagtgctgggacgtcgtatttcagcacgtggagaagatggcgacaagtacgcccaacttcttgtggaaaccgatactttcggatcacaagtgagaatcaaagggaaggaaacggagttttacctgtgcatgaaccgcaaaggaaagctcgtcggcaaacccgacggaaccagcaaggagtgtgtgtttatcgagaaagtcttggaaaacaattacactgcgctgatgtcggccaagtactcaggttggtatgtcggcttcaccaagaaaggccggccacgcaaaggaccaaagactcgcgaaaaccagcaagacgtgcactttatgaaaaggtaccctaaaggacagcctgagcttcagaaaccctttaagtacaccacggttacgaagcgatcgagaaggattcgtccgacccatcccgca

SEQ ID NO: 141445 - DNA, 621 bp, Artificial Sequence
  derived and/or modified sequence
atgtacagcgctccatccgcatgtacttgtctttgcttgcacttcctcctgctgtgcttccaggtccaggtgctcgtggccgaagaaaacgtggatttcagaatccatgtggagaaccagactcgcgcgagggatgatgtgtcacggaagcagctgcgcctgtaccagctgtactcgcggacctcgggaaaacatatccaagtgctcgggcgcagaatctcagcgcgcggagaagatggagataagtacgctcagctcctcgtcgagactgataccttcggatcgcaagtgagaattaagggcaaagagactgagttttacctgtgcatgaacagaaaaggcaagctggtgggaaaaccggatggcacctcaaaggaatgtgtctttatcgagaaggtcctggaaaacaactacactgcacttatgtccgctaaatactcgggatggtacgtaggtttcactaagaagggtcggcccagaaagggccccaaaactagagagaaccagcaagacgtgcacttcatgaagcggtacccaaaaggccagccggaactgcagaagcctttcaagtacacgactgtcaccaagcggagccgtcgcatccggccgacgcaccctgcc

SEQ ID NO: 141446 - DNA, 621 bp, Artificial Sequence
  derived and/or modified sequence
atgtattcagcaccatccgcatgtacatgtctgtgccttcacttcttgctcctttgttttcaggtccaggtgctcgtcgccgaagaaaacgtggattttaggatacatgtggaaaatcagacaagagctagggatgatgtttctaggaaacagcttcgactctatcagctgtattccaggacttctgggaagcacatccaggtgctgggaagaagaatctctgccaggggagaggatggggataaatatgcgcagttactggttgaaacagacacattcgggtcccaggtcagaatcaaaggaaaagaaactgaattttatttatgcatgaatagaaaaggaaagctagtgggaaagcccgatggaacttctaaggaatgcgtgtttatagaaaaagtgctggaaaataattatactgcactcatgtccgctaaatactccggatggtatgtggggttcacaaaaaaagggagaccccggaaaggacctaaaacaagggaaaaccagcaggacgtccacttcatgaaacggtaccccaaagggcagcctgagcttcaaaaacccttcaaatatactacagtgactaaaaggtcaagacgaatcagacctacacatccagca

SEQ ID NO: 141447 - DNA, 621 bp, Artificial Sequence
  derived and/or modified sequence
atgtactcagcgccctccgcatgcacctgcctgtgccttcatttcctgttgctttgtttccaggtacaagtgctcgttgctgaagaaaatgtcgactttcgaattcacgtggagaatcagaccagggcaagagatgatgtgagtaggaagcaactgaggttataccagctgtattccaggacctcaggaaaacatattcaggttcttggcagaagaatctctgctcgcggtgaagacggcgacaagtacgcccaactcctggttgagactgacacctttgggtcccaggttcgcataaaggggaaagaaaccgaattctacctctgcatgaatcgcaaggggaaactggtgggaaagccagacggaacctcgaaagaatgtgtatttatagagaaggtgttggagaacaactatactgctcttatgtccgctaaatacagcgggtggtatgtgggctttacgaaaaagggaagaccgcgcaaggggccgaaaactcgcgagaatcagcaagatgtccactttatgaaaagatacccaaagggtcagccggagcttcagaaacctttcaagtacacaactgtgactaagcgaagtagaagaattcgtccaacccacccagcc

SEQ ID NO: 141448 - DNA, 621 bp, Artificial Sequence
  derived and/or modified sequence
atgtattctgcaccatcggcttgtacgtgtctttgtcttcacttcttgttgctttgtttccaagtgcaagttcttgtggccgaagagaatgtagatttcaggatccatgttgagaatcaaactagagcccgggacgacgtttcaagaaagcaactgcgcctttatcagttatactcacgtacttctggtaagcatatccaggttcttggtcgccgtattagtgctagaggcgaggatggcgataagtacgcacaactactggtcgaaactgacacatttggttcccaagtccggatcaaaggaaaagagacggaattctacctatgtatgaacaggaagggaaagttggtgggtaaacctgatggaacttctaaggaatgtgtttttatcgaaaaggttttagaaaataattacactgcgttgatgtctgccaagtactctgggtggtacgtcggtttcacaaagaaggggaggccgcggaaggggcccaaaacaagggagaaccaacaggatgtgcatttcatgaagcggtatcctaaggggcagcctgagctccaaaagcctttcaagtataccactgtcactaaaagatcacgacgaatccgccctacacatcccgct

SEQ ID NO: 141449 - DNA, 621 bp, Artificial Sequence
  derived and/or modified sequence
atgtactcagcaccttcggcgtgtacctgtctctgccttcacttcttgctgctctgttttcaggtccaggtgctcgtggccgaggaaaacgtggattttcggattcatgttgagaatcagacgagagcgagggacgatgtgtcgcgaaaacaacttcgcttgtaccagctttactcaagaacttcggggaagcatatccaagtgcttgggcggcgcatctcggcccgaggtgaagatggagataagtatgcccaactgctcgttgagactgatacttttggtagccaggtgcggattaagggaaaggagactgaattctacctctgcatgaatcgcaaaggtaagctggtgggaaagccggatggaacgtctaaagaatgtgtgtttattgaaaaggtccttgagaataactataccgcactgatgtcggccaaatacagcggatggtacgtgggatttaccaaaaagggacgaccgagaaaaggtccaaaaacccgcgaaaatcaacaagatgtgcatttcatgaaacggtacccaaagggccagccggaactgcaaaagccattcaaatacactaccgtgactaaaagaagcaggagaataagaccaacccatcccgca

SEQ ID NO: 141450 - DNA, 621 bp, Artificial Sequence
  derived and/or modified sequence
atgtacagcgccccaagcgcgtgcacttgcctctgtctgcacttcctgctcctttgttttcaagtgcaagtgcttgtggcagaagagaacgtcgacttcagaatccatgtggaaaaccagactcgagcgagggatgacgtgagccgtaagcagctccgcctctaccagctgtactcaaggacctcggggaaacacatccaggtgctcggccgccgcatttcagctcggggagaggacggtgataagtatgctcagcttctcgtcgaaaccgacaccttcggtagccaggtcagaatcaaaggcaaagaaactgagttttacctttgcatgaacagaaaaggcaaactggtgggaaagccagacggcacttccaaagagtgcgtgttcatcgaaaaggtgttggagaataactacacggcacttatgagcgccaaatactcgggatggtacgtcggcttcaccaaaaagggacgcccgcgaaaaggaccaaagacgagggaaaaccaacaggatgttcacttcatgaaacgctaccctaaagggcaaccggagctgcaaaagcctttcaaatacactacggtgactaagagatctcggaggatccgcccgacgcatccggcc

SEQ ID NO: 141451 - DNA, 621 bp, Artificial Sequence
  derived and/or modified sequence
atgtactctgcgccctctgcatgcacatgtctctgcctacacttcttgctgctctgtttccaagtgcaggtgctggtggcagaagagaacgtcgacttccgtatccacgttgagaaccaaacacgcgcacgcgacgacgtttctcggaagcagctccgcctttaccagctctactcccgtactagcggtaagcatatccaggttctagggcgccgtatctccgcccggggtgaggacggggacaagtacgcccaattgctggtcgagaccgatacgttcggatcgcaggtccggattaagggcaaggagaccgagttctacctttgcatgaaccgcaagggtaagctagttggaaagcctgacggtacctctaaggagtgtgtgttcattgaaaaggtgttggaaaacaactacaccgccttgatgtcggccaaatattcaggatggtacgtcggcttcaccaaaaaaggtcgcccgcgtaagggcccgaaaacccgtgaaaaccagcaggacgtgcactttatgaagcgataccctaagggtcaaccagagctccagaagcctttcaagtacaccacggtcacaaagcgctcccgacggatccgacctactcacccagcc

SEQ ID NO: 141452 - DNA, 621 bp, Artificial Sequence
  derived and/or modified sequence
atgtactcggcaccgtcagcttgcacctgcctgtgcctccatttcctgctcctttgctttcaagtgcaagttttggtggccgaggaaaatgtggacttcagaatccacgtggagaaccaaacccgggcacgcgacgatgtgtcgcgcaagcagctcagactgtaccaactgtactcgagaacttcgggcaagcacattcaggtgctcggtaggcgcatctcagcacggggggaggacggggacaagtacgcccagcttttggttgagacggacaccttcgggagccaagtccgaatcaagggaaaggagactgagttttacctgtgtatgaatagaaaaggcaagctcgtgggcaaaccggacggtacttcgaaggaatgtgtgttcattgagaaggtcctggagaataactacaccgccctgatgtcggccaagtactctggatggtacgtgggcttcaccaaaaaggggcgccctcggaaaggcccaaaaactcgcgagaaccagcaggacgtgcatttcatgaagcgctacccgaagggacaaccagaactccagaaacctttcaagtacaccaccgtgactaagcgcagcaggaggatccggcctactcaccctgcc

SEQ ID NO: 141453 - DNA, 621 bp, Artificial Sequence
  derived and/or modified sequence
atgtactccgctccttcagcgtgtacctgtctctgtctgcattttctcctgctgtgttttcaagtgcaagttctcgtcgcagaggaaaatgtggacttcaggattcacgtggaaaatcaaacccgggcaagagatgatgtgtcaaggaaacaactgcgcctgtaccagctttactcaagaacctccggcaagcacattcaggtgctggggagaaggataagcgccagaggagaggacggggacaagtacgcgcaacttttggtggaaactgacacctttggcagccaagtgcggattaagggtaaagaaacggagttctacctttgtatgaaccgtaagggtaagctggtcggaaagccggacgggacttcgaaggaatgcgtctttatcgaaaaggtgctggagaacaattacaccgcattgatgtccgccaagtacagcggttggtacgtgggattcaccaaaaagggtcggcctcgaaagggacccaagacccgcgaaaaccagcaagatgtgcatttcatgaagcgctacccaaagggacaacctgaactgcaaaagcctttcaagtacactacggtgaccaagaggtccaggagaattcggccgacccatccagcc

SEQ ID NO: 141454 - DNA, 621 bp, Artificial Sequence
  derived and/or modified sequence
atgtatagtgcaccgtcggcttgtacatgcctgtgccttcattttctgttactgtgctttcaggtccaggtcttagtcgccgaagaaaatgttgatttcagaatacatgtggaaaatcagacgagggcgcgggatgatgtgtcgcgtaaacagctgcgcttatatcagttatactcgcgcacaagtggaaagcacatccaggtactaggccggcgtatatctgctaggggggaggatggcgacaaatatgctcagctgcttgtggaaaccgatacgttcggatcgcaggtccgcatcaaaggtaaggagactgaattctacttgtgtatgaaccgaaagggaaagctggtgggaaagcctgatggaaccagtaaggagtgcgtttttatcgaaaaggtcttggagaataactatacggcacttatgtcggccaagtattcgggatggtatgtgggcttcaccaagaagggtcgccctcgtaagggccctaagacacgcgaaaaccaacaagatgttcattttatgaagaggtaccctaagggacaaccagagctacagaagcccttcaagtataccactgtgacaaaaaggtcgcggcgcatccggcccacccatcctgct

SEQ ID NO: 141455 - DNA, 621 bp, Artificial Sequence
  derived and/or modified sequence
atgtactccgcgccttccgcatgcacctgcctgtgcttgcactttctgttgctgtgtttccaggtgcaggttctggtggctgaggaaaacgtggatttcagaatccacgtcgaaaaccagacccgcgccagggacgatgtctcccgcaaacaactgagactctaccagctctactcccgcactagcggaaagcacatacaggtcctggggcggcggatctccgctcgaggagaggacggggacaagtacgcccagctgttggtcgagactgataccttcggctcccaggtgagaatcaagggaaaggaaactgagttctacctctgtatgaatcgcaagggcaagctcgtgggaaagccagacggaacttcaaaggagtgtgtgtttatcgagaaggtcctggagaataactacactgcactcatgtcggccaagtacagcgggtggtacgtggggttcaccaagaagggacgcccgcggaaaggtcctaagacccgcgaaaaccaacaggatgtccactttatgaaaagatacccgaagggtcagccggagcttcagaagccgttcaagtacacgaccgtgactaagcgctcgagaaggatccgccctactcatccggcc

SEQ ID NO: 141456 - DNA, 621 bp, Artificial Sequence
  derived and/or modified sequence
atgtattctgccccttcagcctgcacctgcctgtgtctccacttcttgctgctctgtttccaagtgcaggttttagtggccgaggaaaacgtggatttcagaatccacgtggagaaccaaacccgcgcacgagacgacgtcagtcgcaagcagctgaggttgtatcagctctactctcggactagtgggaagcatatccaggtgctcggcagacgaatatctgcccggggggaggacggagacaaatatgctcagcttcttgtggagacagatactttcggatcccaagttcgcattaagggtaaagagactgagttttatctatgtatgaaccggaaaggcaaactagtgggaaagccggacggcacctcaaaagagtgtgtgtttatcgagaaggtcctggagaataattacactgcactgatgagtgctaagtactccggatggtacgtcggtttcactaaaaaagggaggcctcgaaaagggccaaaaacgcgggaaaaccaacaggatgtgcacttcatgaagaggtatccaaaaggacagccagagctgcagaaacccttcaaatacacaacagtgacaaagaggtctagaaggatccgtccaactcatcctgcc

SEQ ID NO: 141457 - DNA, 621 bp, Artificial Sequence
  derived and/or modified sequence
atgtactcggccccgagcgcatgcacgtgcctgtgcctccattttctgttgctgtgcttccaggtccaagtcctcgttgcggaagaaaacgtggatttcaggatccacgtggaaaatcaaacgcgtgccagagatgacgtgtccagaaagcaactgagattgtatcagctttactctcgcacgtcaggtaagcacatccaggtcctgggccgcagaatttcggcgcgcggcgaagacggcgataagtacgcgcagctcctggtggaaactgacacctttggttcacaggtccgcatcaagggaaaggaaaccgagttttacctctgcatgaacaggaaaggaaagctggtgggcaagccggacggcacttcaaaggagtgcgtgttcatcgaaaaggtccttgagaataactatactgctctgatgtcggcgaaatactccggctggtacgtgggattcactaaaaaaggacgccctcgcaagggaccgaagacccgggaaaaccaacaggacgtgcacttcatgaagaggtacccaaaggggcaacccgaactgcagaagccgttcaaatacaccaccgtgaccaaaaggtcacgccggattcgtccaactcatccggcg

SEQ ID NO: 141458 - DNA, 621 bp, Artificial Sequence
  derived and/or modified sequence
atgtacagtgccccctcggcttgcacttgcctctgccttcattttctgctgctgtgcttccaggtgcaagtgctggtggctgaagaaaacgtggacttccggatccatgtggaaaaccagaccagagcgcgcgacgacgttagccggaaacagctgcgcctgtaccagttgtatagccgcacttccggaaagcatatccaggtcctgggtaggcgcatttcagccaggggagaggacggcgataagtacgcgcaactgctcgtcgagacggacactttcggctcccaggtgagaattaagggtaaagaaaccgaattctacctctgcatgaaccgaaaggggaagctggtgggaaagcccgacgggacctcgaaggagtgcgtgttcatcgagaaagtcctggagaacaattacaccgccctgatgtcggccaagtactcggggtggtacgtcggctttaccaagaagggtagaccgcggaagggcccgaaaacgcgggaaaatcaacaagacgtgcacttcatgaaaaggtacccaaaggggcagccagaacttcagaaaccattcaaatacacgaccgtcaccaagcggtcaaggcgcatcagacccacccatccggcc

SEQ ID NO: 141459 - DNA, 621 bp, Artificial Sequence
  derived and/or modified sequence
atgtactcagctcccagcgcatgcacctgcctttgccttcatttcctcctcctctgctttcaggtccaggttttggtagctgaggagaatgtcgactttcggatccacgtggaaaatcagacccgcgctagagacgacgtaagcaggaaacaactcaggctctatcaactgtactctagaacatctggaaaacacatccaggtgctcgggaggcgcatttccgcacgcggagaggacggggacaagtatgctcagcttttggtggagacagacactttcgggtcccaggtgaggataaagggaaaggagacggagttttatctctgtatgaacaggaaagggaagctggtgggcaagcccgatggcacttctaaagagtgcgtgttcatcgagaaggtactggagaataattacaccgcacttatgagtgctaaatatagtgggtggtatgtggggttcacaaagaaggggcggccacgcaaaggccctaagactagggaaaatcaacaggacgtgcacttcatgaagcggtatcccaaaggccagcccgagctccagaagcctttcaagtatactaccgtgactaagcggtcaagaaggatccgccccactcacccagca

SEQ ID NO: 141460 - DNA, 621 bp, Artificial Sequence
  derived and/or modified sequence
atgtattctgcaccaagcgcgtgcacgtgcctgtgtctgcattttctgttgctgtgcttccaggtccaggtccttgtggctgaggagaacgttgatttccgaatacacgtggagaatcagacacgtgcacgggacgatgtctccaggaagcaattaaggctttaccagctgtattctcgcacaagtggaaaacacattcaggtcttggggaggcgaatcagcgctaggggagaggacggcgataagtatgcccagctgctggtggagacagatactttcggttcacaggttcgcatcaaggggaaggaaactgaattttatctctgcatgaataggaaaggaaaattggtggggaaacctgatggaacctctaaggaatgcgtttttatcgaaaaggtgctggagaacaactacacggctctgatgagcgccaaatactctggatggtatgtgggattcacgaagaagggaaggcccagaaaagggcccaagaccagggagaaccagcaagatgtgcacttcatgaaaaggtatcctaaaggacagccagaacttcagaaaccttttaaatatacaactgtgaccaagcgcagtcggcgaattcgtccaacccacccagct

SEQ ID NO: 141461 - DNA, 621 bp, Artificial Sequence
  derived and/or modified sequence
atgtactccgccccgagtgcctgcacatgtctttgcttacacttcctactgctgtgttttcaagtgcaggttcttgtggccgaggagaacgttgacttccgaatacatgtggagaaccagactcgggccagggatgatgtttcacggaagcagctgagactgtaccagctgtatagtaggacttcagggaagcacattcaggtgttaggtcgaaggataagtgcccgcggcgaagatggtgacaaatacgctcaactccttgtagagacagatacattcggctcccaggtgagaatcaaggggaaggagaccgaattttacctctgtatgaaccgtaagggcaagcttgtgggcaaacctgacgggacaagtaaggagtgcgtgtttatcgaaaaagtgttggagaacaattacacagccttgatgagcgctaagtacagtggatggtacgtgggctttactaaaaagggccgtccaagaaagggacccaaaacaagagagaaccagcaggacgtgcattttatgaagcgttatcccaagggacagcctgaacttcagaagcctttcaaatacaccactgtgaccaaaagatctagacgaattcgtccaacccatccagca

SEQ ID NO: 141462 - DNA, 621 bp, Artificial Sequence
  derived and/or modified sequence
atgtactctgctcccagtgcttgcacatgtctttgtttgcattttttgcttctttgtttccaagtgcaagtgttagttgctgaagagaatgtcgatttccgtatccacgtcgaaaaccagactcgggctcgtgatgacgtctcacggaaacaattaagactttaccaactatactcaagaacatcaggcaagcatattcaggtcctcggaaggagaatttcggctagaggcgaagacggggataaatacgcacagttgcttgttgaaactgatacattcggatcacaagtgagaattaagggtaaggaaacagagttttatctatgcatgaatcgaaaaggaaagctggttggaaaaccggatggaacaagtaaagagtgtgtttttatcgaaaaggtgttggaaaacaattacactgcactaatgtcagctaaatattccggatggtatgttggtttcactaagaaagggcgtccacgtaaaggaccaaaaactcgtgagaaccaacaagatgtgcattttatgaaacgatacccaaagggacaaccagaactccaaaagccgtttaaatatactacagtcacgaaaaggtcacgacgtatccggccaacacatccagca

SEQ ID NO: 141463 - DNA, 621 bp, Artificial Sequence
  derived and/or modified sequence
atgtactcggctcccagtgcctgcacatgtctctgcttacatttcttgctgctgtgtttccaggtgcaagtactagtggccgaagagaacgtagacttccggatccacgttgagaatcagacacgcgctagggatgatgtcagtcgtaaacagcttcgcttgtatcagctctactctagaaccagtggtaaacatatacaggtccttgggagaagaatcagcgctcggggggaagatggggataagtacgctcagctcttagtggaaacagacacgttcggtagccaggtgaggatcaaagggaaggagacggaattttatttatgcatgaatagaaagggaaagctggtgggcaagcctgacggcacctccaaagagtgtgtgtttatcgagaaagtgttggaaaacaactacacagccctgatgtcggccaaatattccggttggtacgttggcttcacaaagaaggggcgaccacgcaaaggccctaagacacgtgaaaaccagcaggatgtgcattttatgaagaggtatccaaagggacagccagaactgcagaaacccttcaaatatacgactgtcacaaaaaggtccaggaggatccgaccgacccaccctgcc

SEQ ID NO: 141464 - DNA, 621 bp, Artificial Sequence
  derived and/or modified sequence
atgtacagtgccccatccgcttgcacttgtctgtgtctgcactttttgttactgtgttttcaggttcaagtccttgtcgcagaagaaaatgtggattttcgcattcacgttgaaaaccagaccagggccagggacgatgtatcacgaaaacagcttcgattgtaccagttgtactcacggacatcaggcaagcatatccaggtgcttggtaggcgcatttctgcccgtggcgaggatggggataagtacgcccagctgctggtagaaacagatacatttggatcacaggttaggattaaaggcaaagaaaccgagttttatctgtgcatgaacagaaaggggaagctcgtcgggaaaccagatggcacgtcaaaagagtgtgttttcatcgagaaggtgctggagaataactacactgcacttatgtccgccaagtatagcggctggtatgttgggtttactaaaaaaggtcgaccaagaaaaggccctaagacgagagagaatcagcaggatgtccactttatgaagcgctatccaaagggacaacccgagttgcagaaacccttcaaatacaccacagtgacgaaaagatcccgtaggatccgacccacccaccctgcc

SEQ ID NO: 141465 - DNA, 621 bp, Artificial Sequence
  derived and/or modified sequence
atgtatagcgcgccgtcggcctgcacgtgcttgtgcctgcatttccttctgctgtgtttccaggtgcaggtgctagtagcagaggaaaatgtcgacttcaggattcatgtggagaaccagactcgagcccgcgacgacgtgagtagaaagcagctgcgattgtatcaactgtacagtcgaactagtggaaagcatattcaagtgttgggtcgccgtataagcgccaggggagaggatggcgacaagtacgcccaactgctcgtcgaaacggacaccttcggtagccaagtcagaattaagggcaaggaaacggagttctacctctgtatgaaccgaaagggaaagctcgttggcaagccagacggcaccagcaaggaatgtgtgtttatcgaaaaggtgctggaaaacaattataccgctctcatgagcgcaaagtactccggctggtacgtggggtttactaaaaagggacgcccccgcaaaggacccaaaaccagagaaaatcaacaggatgtgcacttcatgaagcggtaccccaagggccaaccggagttacagaagccatttaagtacaccactgtcactaagcggtcccgcagaatacgccccactcacccggcc

SEQ ID NO: 141466 - DNA, 621 bp, Artificial Sequence
  derived and/or modified sequence
atgtatagtgcacctagtgcgtgtacctgtttgtgccttcattttctgctgttatgttttcaggtgcaggtgttagtagcagaagagaacgtagactttcggatccacgttgagaaccaaacccgagctagagatgatgtatctagaaagcagcttcgtctgtatcagctgtacagtcgcacaagcggcaagcacatccaggtattgggccgtaggatctcagctagaggggaggatggagataagtatgcccaactactggtcgaaaccgacacttttggaagtcaggtgcgcatcaaagggaaggagacggaattctacttatgcatgaatcggaagggtaagttggtcggaaagccggacgggacaagcaaggagtgtgtgttcatcgaaaaagtgttggaaaacaattacaccgccttgatgtctgcaaagtactctggttggtatgtgggatttaccaagaaagggagaccaagaaaaggacccaagacacgggaaaatcaacaggatgtccactttatgaagcgctaccccaagggccagccggagctgcagaaaccgttcaaatatacaaccgtcaccaagcgcagccgccgcattcggccaacacatccggcc

SEQ ID NO: 141467 - DNA, 621 bp, Artificial Sequence
  derived and/or modified sequence
atgtacagcgctccgagtgcgtgcacctgtctgtgcttgcacttcctgctgctctgctttcaagttcaggtgttggttgctgaagagaatgttgacttcaggatccacgttgagaaccagaccagggcgagagatgatgtgtcaagaaaacaacttagactctaccagctttatagccggactagtgggaaacatatacaagtcctcgggaggcgcatctcagccaggggtgaggacggggacaagtacgcacagctgctcgtcgaaactgacaccttcggctcccaggtcaggatcaagggaaaagagaccgaattctatctttgcatgaaccgcaagggcaaactggttggaaaacctgacggcacatcaaaagaatgcgtctttattgagaaagttctggagaacaactacaccgcactgatgtcagcaaaatacagtggatggtacgttggtttcactaagaaaggcaggccacgaaaagggcccaaaacacgggagaaccaacaggacgttcacttcatgaaacggtacccaaagggtcagccagagttgcagaaacctttcaaatacactaccgtgacaaagcgctccagacgaattcgcccgacccaccccgcg

SEQ ID NO: 141468 - DNA, 621 bp, Artificial Sequence
  derived and/or modified sequence
atgtattccgccccctctgcttgtacctgcctgtgtttgcacttcctgctgttgtgctttcaggtgcaagtgctggttgccgaagaaaatgtggatttcaggatccacgtggagaaccaaacaagggccagagatgacgtatccagaaagcaacttaggctttatcagttgtattcaagaacatctggcaagcatatccaagtactcggtcgcaggatatctgccagaggcgaggatggagacaagtatgctcagctcttggttgagactgacacctttggctctcaagtgcgcatcaagggaaaggaaaccgagttctatctttgtatgaatagaaagggcaagcttgtcggtaaacccgacggaacaagtaaagagtgtgtctttatcgagaaagttctggagaacaattataccgctctgatgtctgccaaatactctggctggtatgtgggcttcaccaagaagggtagacctcgtaagggtcccaaaactagggaaaatcagcaggatgtgcatttcatgaaaaggtacccaaagggccagccagagttgcagaagcctttcaaatacaccacagtgaccaagaggtcccgtcgcatcagacccacccatcctgcc

SEQ ID NO: 141469 - DNA, 621 bp, Artificial Sequence
  derived and/or modified sequence
atgtacagcgccccgtcagcgtgcacatgcctgtgtctgcatttccttttgctttgttttcaggtgcaggttctggtcgccgaagagaacgtggatttccgtattcacgttgaaaatcagaccagagccagggacgatgtgtcaagaaaacaattgcgactttaccagctttattccagaacatccggtaagcatattcaggttctcggcaggcggatttccgcccgcggcgaggatggagataaatatgcacaattacttgtggaaacagacactttcgggtcgcaggtgaggattaaagggaaagagaccgagttctacttatgcatgaataggaaggggaaactcgtgggcaaacctgatggtacttctaaagaatgcgtgtttattgagaaggtgctggaaaacaactacacggcactaatgtctgccaagtatagcggctggtacgtgggcttcactaagaagggcagaccacggaaaggccctaagaccagagagaatcagcaggatgtacattttatgaaacggtatccaaaaggacagcccgagctgcagaaaccctttaagtatacaactgtcactaaacgatcacgccgtatacgtcccacccatccagct

SEQ ID NO: 141470 - DNA, 621 bp, Artificial Sequence
  derived and/or modified sequence
atgtacagcgctccttctgcctgcacttgtctctgcttgcacttcctgctgctgtgttttcaagtgcaagtcctggtcgctgaagaaaacgttgacttccgcatccacgtggagaatcaaactcgggcacgggatgatgtgtcccgcaagcagctgaggctgtatcagctctactcgcgaacctcgggcaagcacatccaagtgctgggaaggcggatctcggcaaggggcgaggacggagacaaatacgctcaactcctcgtggaaactgacactttcggatcacaagtcagaatcaaggggaaagaaactgagttttacctgtgcatgaacagaaagggaaaacttgtgggaaaaccggatggcacctccaaggagtgcgtgttcatcgagaaagtgctggagaacaactacaccgccctgatgtcggcaaagtattccgggtggtacgtgggattcactaagaagggcagacccagaaaaggaccgaaaactcgggagaatcaacaggatgtccactttatgaagcggtacccaaagggacagccagagctccagaagccattcaagtacactactgtgactaagaggagcagaaggattcgccccacgcacccggct

SEQ ID NO: 141471 - DNA, 621 bp, Artificial Sequence
  derived and/or modified sequence
atgtactcagcgccatcggcatgcacgtgtctttgtctccactttcttctgctctgtttccaagtgcaggtgctcgtggcagaggaaaatgtcgattttaggatacatgttgaaaaccagacgcgggcgagagacgatgtgtccagaaagcaactcagactttatcaactctactccagaacctcggggaagcatatacaagtgctgggtcgaagaatttcggctcggggagaagatggagacaagtacgcacaacttcttgtcgaaacggatactttcggttcgcaggtgcgcattaagggtaaagaaactgagttttacctttgcatgaatcgcaaggggaagctcgtgggtaagccagacggtacctcaaaggagtgcgtgttcatcgagaaggtccttgaaaacaactacactgctctcatgagcgcaaagtattccggctggtacgtgggctttaccaagaagggacggcctaggaaggggcccaaaaccagggagaaccagcaagacgtccactttatgaagcgataccccaaggggcaaccagaactgcagaagcctttcaagtacactactgtgactaagaggtcgcggcgtattaggccaacgcatcccgcc

SEQ ID NO: 141472 - DNA, 621 bp, Artificial Sequence
  derived and/or modified sequence
atgtattccgcaccctctgcctgtacctgtctgtgtctccacttcctacttctgtgctttcaagttcaggtgctagtcgccgaggaaaacgtggatttccgcattcatgtggaaaatcagacgcgcgccagagatgacgtttcaaggaagcagctgcgcctttaccagctgtactctcgtacttctgggaaacatatccaagtcctgggcagaagaattagcgcccgtggagaggacggcgacaagtacgcacaacttctggttgagacggatacttttggctcacaggtgcggatcaaaggcaaggaaactgaattttacctgtgcatgaatcgtaagggcaagttagtcggcaaaccagacgggacttctaaggagtgtgtctttatagagaaagttctggagaataattataccgcactcatgtccgctaaatacagcggatggtacgttgggttcaccaagaaaggcagaccccgcaagggaccgaagacacgagagaatcagcaggacgtacattttatgaagagatacccgaaaggacagccagagctccagaaaccatttaaatataccacggtaaccaagcgaagcaggaggatcaggcccacacaccctgcg

SEQ ID NO: 141473 - DNA, 621 bp, Artificial Sequence
  derived and/or modified sequence
atgtacagcgcgccttctgcttgcacttgtctgtgtctgcattttttattactttgtttccaggtccaggttctggttgctgaggagaatgtagactttcggatacacgtagagaatcaaaccagagcacgagacgacgtctcccggaaacagttgcgcctgtaccagctttacagcaggactagcggcaagcacatccaagttctgggaaggcgaatttctgctcggggcgaggatggggataagtacgctcagttgttagtggaaacagacacgttcggctcgcaagtgcgaatcaaaggcaaagaaaccgagttttatctttgtatgaacagaaaaggtaaactagtggggaagccggatggcacaagcaaagagtgcgtgttcatcgagaaagttctggaaaacaattacaccgctttgatgtctgccaagtacagtggctggtacgtgggcttcaccaaaaaggggcgcccgcgcaagggccccaagactcgggagaatcagcaggatgtgcacttcatgaagcgatacccaaaagggcagccagagttgcagaagccattcaagtacactaccgttacgaagagatctagacggatccgaccgacccacccagct

SEQ ID NO: 141474 - DNA, 621 bp, Artificial Sequence
  derived and/or modified sequence
atgtactcggcaccttcagcgtgcacctgcctgtgcctccacttcctgctcctgtgtttccaggtgcaggtgctggtggccgaagaaaacgtcgatttccgcatccatgtggaaaaccagactcgggctcgcgacgacgtgtcgaggaagcaactgcggttgtaccaactctactcgagaacttccggaaagcacattcaggtgctggggagacgcattagcgcgcggggagaagatggtgacaagtacgcccagctgctggtggaaaccgacacgtttggttcgcaagtccgaatcaagggaaaggaaaccgagttttatctctgtatgaatcggaagggaaaactggtgggtaagccggacggaacctcaaaggagtgcgttttcatagagaaagttctggaaaacaattacacggcgctgatgtccgccaagtactcggggtggtacgtgggattcaccaagaagggtcgccctcggaaaggtccgaaaactcgcgaaaaccagcaggatgtgcactttatgaagcgctaccccaagggacaaccagaactgcagaagccgttcaaatacaccaccgtgaccaagagaagccggcggatcagaccaacccacccggcc

SEQ ID NO: 141475 - DNA, 621 bp, Artificial Sequence
  derived and/or modified sequence
atgtacagcgctccctcagcatgtacttgcctgtgccttcacttcctcctactttgttttcaggtccaggtcttagtcgcagaagaaaacgtggatttccggatccatgtggagaaccagacacgagcccgcgacgacgtgagccgcaagcaactgagactgtatcagttgtattcccgaacaagcgggaaacatatccaggtgctcggtcgtcgaatttcagctaggggcgaagacggcgataagtacgctcaattgctagttgagacagacactttcgggtctcaggttcgcatcaagggcaaggagacagagttttacctatgtatgaacagaaagggcaaactcgtgggtaagccggatggtacatccaaggaatgtgttttcattgaaaaagtgcttgaaaataattacaccgctttgatgtccgcaaagtattctggatggtatgttgggttcaccaagaaagggcgcccccgcaaaggcccgaagacgagggagaaccaacaggacgtacatttcatgaaaagatatccgaaagggcaacctgaattacagaagcccttcaaatataccaccgttacaaagaggtctcgacggattcgtcccacccaccctgct

SEQ ID NO: 141476 - DNA, 621 bp, Artificial Sequence
  derived and/or modified sequence
atgtacagcgccccctcggcctgtacctgtctgtgtctgcactttctgctcctctgttttcaggtccaagtcctggtcgctgaggaaaacgtggacttccggatccacgtggagaaccagacccgcgctagagacgacgtgtcccgcaaacaattgcgcctgtaccagctgtactcgcggacctcagggaagcatattcaagtgctgggacggaggatcagcgcccggggcgaagatggagacaaatacgcccagctgctggtcgaaaccgataccttcggttcacaggtgaggattaaggggaaggaaaccgagttttacctgtgcatgaaccgcaaaggtaagctggttgggaagcccgacgggacttcaaaggaatgcgtgtttatcgagaaggtgctggagaacaactatacggcgctcatgtctgccaaatactcgggatggtatgtcggtttcaccaaaaagggacgaccgagaaaaggccctaagacccgggaaaaccagcaggatgtccactttatgaagcggtacccgaagggacagccagaactgcagaagccgtttaagtacacgactgtgactaaacggtcccgcagaatcagaccgactcatccagcc

SEQ ID NO: 141477 - DNA, 621 bp, Artificial Sequence
  derived and/or modified sequence
atgtattccgctccctcggcctgcacctgcctgtgtttacacttcctgttgctttgcttccaggtgcaggtgctcgtcgcagaagagaacgttgactttcggattcacgttgaaaatcaaacaagagctcgggatgatgtcagccggaagcagttacggctttatcaattgtattcacgtacttcaggaaaacatattcaagtgctgggacggcgaatctccgcgcggggagaagatggcgataagtatgctcaactgctcgttgagacagatactttcggctctcaagtccgaattaaggggaaagagacagaattctacctctgcatgaacagaaaaggaaagctggtgggaaaacccgacgggaccagcaaagagtgcgtgttcatcgaaaaggtgctagaaaataactacacagccttaatgtctgctaagtactcaggatggtacgtgggattcacaaaaaaaggcaggccgcgcaaagggcccaagactagagagaaccagcaggacgtgcacttcatgaagcggtatcctaaggggcagcctgagctccaaaaacccttcaaatatacgaccgtaaccaaaaggagccgccggattaggccaacccatcctgcc

SEQ ID NO: 141478 - DNA, 621 bp, Artificial Sequence
  derived and/or modified sequence
atgtacagtgccccatccgcctgcacctgcctttgtctgcattttctgctcctctgtttccaagtgcaagtcctggtggctgaagaaaacgtcgatttccgcatccacgtggagaatcagactagagcacgggacgacgtcagtcgcaagcagcttcggctgtaccagctttatagccgcaccagcggtaagcacatccaggtcctcgggaggcggatcagtgcgaggggagaagatggagataaatacgcgcagctcttggttgaaactgatacctttggatcacaggtccgcattaaagggaaggagacggaattttacctctgtatgaacagaaagggtaaactcgtgggcaaacccgacggaactagtaaagagtgcgtgttcatcgagaaggtcctggaaaacaactacacagctttgatgtccgccaagtacagcggttggtatgtgggattcactaagaagggacgccctagaaaaggtccgaagactcgggagaatcagcaggacgtacacttcatgaaaagatatccaaagggacagcccgagcttcagaagccattcaaatatacaacagtcaccaagcgctcccgccgaatcaggccgacccacccggct

SEQ ID NO: 141479 - DNA, 621 bp, Artificial Sequence
  derived and/or modified sequence
atgtacagcgctcccagtgcttgcacctgcctgtgcctccactttcttctactgtgtttccaagtacaggtgttggttgccgaggagaatgtagactttaggatccacgtggagaaccaaaccagggctcgcgacgatgtgagccgaaagcagctcaggttgtaccaattgtacagtcgcacatccggcaagcacatacaagtgctgggcaggaggattagcgcccggggtgaggatggcgataagtacgcacagcttcttgtcgagaccgacacttttggctcccaggttcgcatcaaagggaaggaaactgagttctatctctgcatgaacaggaaggggaagctggtgggcaagcctgacggaactagcaaggagtgtgtctttatagagaaagtcctcgagaataactacacggctcttatgagcgctaagtatagcggttggtatgtcgggtttacgaagaaaggtcggccacggaaagggcccaaaactagagagaaccagcaggatgttcatttcatgaagcgttatccaaaggggcagcctgagctgcagaagcctttcaaatatactacagtgaccaagaggagccgacgcatccggcccactcatcccgcc

SEQ ID NO: 141480 - DNA, 621 bp, Artificial Sequence
  derived and/or modified sequence
atgtatagtgccccctctgcttgcacatgcctgtgtctacatttcctgctgctctgctttcaggtgcaggtgctggtcgccgaggaaaacgtggattttaggatccatgttgagaaccagacgcgggcgcgcgatgacgtgtcaaggaagcagctgcgcctgtaccagctgtatagtagaactagcgggaagcacatccaggttctcggacgccgtattagcgcaaggggggaggatggggataagtatgcccagctcttagttgaaactgatacatttggatcccaggtaaggatcaagggcaaagaaacggagttctacctctgcatgaatagaaagggaaaactggttggcaagcctgatggtacatcgaaggagtgtgtcttcatcgaaaaggttttagaaaataactataccgccctcatgtcagctaaatatagcggttggtacgtcggttttaccaagaaggggcggccacggaaaggtccaaaaacaagggagaaccagcaagacgttcacttcatgaagagatatcctaagggacagcccgagcttcagaaaccatttaagtacacgactgtgacgaaaaggtcgagacggatacggcctactcaccctgca

SEQ ID NO: 141481 - DNA, 621 bp, Artificial Sequence
  derived and/or modified sequence
atgtattccgccccctccgcgtgcacatgcctgtgtctgcatttccttctgctgtgcttccaggtgcaggtgcttgtggctgaagagaacgttgacttcaggattcatgttgagaatcagacaagggcaagagacgatgtttctaggaagcagcttcgcctgtaccaattatactctagaacgtccggcaaacacatccaggtactcggacgacgcattagtgccagaggcgaagacggcgataagtatgctcagcttctagtcgagacagacacattcgggtctcaggtgagaatcaagggcaaggagaccgagttctatctgtgcatgaacaggaaggggaaactagtgggcaagcctgatgggaccagtaaagagtgcgtctttatcgagaaagtgttggaaaacaactacaccgctctgatgagtgccaagtactcaggatggtacgtaggatttacaaaaaagggccggccccggaagggcccgaaaaccagggaaaaccagcaggatgtgcacttcatgaagcgctaccccaaaggccagcccgaacttcagaaacctttcaagtacaccacagtgactaagaggagcaggaggattagaccaactcaccccgct

SEQ ID NO: 141482 - DNA, 621 bp, Artificial Sequence
  derived and/or modified sequence
atgtacagtgctccatctgcctgtacttgtctgtgtctccactttctcttactgtgtttccaggtccaggttctagtggccgaagaaaatgttgatttcagaatccacgtcgaaaaccagactagggccagggacgatgtttcacgtaagcaactgcggctctaccagttgtactcgaggacttccgggaaacatattcaggtcctgggacgccgaataagcgcgagaggtgaagatggtgacaaatacgcgcagctactagtggagactgacacgttcggctcacaggtgcggataaaaggaaaagaaactgagttctacttatgtatgaataggaaagggaagctggtggggaagcctgacggaacatcaaaagaatgtgtttttattgagaaggttctagagaacaactacaccgctctgatgtcagctaagtactcggggtggtatgtgggcttcaccaaaaagggaagaccacgaaagggacctaagacacgcgagaatcagcaggatgtccacttcatgaaaaggtaccccaaggggcagccagaactccagaaaccatttaagtacacgacagttacgaagcggagccgtagaattaggcctactcacccggcc

SEQ ID NO: 141483 - DNA, 621 bp, Artificial Sequence
  derived and/or modified sequence
atgtactccgcaccttcagcttgcacatgcttatgtcttcactttttgttgttgtgctttcaggtacaggtactcgtcgcagaggagaatgtcgactttaggatccacgtggaaaatcagacacgagcccgcgacgacgtttctcgaaagcagctgcgcctttaccagctctacagccgcaccagcgggaagcacatacaggtcctaggccggaggattagtgccagaggcgaggatggagataagtatgctcagctgctcgtagagacagatacctttggcagccaggttaggatcaagggaaaagaaaccgaattctatctctgcatgaaccgtaaaggtaagttggtgggaaaacccgatggcacctcgaaggagtgtgtgttcatcgagaaagtgctggaaaacaattatacagcactcatgtcggctaagtactccggctggtatgtcgggttcacgaaaaaagggcgtccaaggaagggtccaaaaactagagagaatcagcaggacgttcacttcatgaagagatacccaaagggccaaccggagctgcaaaagcccttcaaatataccactgtgacaaaacgctctcggcgcattcgtcctacccaccctgcc

SEQ ID NO: 141484 - DNA, 621 bp, Artificial Sequence
  derived and/or modified sequence
atgtactcagctccttcggcatgtacctgcctgtgtttgcacttcctgctgctgtgctttcaggtccaagtcctggtggctgaagaaaacgtggactttaggatccacgtcgaaaaccaaactcgtgcacgcgatgatgtgtcaagaaaacagctgcgcctctaccaactgtacagcagaacttcaggaaagcatattcaagtccttggtagacggatctcggcaagaggtgaggacggagataagtacgcccagctgctcgtggagactgacacctttgggtcccaagtccggattaaggggaaggagactgaattctacctttgtatgaaccgaaaaggcaaacttgtgggcaagccggatggtacctcgaaagaatgcgtgtttattgagaaagtgcttgaaaacaactacaccgcgctgatgtcagcaaagtatagcggctggtacgtgggctttaccaagaagggacgtccacggaagggacccaaaacccgcgagaaccagcaggatgtccacttcatgaaaagataccctaagggacaacctgagctgcagaagcctttcaaatacaccaccgtcactaaaagatcacggagaattaggccgacccatcccgca

SEQ ID NO: 141485 - DNA, 621 bp, Artificial Sequence
  derived and/or modified sequence
atgtactcagcgccgtcagcctgcacctgtctgtgcctgcacttcttgctgctttgcttccaggtccaggtcctggtcgccgaagaaaatgtggatttcagaatccatgtcgagaaccaaaccagagctagagatgatgtgtcacggaagcagctgcggctgtaccagctgtacagccgcactagcggaaagcacatccaggtgttgggacggaggatctcagcgcggggagaggacggcgacaagtacgcacagctgctcgtggaaaccgatactttcggctcacaagtccgcattaagggaaaggagactgaattctacctttgtatgaatcgcaaagggaagctcgtgggtaagccagatggaacttcgaaagagtgcgtgttcatcgagaaggtgctggagaacaattacaccgcgctgatgtctgcaaagtacagcggatggtacgtgggatttaccaagaagggccggccgagaaagggtccaaaaacccgtgaaaaccaacaggacgtgcatttcatgaaaagatacccaaagggacaacctgagttgcagaagccgtttaagtacaccaccgtgaccaagcggagccggcgcatccggccaactcatccggct

SEQ ID NO: 141486 - DNA, 621 bp, Artificial Sequence
  derived and/or modified sequence
atgtactccgcaccttcggcatgtacctgtctgtgcctgcacttcttgttgctttgttttcaagtgcaggtccttgtggccgaagaaaatgtcgatttcagaatccacgtggaaaaccagactagagcgcgggacgatgtgtcacggaaacagctgcggctgtaccaactttacagcagaacctcaggtaagcatatccaggtgctggggcgtcgaatttccgcacggggagaggacggagataagtacgcacaactgcttgtggaaactgacacctttggtagccaggtcagaataaagggaaaagaaactgaattctacctgtgtatgaatcgcaaaggaaagctcgtggggaaacctgacggcacttcgaaagaatgtgtgtttatcgagaaagtgttggaaaacaactacactgcgttgatgtccgctaagtactccggatggtacgtggggtttacgaagaagggacgtcctagaaagggccctaagacccgcgaaaaccaacaagacgtgcatttcatgaaacggtatcctaagggccagccagaactgcaaaagccatttaagtacacgaccgtcactaaaagatcccgccggattcgacccacccatcccgca

SEQ ID NO: 141487 - DNA, 621 bp, Artificial Sequence
  derived and/or modified sequence
atgtattctgccccatcagcatgtacatgtctgtgcctgcattttctcctcctgtgcttccaagtgcaagtactcgtcgccgaggagaatgtagatttccgcattcatgtggagaatcaaacgagggcgagagatgacgtgagcagaaagcagttgcgactctaccagctctactcccggaccagtggcaaacacatccaggtgctcggcagaaggattagtgcgcggggcgaagacggagataaatacgcgcaactcttggtggagacagatactttcggatcccaggtgcggataaagggcaaagaaactgaattctacctgtgtatgaatcggaaaggtaaacttgtcggaaagccagacggtacatctaaagaatgcgttttcatcgaaaaggtgcttgagaataattatactgctctgatgtccgcaaaatactcaggatggtatgtgggcttcaccaagaaaggacggccacgcaaaggtcccaagactcgcgagaatcagcaagatgtgcatttcatgaagaggtacccaaagggtcagccggagctgcaaaagccattcaaatacaccacggtgacgaaacgaagtcgaaggatacgcccgacccatccggct

SEQ ID NO: 141488 - DNA, 621 bp, Artificial Sequence
  derived and/or modified sequence
atgtacagcgcaccctccgcatgcacttgtctttgcctgcattttctgcttctttgttttcaagtccaggtgctggtcgcagaggaaaacgtcgattttcgcatccatgtcgaaaaccaaactagagcgcgggatgatgtatctcggaagcagctgagactgtaccaactgtatagtcgaacctcgggcaagcacatacaagtgctggggagaagaatttccgcacgaggagaagatggtgataagtacgcacagctgctcgtcgaaacggatacttttgggtcgcaggtccggatcaagggtaaggaaaccgaattctacctctgtatgaaccgtaaaggaaagctcgtgggaaagccggacggaactagcaaggaatgtgtgtttattgagaaggtgcttgaaaacaactacactgcactgatgtccgcaaagtattccggatggtacgtgggttttactaagaagggcagacctagaaaggggcccaagacgcgtgaaaatcagcaggacgtgcatttcatgaagaggtacccaaaagggcagcctgaacttcaaaaaccgttcaaatacactacggtgaccaagcggtcaaggcggatccgacctactcaccctgcc

SEQ ID NO: 141489 - DNA, 621 bp, Artificial Sequence
  derived and/or modified sequence
atgtatagtgccccaagtgcttgtacatgcctatgccttcactttctcttactatgctttcaggtacaggtactggtcgctgaagaaaacgtcgatttccggatacatgtcgaaaatcagactcgggcccgggatgatgtgtcccgcaagcagctgcgcctgtatcagctgtactcacggacttctgggaaacacatccaggtgctcggaagacgcatatctgctcgcggagaagacggggataaatatgcgcagttgctggttgagacagatacatttgggtctcaggtgcggatcaaggggaaagaaactgaattttatctttgcatgaataggaaaggaaagctagtcgggaaacccgatggaacgtctaaagaatgtgtgttcatagaaaaagtgctcgaaaataattatactgcccttatgtctgcaaaatattccgggtggtatgttggatttactaaaaaagggcgaccaagaaaaggacccaaaactagagaaaatcaacaggatgtccactttatgaaaaggtaccctaaggggcagcccgaactccagaaaccatttaaatacactacagtcactaaaagatcacgaagaatccggcccactcaccccgcc

SEQ ID NO: 141490 - DNA, 621 bp, Artificial Sequence
  derived and/or modified sequence
atgtattcagcacctagcgcatgcacttgcctttgtctccactttctgcttctgtgttttcaggtgcaggtgctggtcgcggaagaaaacgtcgacttcaggatccacgtggagaaccaaacgcgtgcccgggacgacgtgtcgcggaaacagctgcggctttaccaactttactcgcgtacttcggggaagcacatccaggtgctcggacggcgcattagcgcacggggagaagatggtgataagtacgcccagttgcttgtcgaaaccgatacttttgggtcacaagtccggattaaggggaaggaaactgaattctacctgtgcatgaaccggaagggaaagctggttggaaagccagacggcacttcaaaggagtgtgtgtttattgaaaaagtgctggaaaacaactacaccgcacttatgtcggcaaagtactcgggatggtacgtgggtttcaccaagaagggccgcccccggaagggacctaaaactcgtgaaaatcaacaggacgtgcatttcatgaagcgatatccaaaaggtcaacctgagttgcaaaaaccattcaaatacaccaccgtcactaaacgctcgcgacgaattaggccaacccatcccgca

SEQ ID NO: 141491 - DNA, 621 bp, Artificial Sequence
  derived and/or modified sequence
atgtactcagctccctctgcctgcacctgtctgtgtctgcactttctgcttttgtgcttccaggtgcaagtgctcgtggccgaggagaacgtggacttccgtattcacgtagagaatcagactagggcaagagatgatgtgtccaggaaacagctgaggctataccagctctacagcagaacgagcggtaagcacattcaggtgcttgggaggcggatatcagcacggggggaggacggcgacaaatacgcccaattgctagtcgagactgacacgtttgggagtcaggttaggatcaaaggtaaggagacggagttctacctatgcatgaaccgaaagggcaaactggtgggcaagcccgacggcaccagtaaagaatgcgtgtttattgaaaaggtactggagaataactataccgccctcatgagcgccaaatactcagggtggtacgttggcttcacaaagaagggtcggccacgcaagggcccaaagacgcgggaaaatcagcaggatgtgcactttatgaagcggtaccctaaggggcagccagagcttcagaagcctttcaagtataccacagttactaaacgtagtcggagaatccgacctactcatccagca

SEQ ID NO: 141492 - DNA, 621 bp, Artificial Sequence
  derived and/or modified sequence
atgtattcggctccatcagcctgtacttgcctttgcctgcatttcctgctgctgtgtttccaggttcaggtcctcgtggccgaagaaaatgtggacttcaggatccacgttgagaatcaaactagggctcgcgatgatgtgtctagaaagcaactgagactgtaccagttgtatagtagaacatcgggaaagcatattcaagtcctgggccgccgcatttccgcgcggggggaagacggagacaaatatgcacaactgctggttgaaacagatacatttggctcgcaggtcagaataaaaggtaaggagaccgaattttatttgtgcatgaatcgaaaagggaaactcgtcggtaagcccgatgggacatccaaagagtgtgtatttattgagaaggtactggagaataactatactgccctaatgagcgccaagtattctggctggtacgtcgggttcacgaagaaaggaagacctcggaaggggccgaagacacgggagaatcagcaggacgtgcatttcatgaaacggtatcccaaaggacagccggagctgcaaaaaccgttcaagtatacaactgtgaccaagagatcccgacgaattcgcccaacacatccggct

SEQ ID NO: 141493 - DNA, 621 bp, Artificial Sequence
  derived and/or modified sequence
atgtatagtgccccatctgcttgtacctgcttgtgcctgcactttctgctgctttgctttcaagtccaagtgctcgtggctgaagagaacgttgatttccggatacatgtggagaatcaaacgcgtgcccgcgacgacgtgtctaggaaacaattgagattatatcagttatattcacgcaccagtggtaagcatatccaagtgctcggccgaagaatcagcgctcgtggggaggatggcgacaaatatgcccagctgctggtggagactgataccttcgggtcacaggttcggattaaaggcaaagagactgaattctatctctgcatgaacagaaagggtaagttagtcggcaaaccagatgggacctctaaggagtgtgtcttcatcgagaaagtgctggagaataattataccgctcttatgtctgctaagtatagtgggtggtacgtgggctttacaaagaaaggcagacctcgaaaaggccctaaaaccagggagaaccaacaagacgtgcattttatgaaacggtatcccaaaggacaacctgagctgcagaagcctttcaaatacactacagtgactaaacgcagtagaagaatcagacccacacacccggct

SEQ ID NO: 141494 - DNA, 621 bp, Artificial Sequence
  derived and/or modified sequence
atgtactcagcacctagcgcatgtacttgtctttgtctgcacttcctgctcctttgttttcaggttcaggtgcttgtggccgaagaaaatgtggactttcggattcatgtggaaaaccaaacgagggcacgggacgacgtgtcgagaaaacagcttcggctctaccagttgtactcgaggacttcgggtaagcatattcaggtgctcgggcgaagaataagcgcgcgaggagaagatggcgataagtacgcacaactgctggtcgaaacggatactttcggctcccaagtcaggattaagggcaaagagactgagttttacctttgcatgaatcgtaaaggaaaacttgtgggcaaaccagacggcacctccaaggaatgtgtgttcattgagaaagtgcttgagaacaattacacggcactgatgtccgcgaaatacagcgggtggtatgttggattcaccaagaagggccggcctaggaagggcccaaagacccgcgaaaaccaacaggacgtgcatttcatgaaaagatacccaaaaggtcagcctgagttgcagaagccctttaagtacactaccgtcaccaagcggtcgagacggattagacccactcacccggca

SEQ ID NO: 141495 - DNA, 621 bp, Artificial Sequence
  derived and/or modified sequence
atgtactcggccccgtcagcgtgcacttgtctgtgcctccacttcctcctgctctgctttcaagtgcaagtgctcgtggcagaagaaaacgttgatttccgcatccacgtggagaatcagacgagagcccgtgacgatgtgagccggaaacaactcaggctgtaccagctctattccagaacttccggcaagcatatccaggtcctgggacggcggatctcagcacgcggcgaggatggagataagtacgcgcagctgctggtggagactgacacttttggatcccaggtccgcatcaaggggaaagaaactgaattctacctgtgtatgaatcggaaaggcaagctggtcgggaaaccggatggcacctcgaaggagtgtgttttcatcgagaaggtgctggagaacaactacactgctctgatgagcgccaaatactctggatggtacgtgggatttaccaagaaggggaggccgagaaaaggtccgaaaacccgtgagaaccaacaggacgtccactttatgaaaagatacccaaagggacaacctgaactgcaaaagcccttcaagtacaccactgtcactaagagaagccggagaatccgcccaactcatccggca

SEQ ID NO: 141496 - DNA, 621 bp, Artificial Sequence
  derived and/or modified sequence
atgtactcggcaccatcggcttgcacctgtctgtgccttcactttctccttctctgcttccaagttcaggtcctggtcgcagaggagaacgttgattttagaatccacgttgagaatcaaaccagagccagggacgatgtgtcacgtaaacagttgaggctgtaccagctttatagcagaacgtccggtaaacacatccaagtgctggggcgtcggatttcagcgcgcggagaagatggtgacaagtacgcacaattgttggtggaaactgacacctttggaagccaagtgcgcattaagggaaaggagactgaattctacctctgcatgaaccgaaagggaaaacttgtggggaagcctgacggtactagcaaagagtgtgtgtttatcgagaaggtgcttgaaaacaattacactgcactgatgtccgccaagtacagcggttggtatgtcggatttaccaaaaaagggcgtcctcgcaagggacccaaaactagagaaaaccagcaggatgtgcatttcatgaagcgatacccaaagggccaacctgaacttcagaagccattcaaatacacgactgtgaccaagcgttcccggcggattcgtccaacgcatccggca

SEQ ID NO: 141497 - DNA, 621 bp, Artificial Sequence
  derived and/or modified sequence
atgtatagcgctccttctgcatgtacatgcctttgcctgcactttctcttactctgtttccaggtccaggtcctggtggcagaggagaacgttgatttcagaatacacgtggagaaccagacccgagcccgggatgatgttagtaggaagcagttgcgcctgtaccagctgtatagtcggacatcaggcaagcacatccaggtgttgggaagacgcatttccgcccggggcgaggacggagacaagtatgcacagctgctggtggaaaccgatacctttgggtctcaagtgcgcatcaaggggaaggaaacagagttctacctgtgcatgaaccgcaagggaaaacttgttggtaaacctgatgggaccagtaaagagtgtgtgtttatagaaaaggtgctggaaaacaattatactgctctcatgtccgctaagtattctggatggtacgtggggttcacaaaaaagggacggccccggaagggcccaaagaccagagaaaaccagcaagatgtgcactttatgaagaggtaccctaagggtcaacctgagcttcagaaacctttcaaatacacaacagtcactaagaggtctcgacgtatacgccccacacatccggca

SEQ ID NO: 141498 - DNA, 621 bp, Artificial Sequence
  derived and/or modified sequence
atgtacagtgcgcctagcgcctgcacatgcctatgtctgcacttcttactcttgtgcttccaagtgcaggtgttggttgccgaagaaaacgtcgattttcgcattcatgtagaaaaccaaacccgcgctcgcgatgacgtgtcgcgcaaacagctgcgactgtatcagctgtactcaagaacctctggcaagcacattcaggttctgggtcgccggatttcggcacgtggggaagatggagacaaatacgcgcaactactggtggaaacggacacatttggctctcaagtccggattaaaggtaaagagactgagttctatttatgcatgaataggaagggtaagctggtgggtaaacctgatggcacgagcaaagaatgtgtctttatagagaaagttcttgaaaacaactatacagcgcttatgtccgccaagtattccggatggtacgttggctttaccaagaagggaaggcctcgcaaagggccgaagactcgagagaaccagcaagatgtgcatttcatgaagcggtatcctaagggtcagccagaactacagaagccatttaaatacacgacggtgacaaagagaagtcgtagaatcaggcctacgcaccctgcg

SEQ ID NO: 141499 - DNA, 621 bp, Artificial Sequence
  derived and/or modified sequence
atgtactcagcaccaagtgcctgcacatgtctgtgcctacacttcctactcctatgctttcaggtgcaggttctggttgcagaggagaatgtggactttcgcattcacgtagagaatcaaacaagggcccgggatgatgtctctaggaagcagttgaggctttatcaactgtacagccgtacgagcggcaagcacattcaggtcctggggcgccgcatttcggcccgcggagaggatggggataagtatgcccagctcctggtggagaccgacaccttcggaagtcaggtaaggatcaagggcaaggagacggaattttacctgtgcatgaaccggaaaggtaagctggtcggaaaacctgatggaacttcaaaggagtgcgtgttcatcgaaaaagtactggagaataattacactgccctgatgtctgccaaatattctgggtggtacgtggggttcaccaagaaaggtcggccgcgcaagggacccaagactagggagaaccagcaggatgttcatttcatgaagcgatatcccaaaggacaaccagagctccagaagccattcaaatacactacagttacgaagaggagtcgaaggattaggcccacacatccagct

SEQ ID NO: 141500 - DNA, 621 bp, Artificial Sequence
  derived and/or modified sequence
atgtattctgctcctagcgcctgtacgtgcctatgtcttcactttttactcctttgttttcaggtgcaggttctggttgctgaagaaaatgtggatttcaggattcatgttgagaatcaaacccgggcacgtgacgacgtaagcaggaaacagctgagattgtaccaactgtattccagaacgtcgggaaaacacatacaggtgctaggccggaggatctccgcacggggggaggatggcgacaagtatgcccaattgttagtggaaacagacacattcggcagccaggtgcgtataaaggggaaggagactgaattctacctgtgtatgaatcggaaagggaaactggtcggcaagcctgacggcacctcaaaggagtgtgtgttcattgagaaggtcctggaaaataactatactgcattgatgagcgccaagtacagcgggtggtacgttggatttaccaaaaagggcagacctagaaagggacctaagacgcgtgaaaatcaacaggacgtgcattttatgaagcggtaccctaaaggacaacccgaactgcagaagccgttcaagtatacaactgtcactaagcggtcgcgaaggatacggcccacgcatccagcc

SEQ ID NO: 141501 - DNA, 621 bp, Artificial Sequence
  derived and/or modified sequence
atgtactccgccccgagcgcatgcacttgcctctgtctgcacttcttgctgctgtgttttcaagtgcaagtcctggtggcagaagagaacgttgacttccggatccatgtggagaatcaaacgcgcgctcgggacgacgtgtcgcgaaagcaactcagactctaccaactgtattccaggacctcgggaaagcacatccaggtgcttggacgacgcatttcagccaggggggaagatggcgacaaatacgcgcagctgttggtcgaaactgatacgttcggttcacaagtccgcatcaagggaaaggaaacggaattctatctttgcatgaatcgcaagggcaagctggtcggaaagccggatggaacttcgaaagagtgcgtgtttatcgaaaaagttttggagaacaattacaccgctctcatgtccgcgaaatactctggctggtatgttgggttcaccaagaaaggacggccaagaaagggccctaagactcgggaaaaccagcaagacgtccatttcatgaagagataccctaagggtcagcccgaacttcagaagcccttcaagtacactaccgtcactaaacgcagccggcgcatccggccgacccaccccgcc

SEQ ID NO: 141502 - DNA, 621 bp, Artificial Sequence
  derived and/or modified sequence
atgtacagcgcgccgtcggcctgcacctgtctgtgcctccattttctcctgctgtgttttcaagttcaagtgctcgtggcagaagaaaacgtcgactttcgtatccacgtcgaaaaccaaactagagcgcgggatgatgtcagcagaaagcagctgcggctctaccagctgtactcgcggactagcgggaagcacattcaagtgctgggaagaagaatctcggctcggggggaggacggagataagtatgcacagctgcttgtggaaacggacacttttggttcccaagtgcgaataaaggggaaggaaaccgagttttacctctgtatgaatcgcaagggaaagctggtgggcaagccagacggaacctccaaagaatgtgtctttattgaaaaggtgcttgagaataactacaccgcactgatgtctgcaaagtactccggttggtacgtcggtttcaccaagaaggggcggccaagaaaaggccccaagactcgcgagaaccaacaggatgtacatttcatgaagaggtacccgaagggtcaacctgaacttcaaaagcctttcaagtacaccactgtgactaagcggagtaggcgtattcgaccaactcacccagca

SEQ ID NO: 141503 - DNA, 621 bp, Artificial Sequence
  derived and/or modified sequence
atgtacagcgcaccatcagcttgtacctgtctgtgccttcattttctgctgctgtgttttcaagtccaggttctcgttgctgaggagaatgtcgatttccgaattcacgtggagaaccagacaagggcaagggatgacgtgtcacggaagcagttgagactgtaccagctatacagccgaaccagtgggaagcacatccaagtcctgggcagaagaatctccgctcggggggaagatggagacaagtacgctcaacttcttgtggaaacagacactttcgggtcacaggtgcgtatcaagggcaaagagactgagttttacttgtgcatgaacaggaaagggaaactagtgggaaagcccgacggtaccagtaaggagtgcgtcttcatcgagaaagtgttagagaacaactacacggccctcatgagtgccaaatatagcggctggtatgtgggattcacaaaaaagggaaggcctagaaaaggccctaaaactagagagaatcagcaggatgtgcacttcatgaaacggtaccctaaggggcagcccgagctgcaaaagcctttcaaatacactaccgtgacaaagcggtcaagaaggatcaggcctacacatcccgct

SEQ ID NO: 141504 - DNA, 621 bp, Artificial Sequence
  derived and/or modified sequence
atgtactcggcaccttcggcctgtacctgtctctgccttcactttcttcttctttgtttccaagtgcaagtcctggtggcagaggagaatgtcgactttagaattcatgtggagaatcaaactcgagccagagacgatgtctcacgtaagcaattgaggctctaccagctctactcacgcacctcaggaaagcacattcaagtgctgggaagaagaatctctgcccgcggggaggacggagacaaatatgctcagcttctggtcgagactgatacctttggttcgcaagtgcgaattaagggaaaggagactgagttttacctctgcatgaatcgtaagggaaaattggttggaaagcctgatgggacttccaaggagtgtgtgtttatcgaaaaggtgctggaaaacaactacaccgcacttatgtcggccaagtactccggatggtacgtgggattcaccaaaaagggccggccaaggaagggacctaaaacccgggaaaaccagcaagatgtccactttatgaaacgctacccgaagggtcagccagaactccagaagccgttcaagtacaccactgtcaccaaacgatccagaagaatcagaccaacccaccccgca

SEQ ID NO: 141505 - DNA, 621 bp, Artificial Sequence
  derived and/or modified sequence
atgtactctgctccctctgcctgtacgtgtctgtgcctacacttcctcctgttgtgctttcaggttcaggtccttgtggcagaagagaacgtggactttagaattcatgtggaaaatcaaactcgtgccagagatgatgtgagtaggaagcagctccgactgtaccagctttatagcaggaccagtggaaaacacatccaggtccttgggcgaagaatttcagctcgaggagaagacggcgataagtacgcgcagctcctcgttgaaaccgatactttcgggtctcaagtccgaatcaaaggcaaggagacggaattctatctgtgtatgaacagaaagggtaaactcgttggcaagccggacgggactagtaaagaatgtgtattcatagagaaggttcttgaaaacaactacacagccctgatgagcgccaaatactcagggtggtatgtgggctttaccaaaaaaggccgaccgaggaagggcccgaagactcgggagaatcagcaggatgtgcacttcatgaagaggtatccgaagggccagcctgagttgcagaagcctttcaagtacacgactgtgactaagcgaagcaggagaatccgccctacccaccccgcc

SEQ ID NO: 141506 - DNA, 1986 bp, Artificial Sequence
  derived and/or modified sequence
cgatgcgcacggccggagagacgcggaggaggagacatgagccggcgggcgcccagacggagcggccgtgacgctttcgcgctgcagccgcgcgccccgaccccggagcgctgacccctggccccacgcagctccgcgcccgggccggagagcgcaactcggcttccagacccgccgcgcatgctgtccccggactgagccgggcagccagcctcccacggacgcccggacggccggccggccagcagtgagcgagcttccccgcaccggccaggcgcctcctgcacagcggctgccgccccgcagcccctgcgccagcccggagggcgcagcgctcgggaggagccgcgcggggcgctgatgccgcagggcgcgccgcggagcgccccggagcagcagagtctgcagcagcagcagccggcgaggagggagcagcagcagcggcggcggcggcggcggcggcggcggaggcgcccggtcccggccgcgcggagcggacatgtgcaggctgggctaggagccgccgcctccctcccgcccagcgatgtattcagcgccctccgcctgcacttgcctgtgtttacacttcctgctgctgtgcttccaggtacaggtgctggttgccgaggagaacgtggacttccgcatccacgtggagaaccagacgcgggctcgggacgatgtgagccgtaagcagctgcggctgtaccagctctacagccggaccagtgggaaacacatccaggtcctgggccgcaggatcagtgcccgcggcgaggatggggacaagtatgcccagctcctagtggagacagacaccttcggtagtcaagtccggatcaagggcaaggagacggaattctacctgtgcatgaaccgcaaaggcaagctcgtggggaagcccgatggcaccagcaaggagtgtgtgttcatcgagaaggttctggagaacaactacacggccctgatgtcggctaagtactccggctggtacgtgggcttcaccaagaaggggcggccgcggaagggccccaagacccgggagaaccagcaggacgtgcatttcatgaagcgctaccccaaggggcagccggagcttcagaagcccttcaagtacacgacggtgaccaagaggtcccgtcggatccggcccacacaccctgcctaggccaccccgccgcggcccctcaggtcgccctggccacactcacactcccagaaaactgcatcagaggaatatttttacatgaaaaataaggaagaagctctatttttgtacattgtgtttaaaagaagacaaaaactgaaccaaaactcttggggggaggggtgataaggattttattgttgacttgaaacccccgatgacaaaagactcacgcaaagggactgtagtcaacccacaggtgcttgtctctctctaggaacagacaactctaaactcgtccccagaggaggacttgaatgaggaaaccaacactttgagaaaccaaagtcctttttcccaaaggttctgaaaggaaaaaaaaaaaaaacaaaaaaaaagaaaaacaaagagaaagtagtactccgcccaccaacaaactccccctaactttcccaatcctctgttcctgccccaaactccaacaaaaatcgctctctggtttgcagtcatttatttattgtccgctgcaagctgccccgagacaccgcgcagggaaggcgtgcccctgggaattctccgcgcctcgacctcccgacgacagacgcctcgtccaatcatggtgaccctgccttgctcgcagttctggaggatgctgctatcgaccttccgtgactcacgtgacctagtacaccaatgataagggaatattttaaaaccagctatattatatatattatatatatataagctatttatttcacctctctgtatattgcagtttcatgaaccaagtattactgcctcaacaattaaaaacaacagacaaattatttaaaaaa

SEQ ID NO: 141507 - DNA, 621 bp, Artificial Sequence
  derived and/or modified sequence
atgtattccgcccctagcgcatgcacgtgcctgtgcctgcacttcctcctgctgtgcttccaagtgcaagtgctggtggcggaagaaaacgtggatttccgcattcatgtggaaaatcagacccgggcccgcgacgacgtgtcgcggaagcagcttagactgtaccagctctactcgagaactagcggtaagcacatccaggtgctggggaggcgaatcagcgcacgcggggaggacggagacaaatacgcccagctcctggtggaaactgacactttcggttcccaggtccgaatcaagggaaaagaaaccgagttctacctttgtatgaatcgcaagggaaagctggtcgggaagccagacggaacctccaaagagtgtgtgttcatcgaaaaagtcttggagaacaactacactgcacttatgtcagcaaagtactcgggatggtacgtgggcttcactaagaaaggtaggccgaggaagggaccaaagacgcgtgagaatcagcaggacgtccacttcatgaaaagataccccaagggacagccggaactgcagaagccgttcaaatacactactgtgaccaaacgctcgagacgcatcagaccgactcacccggcc

SEQ ID NO: 141508 - DNA, 621 bp, Artificial Sequence
  derived and/or modified sequence
atgtacagcgcaccgtccgcctgtacctgtctttgtctccactttctgcttctttgctttcaagtccaggtgcttgtggcagaagaaaatgtggattttcgaatccatgtggagaaccaaaccagagcacgcgatgatgtgtccagaaagcagctccggctgtaccaactgtactcaaggacgtcgggcaagcatatccaagtgctgggtagacggatctccgccagaggagaggacggtgacaaatacgcccagctgctggtggagactgacaccttcggaagccaggtgcggatcaagggcaaggaaactgagttttacctgtgtatgaaccggaagggaaagctggtcggaaaacctgatgggacctcaaaggagtgcgtctttatagaaaaagtcttggaaaacaactatactgcacttatgtcggcaaagtactccggatggtacgtgggtttcactaaaaagggaaggccgcgcaaaggacctaagacccgcgaaaaccagcaggacgtgcactttatgaagcgctaccccaagggtcaacctgaacttcaaaagccattcaaatacactactgtgactaagcggtcacggcgcattaggccgactcatccggca

SEQ ID NO: 141509 - DNA, 621 bp, Artificial Sequence
  derived and/or modified sequence
atgtattcagcaccatctgcttgtacatgtttatgtttacattttttgttactttgttttcaagtgcaggttcttgttgcagaagaaaatgtagatttcagaatacatgttgaaaaccaaactagagctagagatgatgtatcaagaaaacaattacgactttatcaattatattcaagaacaagtggtaaacatattcaagttttaggaaggcgaatttcagctcgaggagaagatggagataaatatgctcaacttcttgtagaaactgacacatttggttcccaagttaggattaaaggaaaagaaacagaattttatttatgtatgaatagaaaaggaaaattagttgggaaacctgatggaacaagtaaagaatgtgtttttattgaaaaagttttagagaataattatactgctttaatgtcagcaaaatattcaggttggtatgtaggatttactaagaaagggcgtccaagaaaaggaccaaagacacgtgaaaatcaacaagacgttcattttatgaaaagatatccaaaaggtcaaccagaattacaaaaaccatttaaatataccactgtaactaaaagatctaggcgtattcgaccaactcatccagct

SEQ ID NO: 141510 - DNA, 621 bp, Artificial Sequence
  derived and/or modified sequence
atgtactcggctccctccgcgtgcacgtgtctctgcttgcactttctgctgctgtgcttccaggtccaggtgctcgtggccgaagaaaacgtggatttccggatccacgtggagaatcagacgagagcgcgcgatgatgtgtcgcgcaaacagcttcgcttgtatcagctgtacagccgaacttccgggaagcacattcaagtgctgggacggcggatctccgcccgaggagaggatggcgacaagtacgcccagctcctggtcgagactgacaccttcggatcgcaggtgagaataaaggggaaggagactgaattctacctgtgtatgaatagaaagggcaaactcgtgggcaagccagacggaacctcaaaagaatgcgtgtttatcgagaaggtgctggaaaacaattacaccgccctcatgtcggcgaagtactccggatggtacgtgggttttaccaagaaaggcaggcctagaaagggaccaaagactcgcgaaaaccaacaagatgtccatttcatgaagcgctacccaaagggccaaccagaattgcaaaagccgtttaagtacactactgtgacgaagagaagccgcagaattcgcccaactcatccagca

SEQ ID NO: 141511 - DNA, 621 bp, Artificial Sequence
  derived and/or modified sequence
atgtattcagccccttcagcctgcacctgcctttgtttgcactttctactgttgtgttttcaggtccaggtgcttgttgcagaggagaacgtggacttccgtatccatgtggaaaaccagactcgggctagagacgacgtaagtagaaagcagctcaggttgtaccagctctatagccgaacttctggcaaacacatacaggtgctgggccgaagaatctctgcccgaggggaggacggggataagtacgcccagctcttggtagagacagacacctttggcagccaagtgcgaatcaaggggaaagagactgagttctacctgtgcatgaataggaagggaaagctagttggaaagccagacggcacctccaaggaatgcgtgtttatcgagaaagttcttgaaaataactataccgctcttatgtccgcaaaatactctgggtggtacgtcggttttaccaaaaagggcagacccaggaaggggcccaagacaagggagaaccaacaggatgttcactttatgaaaagatatcccaaaggtcagcccgagctgcagaaaccctttaagtatacaacagtgaccaagagatccagacgaatccgacccactcatcccgcc

SEQ ID NO: 141512 - DNA, 621 bp, Artificial Sequence
  derived and/or modified sequence
atgtattcggcaccttcggcatgtacttgtctgtgcttgcatttccttcttctttgttttcaagtccaggtgctcgtggctgaagaaaatgttgattttcggatccatgttgaaaaccaaacgcgcgcgagagatgatgtgtcgcgcaagcagctgagactttatcaactttacagccgaaccagcggcaaacatattcaggtgctgggccgtaggatttcggccaggggcgaggacggagataagtacgcccagcttcttgtggaaaccgataccttcgggtcacaagtccgcattaagggaaaagaaaccgagttctacctttgcatgaaccgtaagggtaagctggtcggaaaacctgatggaacctctaaggagtgtgtgtttattgagaaggtcctggaaaacaactacaccgcactcatgagcgcaaagtacagcggatggtatgtgggttttactaagaaaggacgcccccgtaagggaccaaagaccagagaaaaccagcaggatgtgcactttatgaagagatacccaaagggtcagcctgagctgcaaaagccctttaagtacactaccgtgaccaaacgtagccgtagaattcggcctacgcatccagca

SEQ ID NO: 141513 - DNA, 621 bp, Artificial Sequence
  derived and/or modified sequence
atgtactccgctccaagtgcttgcacctgtctgtgcctacactttctcttgctttgttttcaagtgcaggttctcgttgccgaagaaaatgtcgacttccgaatccatgtcgaaaaccagacccgggcaagggatgacgtgtcacgtaagcagctaagactctaccagctgtactctcgtacaagcggcaagcacatacaggtcttggggagacgaatttccgcaaggggtgaggacggcgacaaatacgcccaactcctggtggaaaccgacactttcgggtctcaggtgcgtataaaaggcaaggagaccgagttctacctgtgcatgaacagaaaaggtaagttagtgggcaaacctgatggcacttccaaagagtgtgtgttcatcgagaaggttttagaaaataactatactgctctgatgtccgcaaaatacagcgggtggtacgtgggctttactaaaaaaggcaggccacgtaaaggtcccaaaactagggagaaccagcaagatgtacactttatgaagcggtacccaaaagggcagcccgaactccagaagccatttaaatacaccaccgtgaccaaacggtcccggcgcataagacctactcaccctgca

SEQ ID NO: 141514 - DNA, 621 bp, Artificial Sequence
  derived and/or modified sequence
atgtattccgccccatctgcatgcacatgcctgtgcctgcacttcttgctgttgtgctttcaggtgcaggtgcttgtcgcagaagagaacgtggattttcgaatccacgtggagaaccagacccgggcacgtgacgacgttagccgaaagcagctcagattgtaccaactatattcgcgtacaagtggaaagcacatacaggtgcttgggcgcaggatttctgcgcgcggcgaggacggcgataagtatgcccagctgttggtggaaaccgatacgttcggttcccaagtacgaatcaagggcaaagaaaccgagttctacctatgtatgaaccggaagggaaagctggtgggcaagcccgacgggacatcaaaagaatgcgtttttatcgagaaagtccttgaaaacaactacacagctttaatgtcggctaagtattcgggttggtacgtgggttttactaagaagggacgaccaaggaagggccctaagacgagagagaatcagcaggatgttcacttcatgaagaggtaccctaagggccagccggagctacagaaaccattcaagtacaccacggtgactaagcgcagccgcaggatcaggccaacccaccctgcg

SEQ ID NO: 141515 - DNA, 621 bp, Artificial Sequence
  derived and/or modified sequence
atgtatagcgcaccaagcgcatgtacttgtctgtgcctgcacttcctgctgctctgttttcaggtgcaggtgttggtggctgaggagaatgttgattttaggatccatgtcgagaaccagacaagagctagagacgacgtctcccgaaaacagctgaggctgtaccagttgtattcaaggacttcaggaaagcacatccaagtgctaggtaggcgcatctcagctcgtggcgaagacggagacaagtacgctcagctgttggtagagaccgataccttcggaagccaagtcaggataaagggcaaggagactgagttctacttatgtatgaatagaaagggtaagctcgtcggaaaacctgatggaacaagcaaggaatgtgtctttattgagaaggttctggagaataattatactgctctgatgagcgccaaatactcgggatggtacgtcggtttcaccaaaaaaggaagaccaagaaagggaccaaaaacccgggaaaaccagcaggacgtgcatttcatgaaacggtaccctaagggacaacccgaactgcagaaacctttcaaatatacaacagtaaccaaacgttccaggcggatccggccaacccaccccgcc

SEQ ID NO: 141516 - DNA, 621 bp, Artificial Sequence
  derived and/or modified sequence
atgtattcagcgccctctgcttgcacttgcctctgtttgcattttttgctcctgtgtttccaggtgcaggtgctggtagctgaagagaatgtggactttcgcattcatgttgagaatcaaaccagggctagggacgatgtgtctagaaagcaattgcgcctttatcagctgtactctagaacaagcggaaaacatatccaagtgctcggaaggaggatttcagccaggggcgaagacggtgataagtacgctcagctcttggttgagactgatacctttggaagccaagtcaggatcaagggtaaggagactgagttctacctgtgcatgaaccgcaaaggcaaactggttggtaaaccagatggtacaagtaaggaatgcgtattcatcgagaaggtgctggagaacaactatactgccctgatgagcgctaagtattccggatggtacgtgggattcactaagaaaggtaggcccaggaaaggccccaaaaccagagagaaccagcaggacgttcacttcatgaagagataccctaaaggtcagcccgagcttcaaaagccatttaagtatacaaccgtaacaaaacgcagtaggcgcatccgccctacacaccctgcc

SEQ ID NO: 141517 - DNA, 621 bp, Artificial Sequence
  derived and/or modified sequence
atgtattcggcgccgtcggcgtgtacgtgtttatgtttacattttctattactatgttttcaagtacaagtattagtagcggaagaaaatgtagattttcgtatacatgtagaaaatcaaacgcgtgcgcgtgatgatgtatcgcgtaaacaattacgattatatcaattatattcgcgtacgtcgggtaaacatatacaagtattaggtcgtcgaatatcggcgcgaggtgaagatggtgataaatatgcgcaattattagttgaaacggatacgtttggttcgcaagtacgtataaaaggtaaagaaacggaattttatttatgtatgaatcgaaaaggtaaactagttggtaaaccggatggtacgtcgaaagaatgtgtttttatagaaaaagtactagaaaataattatacggcgttaatgtcggcgaaatattcgggttggtatgttggttttacgaaaaaaggtcgtccgcgaaaaggtccgaaaacgcgagaaaatcaacaagatgtacattttatgaaacgttatccgaaaggtcaaccggaattacaaaaaccgtttaaatatacgacggttacgaaacgttcgcgacgaatacgtccgacgcatccggcg

SEQ ID NO: 141518 - DNA, 621 bp, Artificial Sequence
  derived and/or modified sequence
atgtactcggcgccgtccgcttgcacctgtctctgcctgcacttcctcctgctgtgcttccaagtgcaagtgctggtcgccgaggaaaatgttgattttagaatccacgtcgaaaatcagacccgcgcacgcgatgacgtgtccagaaagcagctgaggctgtaccagctctacagccgcaccagcgggaagcacatccaggtcctgggtagacgcatctccgctagaggcgaggacggcgacaagtacgcccagttgctcgttgagactgacaccttcggatcccaagtcagaatcaagggaaaggaaaccgaattctacctctgtatgaaccggaagggtaagctggtgggaaaaccagacggaacctccaaggagtgtgtgttcatcgagaaggtcctggagaataactacaccgctctcatgagcgcaaaatacagcgggtggtacgtgggatttaccaagaagggacgcccccggaagggaccaaaaacccgcgaaaaccagcaggacgtgcactttatgaaacggtacccgaaaggccaacccgaacttcagaaaccgttcaagtacaccaccgttactaagaggtccagacgcatccggccgacgcatccagca

SEQ ID NO: 141519 - DNA, 621 bp, Artificial Sequence
  derived and/or modified sequence
atgtactccgctccgtccgcatgcacttgtctgtgtctgcacttcctgctgctgtgctttcaagtgcaggtcttggtcgcagaggaaaatgtcgactttaggatccacgtggagaaccaaactcgggccagagatgatgtttcgcggaaacagctgcgcctctaccagctctactctcggacctcaggcaagcatattcaggtgcttgggcggagaatctcggcacgcggggaagatggtgacaagtacgcccagctcctggtggagactgatacgtttggatcacaggtccggatcaagggcaaggaaactgaattctacctctgcatgaacaggaaaggaaagctggtcggaaagccggacggcacctcaaaggaatgtgttttcatcgaaaaagtgcttgagaataactacaccgctctgatgtcagccaagtattcgggatggtatgtgggcttcaccaagaagggacggccaagaaaaggaccgaaaacgagggagaatcaacaggacgtccatttcatgaagcggtaccctaaggggcagcctgagctccagaagccattcaagtacaccactgtcactaagcgctcccgccgcatccgcccaacccatcctgcc

SEQ ID NO: 141520 - DNA, 621 bp, Artificial Sequence
  derived and/or modified sequence
atgtacagcgctccaagcgcctgcacctgcttatgcctccatttcctgctcctgtgctttcaggtccaggtgcttgtagccgaggaaaatgtggatttcagaatccacgtggaaaaccagacgcgagcccgcgacgatgtttccagaaagcagctgagactttatcaactatacagccgcacttcaggcaaacacatacaagtgttgggtcggaggatcagcgccagaggggaagatggggacaagtacgcccaactcttggtcgaaacggacacatttggttctcaagtgcggattaaaggcaaggagacagagttctatctgtgcatgaacagaaaaggcaagttggtgggcaaacctgacggcacaagtaaagagtgtgtgtttattgaaaaagtcctcgagaacaactacactgctctgatgagcgcaaagtattctggatggtatgtcggcttcacaaaaaaggggcgaccgcgcaagggcccaaagacgagagaaaatcagcaagacgtgcactttatgaaaagataccccaagggacagccggagctccaaaaaccgtttaagtacacaacagtgacgaagaggagtcggcgcatacgcccgacccacccagca

SEQ ID NO: 141521 - DNA, 782 bp, Artificial Sequence
  derived and/or modified sequence
gggaaataagagagaaaagaagagtaagaagaaatataagagccaccatgtactccgcaccatcagcttgcacctgtctctgcctgcactttctgcttctgtgttttcaagttcaagtccttgtggcagaagagaatgtggacttccgcattcatgtggagaaccagactcgtgccagagatgacgtgtcccgcaaacaactccggctgtaccagctgtacagccgaacctctggtaaacacattcaagtgctggggaggagaatctcggcacgtggcgaagatggagataagtacgcgcagctgttggtcgaaacggacacttttggatcccaagtgcgcataaagggaaaggaaaccgagttttacctttgtatgaacaggaaaggaaagctcgtgggaaaaccagatggcacttcgaaggaatgtgtctttatcgaaaaggtgcttgaaaacaattacactgcactcatgtcagcaaagtatagcggttggtacgtgggttttaccaaaaagggcagaccccgcaaggggcctaagaccagagagaaccaacaggatgtccatttcatgaagcggtaccccaagggtcagcctgaacttcagaaacctttcaagtacacgactgtcaccaagaggtcgagacgaattcggccaacccatccggcctgataataggctggagcctcggtggccatgcttcttgccccttgggcctccccccagcccctcctccccttcctgcacccgtacccccgtggtctttgaataaagtctgagtgg

SEQ ID NO: 141522 - DNA, 1999 bp, Artificial Sequence
  derived and/or modified sequence
cacggccggagagacgcggaggaggagacatgagccggcgggcgcccagacggagcggccgtgacgctttcgcgctgcagccgcgcgccccgaccccggagcgctgacccctggccccacgcagctccgcgcccgggccggagagcgcaactcggcttccagacccgccgcgcatgctgtccccggactgagccgggcagccagcctcccacggacgcccggacggccggccggccagcagtgagcgagcttccccgcaccggccaggcgcctcctgcacagcggctgccgccccgcagcccctgcgccagcccggagggcgcagcgctcgggaggagccgcgcggggcgctgatgccgcagggcgcgccgcggagcgccccggagcagcagagtctgcagcagcagcagccggcgaggagggagcagcagcagcggcggcggcggcggcggcggcggcggaggcgcccggtcccggccgcgcggagcggacatgtgcaggctgggctaggagccgccgcctccctcccgcccagcgatgtattcagcgccctccgcctgcacttgcctgtgtttacacttcctgctgctgtgcttccaggtacaggtgctggttgccgaggagaacgtggacttccgcatccacgtggagaaccagacgcgggctcgggacgatgtgagccgtaagcagctgcggctgtaccagctctacagccggaccagtgggaaacacatccaggtcctgggccgcaggatcagtgcccgcggcgaggatggggacaagtatgcccagctcctagtggagacagacaccttcggtagtcaagtccggatcaagggcaaggagacggaattctacctgtgcatgaaccgcaaaggcaagctcgtggggaagcccgatggcaccagcaaggagtgtgtgttcatcgagaaggttctggagaacaactacacggccctgatgtcggctaagtactccggctggtacgtgggcttcaccaagaaggggcggccgcggaagggccccaagacccgggagaaccagcaggacgtgcatttcatgaagcgctaccccaaggggcagccggagcttcagaagcccttcaagtacacgacggtgaccaagaggtcccgtcggatccggcccacacaccctgcctaggccaccccgccgcggcccctcaggtcgccctggccacactcacactcccagaaaactgcatcagaggaatatttttacatgaaaaataaggaagaagctctatttttgtacattgtgtttaaaagaagacaaaaactgaaccaaaactcttggggggaggggtgataaggattttattgttgacttgaaacccccgatgacaaaagactcacgcaaagggactgtagtcaacccacaggtgcttgtctctctctaggaacagacaactctaaactcgtccccagaggaggacttgaatgaggaaaccaacactttgagaaaccaaagtcctttttcccaaaggttctgaaaggaaaaaaaaaaaaaacaaaaaaaaagaaaaacaaagagaaagtagtactccgcccaccaacaaactccccctaactttcccaatcctctgttcctgccccaaactccaacaaaaatcgctctctggtttgcagtcatttatttattgtccgctgcaagctgccccgagacaccgcgcagggaaggcgtgcccctgggaattctccgcgcctcgacctcccgacgacagacgcctcgtccaatcatggtgaccctgccttgctcgcagttctggaggatgctgctatcgaccttccgtgactcacgtgacctagtacaccaatgataagggaatattttaaaaccagctatattatatatattatatatatataagctatttatttcacctctctgtatattgcagtttcatgaaccaagtattactgcctcaacaattaaaaacaacagacaaattatttaaaaaaccaaaaaaaaaaaaaaaaaa

SEQ ID NO: 141523 - RNA, 782 nt, Artificial Sequence
  derived and/or modified sequence
gggaaauaagagagaaaagaagaguaagaagaaauauaagagccaccauguacuccgcaccaucagcuugcaccugucucugccugcacuuucugcuucuguguuuucaaguucaaguccuuguggcagaagagaauguggacuuccgcauucauguggagaaccagacucgugccagagaugacgugucccgcaaacaacuccggcuguaccagcuguacagccgaaccucugguaaacacauucaagugcuggggaggagaaucucggcacguggcgaagauggagauaaguacgcgcagcuguuggucgaaacggacacuuuuggaucccaagugcgcauaaagggaaaggaaaccgaguuuuaccuuuguaugaacaggaaaggaaagcucgugggaaaaccagauggcacuucgaaggaaugugucuuuaucgaaaaggugcuugaaaacaauuacacugcacucaugucagcaaaguauagcgguugguacguggguuuuaccaaaaagggcagaccccgcaaggggccuaagaccagagagaaccaacaggauguccauuucaugaagcgguaccccaagggucagccugaacuucagaaaccuuucaaguacacgacugucaccaagaggucgagacgaauucggccaacccauccggccugauaauaggcuggagccucgguggccaugcuucuugccccuugggccuccccccagccccuccuccccuuccugcacccguacccccguggucuuugaauaaagucugagugg

SEQ ID NO: 141524 - protein, 84 aa, Artificial Sequence
  derived and/or modified sequence
MATGTDQVVGLGLVAVSLIIFTYYTAWVILLPFIDSQHVIHKYFLPRAYAVAIPLAAGLLLLLFVGLFISYVMLKTKRVTKKAQ

SEQ ID NO: 141525 - protein, 130 aa, Artificial Sequence
  derived and/or modified sequence
MATGTDQVVGLGLVAVSLIIFTYYTAWVILLPFIDSQHVIHKYFLPRAYAVAIPLAAGLLLLLFVGKSSPPPLDPGQGFGKTPPLNMLPHFGGAGSCLPRTHPWGFPVHPSRLPVSNLWVSWCPRLFGLQ

SEQ ID NO: 141526 - DNA, 255 bp, Artificial Sequence
  derived and/or modified sequence
atggccaccggcaccgaccaggtggtgggcctgggcctggtggccgtgagcctgatcatcttcacctactacaccgcctgggtgatcctgctgcccttcatcgacagccagcacgtgatccacaagtacttcctgcccagagcctacgccgtggccatccccctggccgccggcctgctgctgctgctgttcgtgggcctgttcatcagctacgtgatgctgaagaccaagagagtgaccaagaaggcccagtag

SEQ ID NO: 141527 - DNA, 393 bp, Artificial Sequence
  derived and/or modified sequence
atggccaccggcaccgaccaggtggtgggcctgggcctggtggccgtgagcctgatcatcttcacctactacaccgcctgggtgatcctgctgcccttcatcgacagccagcacgtgatccacaagtacttcctgcccagagcctacgccgtggccatccccctggccgccggcctgctgctgctgctgttcgtgggcaagagcagccccccccccctggaccccggccagggcttcggcaagaccccccccctgaacatgctgccccacttcggcggcgccggcagctgcctgcccagaacccacccctggggcttccccgtgcaccccagcagactgcccgtgagcaacctgtgggtgagctggtgccccagactgttcggcctgcagtag

SEQ ID NO: 141528 - DNA, 1542 bp, Artificial Sequence
  derived and/or modified sequence
gtcccggtccgaaacgtgtctgggctgctgcgagagacagtcggtgaaggaagggaggggacatccgaagggtggcccgggaggccgggcgatggtgaggagggcgcctcctctccaccaaatcctccccatccatgcgggctagggacagaccctcccccgcccaccctaggctggaaagtgaacgttctctgcacctctcccacctacagactaagtagggcacccggtttccgtgtcggcttcaccactgactcggaatgggatctacctttctctgagcctcacttttcccatctgaaaaatggaacttccgatcccgcactcccatcccactctggccccgggactctgggatacttagagattggcttttggtggggcggcgacaggactgtggccatgaaggccagggagtctgggtccccaactcggtcccattccctagagagattcgggcagcaaccggccccacaatgctcttgagaactacacttcgccgatatgcaaagaagaggaggcggttcctgctcgtctccgacgaggtgggcccgagcaggcctggggactacgactcccggcgtgctccgcagtccaaagccggaagagcgtggacccggaaccggatgtggcttgcggctcgggtggctgagcgcgcggggaaatggccacggggacagaccaggtggtgggactcggcctcgtcgccgttagcctgatcatcttcacctactacaccgcctgggtgattctcttgccattcatcgacagtcagcatgtcatccacaagtatttcctgccccgagcctatgctgtcgccatcccactggctgcaggcctcctgctgctcctgtttgtgggactgttcatctcctatgtgatgctgaagaccaagagagtgaccaagaaggctcagtgaaggtcccgcagggatgaggctgccagccccttctctgcttcccctccagcacagggaccaagtgggggagcctgcagaacctgtccaggcacagtggctcctcaagcctgcctgtcctgcagagtccccatggcatggagcttacacctgactgactggagccccctccccgactcccacttccagaagctaggagggagggatacctggaagactccggtcacctccttcttgctcagggcctaaaagatgctggtcctcccaacctcactctcagactccctgccaccttttcccctgggttctgccgtcttgcctcacttcccctcctgtcacatgctgacgttggacttagcaggttctaaggccacatgtgtgacctctctgacttctcttcctccaccaaggcagctttccttaccctgacacagccccagaccccacaaagccttctggacctggaaagcctggggaaggactgacagaccccaggaccagccctggggctcagggcagccaccccgggccgctgaccgactgacctctcctcacggaggcccagccccaaagccccagggctggcccgtttgggacagctgaccaataaacactgatggtgtgtt

SEQ ID NO: 141529 - DNA, 738 bp, Artificial Sequence
  derived and/or modified sequence
cgggtggctgagcgcgcggggaaatggccacggggacagaccaggtggtgggactcggcctcgtcgccgttagcctgatcatcttcacctactacaccgcctgggtgattctcttgccattcatcgacagtcagcatgtcatccacaagtatttcctgccccgagcctatgctgtcgccatcccactggctgcaggcctcctgctgctcctgtttgtgggtaagtcatcacctcctccccttgaccctgggcagggtttcgggaagaccccacctctgaacatgcttccacactttggcggtgctggaagctgcttgccccgaactcacccgtggggttttcctgttcatccttcgaggctgccagtcagtaacctctgggtttcctggtgccccaggctttttggactccaatgacctgtctacctctttcctgccccaaccccatcatcactctgctcacacctcagtcaccctcttgtcaccctggcttctaattcctgcacctctctctctcatggcttcctagggatggggactgtgtctccatcattactgcacatctagaacaggctgtggcactgaggctgtgctcagaaagtcatttggatgagtcagtcaacagccgggtgcctggatgatgggtggatggatgggtgggtgggtgaggtgtaggaggaggtgggtaggtatgtaggtggacagacaagtggttgaccgggtgatcgatagatgggtg

SEQ ID NO: 141530 - DNA, 255 bp, Artificial Sequence
  derived and/or modified sequence
atggccaccgggacagatcaggttgtaggcttgggactggtagccgtatctttgattatcttcacgtattacacagcatgggtcatcctgttgcctttcatcgactctcagcacgtcattcataagtacttcttgcctagggcctatgccgttgctatacctctggctgccggactcctcctgttgttgttcgtcgggctcttcataagctacgtgatgctgaagacaaagagggtaaccaagaaggctcagtag

SEQ ID NO: 141531 - DNA, 393 bp, Artificial Sequence
  derived and/or modified sequence
atggccactggcactgaccaggtcgttggattgggcttagtcgcagtttctctgatcatcttcacttactacacagcctgggtgattctactcccatttattgacagccagcacgtgattcacaagtactttttgccgcgagcctatgccgtagcaatcccattagcggccggtctgttgctgctgttatttgttgggaagagcagtcctcctcctcttgaccctggtcaagggtttgggaagacaccacctctaaatatgctgccccactttggcggggccgggagctgcctgccacgaacacatccctggggttttccagtccacccaagccggctgcctgtttccaacttgtgggtctcttggtgtcctaggttattcggactccagtag

SEQ ID NO: 141532 - DNA, 255 bp, Artificial Sequence
  derived and/or modified sequence
atggccactggaacagaccaggtggtgggcctgggcctggtggccgtgtccctcatcatcttcacctactacacagcctgggtgatcctgctgcccttcatcgacagccagcacgtgatccacaagtacttcctgccccgggcctatgctgtggccatccccctggccgccggcctgctgctgctgctgtttgtgggcctcttcatctcctatgtgatgctgaagaccaagagggtgaccaagaaggcccagtag

SEQ ID NO: 141533 - DNA, 393 bp, Artificial Sequence
  derived and/or modified sequence
atggccactggaacagaccaggtggtgggcctgggcctggtggccgtgtccctcatcatcttcacctactacacagcctgggtgatcctgctgcccttcatcgacagccagcacgtgatccacaagtacttcctgccccgggcctatgctgtggccatccccctggccgccggcctgctgctgctgctgtttgtgggcaagagcagccccccacccctggaccccggccagggctttgggaagaccccacccctgaacatgctgccccactttggaggagctggcagctgcctgcccaggacccacccctggggcttccctgtgcaccccagccggctgcctgtgagcaacctgtgggtgtcctggtgcccccggctgtttggcctgcagtag

SEQ ID NO: 141534 - DNA, 255 bp, Artificial Sequence
  derived and/or modified sequence
atggccaccggcaccgaccaggtggtgggcctgggcctggtggccgtcagtctgataatctttacttattacaccgcctgggtaattttgctacccttcatcgatagccagcacgtcatccataagtactttctgccaagggcatacgccgtagctattcctctcgccgctggccttctgctcctgctgttcgtgggtcttttcatctcatatgtcatgttgaaaaccaagagagtgacgaaaaaggcccagtag

SEQ ID NO: 141535 - DNA, 393 bp, Artificial Sequence
  derived and/or modified sequence
atggccaccggcaccgaccaggtggtgggcctgggcctggtggccgtcagtcttatcatatttacctattatacagcctgggttatcctgttacccttcattgattcacagcatgtcatccacaagtacttcctccctcgagcttatgcagttgccattccacttgcagcaggtctgcttctgctgctgtttgtcggtaagagcagccctccacctttggatcccgggcagggctttggcaagacaccccccctgaacatgttaccacattttggcggggcagggtcctgcctaccaagaacccacccctggggtttccccgtacacccatctcgtctgcccgtatccaacttatgggtttcctggtgtccacgtctgtttggtctacagtag

SEQ ID NO: 141536 - DNA, 255 bp, Artificial Sequence
  derived and/or modified sequence
atggcaaccggcacggaccaagtggttggccttggtcttgttgccgtatctcttataatttttacatattacaccgcttgggttattttgctgcctttcatagattcccagcacgtgatccataagtactttctgccacgcgcttatgcggttgccatcccactcgctgccggtcttctcctactgctgttcgtaggtctcttcatatcttacgttatgctgaaaacaaaaagggtgactaagaaggctcaatag

SEQ ID NO: 141537 - DNA, 393 bp, Artificial Sequence
  derived and/or modified sequence
atggctactggaactgaccaggttgtggggctgggcctagttgccgtaagcctgatcatcttcacgtattacactgcctgggtaatcctgctcccatttattgactcacagcacgtgatacacaagtatttcctgccaagagcttacgctgtggctatccctctggccgcaggactgctgctgctcctgtttgtggggaaatcttccccccctccgttagatccaggccaaggtttcggaaagacgccccctctgaacatgctcccacacttcgggggtgcgggaagttgtcttccgagaacccacccctggggttttccagtgcaccctagccgcctgccagtgagtaacctttgggtgagttggtgccctagactcttcggcctccaatag

SEQ ID NO: 141538 - protein, 185 aa, Artificial Sequence
  derived and/or modified sequence
MSPSLQEGAQLGENKPSTCSFSIERILGLDQKKDCVPLMKPHRPWADTCSSSGKDGNLCLHVPNPPSGISFPSVVDHPMPEERASKYENYFSASERLSLKRELSWYRGRRPRTAFTQNQIEVLENVFRVNCYPGIDIREDLAQKLNLEEDRIQIWFQNRRAKLKRSHRESQFLMAKKNFNTNLLE

SEQ ID NO: 141539 - protein, 107 aa, Artificial Sequence
  derived and/or modified sequence
MSPSLQEGAQLGENKPSTCSFSIERILGLDQKKDCVPLMKPHRPWADTCSSSGKDGNLCLHVPNPPSGISFPSVVDHPMPEERASKYENYFSASERLSLKRELSWYR

SEQ ID NO: 141540 - DNA, 1182 bp, Artificial Sequence
  derived and/or modified sequence
ccacatttgtgcatcacttctttagagaaagttaagtctgtgttctgcttaggagagataacactttttgtccctgtaggtggcccccctggtgtagccattagttgctaattacttgcaaacaaataaacaattaactccttaagctgctggctgggcaagtgttcattgacatgctaaaactttctaagacaggattttaattagtgacgttctaaatccagcccccttgtcagcggagctataaggtgaactgcaggaagatcccagccctatacacgtggggcagagccagcagaggccagagctgttgctctgtgcagaccacgagaggatgtctcccagccttcaggaaggcgctcagctcggggaaaacaaaccctcaacttgctccttttcaattgagagaatcttaggactggaccagaagaaagactgtgttccattaatgaaaccccacaggccctgggcagacacctgcagctcatcagggaaagatggtaacttatgtctacatgtcccaaatcctcccagtgggatttcattccctagcgtggtggatcacccaatgccagaagaaagagcttcgaaatatgaaaattacttttcagcctcagaaagactgtctttgaaaagagagttgagttggtatagaggccgaagaccaagaactgcttttactcaaaaccagattgaagtgttagaaaatgtctttagagtaaactgctatcctggtatcgatattagagaagacttagctcaaaaattgaatctagaggaagacagaatccagatttggtttcaaaatcggcgtgcaaaactgaaaaggtcccatagagaatcacagtttctaatggcgaaaaaaaatttcaacacaaatctgctggaatagatagaaaactaaacaagtgaaattatcttctaattgcagagcatgaagaatcagtggaaatattaagtgttaaaatgtgatgttttctttcctgcatttaatctgaatattgtcattttttctgaaaatatattgtaaatactattatagcatggtacatatttgggcacttttagttatagtaaagaccttttatatatattttaataaacattttcagaaaagattgctattttttaagtaagccaaattaatctaataaattagtttgttaaaatcaaaaaaaaaaa

SEQ ID NO: 141541 - DNA, 558 bp, Artificial Sequence
  derived and/or modified sequence
atgagtccatcactgcaggaaggcgctcaactgggcgagaataagccctctacgtgctctttctccattgagaggatcctggggctggaccaaaagaaggactgtgtaccactcatgaaaccccacaggccgtgggccgacacctgttcctcttctgggaaggatgggaacctctgcctgcacgttcccaatcccccgtcaggaatatccttcccgtctgtggtagatcaccctatgcccgaggaaagggccagcaagtacgaaaattacttcagcgcgagcgaacggctctcacttaagcgagaactctcatggtaccggggcaggagacctcgtaccgcctttacccagaatcagatcgaggtcctcgagaatgtgttcagggtgaactgttaccctggtatcgacatccgtgaggacctggcgcagaagttaaacttggaggaggacaggatccagatttggttccagaaccggagagccaagctgaagagatctcatcgggaaagccaattcctgatggcaaaaaaaaactttaatactaacctgctggagtag

SEQ ID NO: 141542 - DNA, 324 bp, Artificial Sequence
  derived and/or modified sequence
atgtctccttcccttcaggagggcgcccagcttggcgagaataagccctccacatgctcattctccattgaaaggatcctgggtctggatcaaaaaaaggactgcgtgccattgatgaaaccacatcgcccatgggcagatacatgctctagctccggcaaggatgggaacctgtgtttacatgtgcccaacccacccagcggtataagttttccctccgtcgtcgaccatccaatgccagaggaacgtgcttccaagtacgagaattatttttcagccagcgaacgtctctcactaaagcgcgaactttcctggtatcgttag

SEQ ID NO: 141543 - DNA, 876 bp, Artificial Sequence
  derived and/or modified sequence
gaggccagagctgttgctctgtgcagaccacgagaggatgtctcccagccttcaggaaggcgctcagctcggggaaaacaaaccctcaacttgctccttttcaattgagagaatcttaggactggaccagaagaaagactgtgttccattaatgaaaccccacaggccctgggcagacacctgcagctcatcagggaaagatggtaacttatgtctacatgtcccaaatcctcccagtgggatttcattccctagcgtggtggatcacccaatgccagaagaaagagcttcgaaatatgaaaattacttttcagcctcagaaagactgtctttgaaaagagagttgagttggtatagaggccgaagaccaagaactgcttttactcaaaaccagattgaagtgttagaaaatgtctttagagtaaactgctatcctggtatcgatattagagaagacttagctcaaaaattgaatctagaggaagacagaatccagatttggtttcaaaatcggcgtgcaaaactgaaaaggtcccatagagaatcacagtttctaatggcgaaaaaaaatttcaacacaaatctgctggaatagatagaaaactaaacaagtgaaattatcttctaattgcagagcatgaagaatcagtggaaatattaagtgttaaaatgtgatgttttctttcctgcatttaatctgaatattgtcattttttctgaaaatatattgtaaatactattatagcatggtacatatttgggcacttttagttatagtaaagaccttttatatatattttaataaacattttcagaaaagattgctattttttaagtaagccaaattaatctaataaattagtttgttaaaatcaa

SEQ ID NO: 141544 - DNA, 657 bp, Artificial Sequence
  derived and/or modified sequence
tttttagtgttacaatctttaaaagttttccccttagattgtttatcagccagtctctctctcccgaagagttctttagtttttgaggaagttgatttggaggcagttcttacaatgagttaagggttcccagttgtgttacagtttctttttccttgatatctcatttctactctgccaacaagaacaccatgcaccccagctctaaagaaggaagactttcaagcccccttgtcagcggagctataaggtgaactgcaggaagatcccagccctatacacgtggggcagagccagcagaggccagagctgttgctctgtgcagaccacgagaggatgtctcccagccttcaggaaggcgctcagctcggggaaaacaaaccctcaacttgctccttttcaattgagagaatcttaggactggaccagaagaaagactgtgttccattaatgaaaccccacaggccctgggcagacacctgcagctcatcagggaaagatggtaacttatgtctacatgtcccaaatcctcccagtgggatttcattccctagcgtggtggatcacccaatgccagaagaaagagcttcgaaatatgaaaattacttttcagcctcagaaagactgtctttgaaaagagagttgagttggtataga

SEQ ID NO: 141545 - DNA, 558 bp, Artificial Sequence
  derived and/or modified sequence
atgagccccagcctgcaggagggcgcccagctgggggagaacaagcccagcacctgcagcttcagcattgagcgcatcctgggcctggaccagaagaaggactgtgtgcccctgatgaagccccaccggccctgggccgacacctgcagcagcagcggcaaggatggcaacctgtgcctgcacgtgcccaaccccccatctggcatctccttccccagcgtggtggaccaccccatgcctgaggagcgggccagcaaatatgagaactacttcagcgccagcgagcggctgagcctgaagcgggagctgtcctggtaccggggcagaagacccaggacagccttcacccagaaccagatcgaggtgctggagaatgtgttccgggtgaactgctacccaggcatcgacatccgggaggacctggcccagaagctgaacctggaggaggaccgcatccagatctggttccagaacagaagagccaagctgaagaggagccaccgggagagccagttcctgatggccaagaagaacttcaacaccaacctgctggagtag

SEQ ID NO: 141546 - DNA, 324 bp, Artificial Sequence
  derived and/or modified sequence
atgagccccagcctgcaggagggcgcccagctgggggagaacaagcccagcacctgcagcttcagcattgagcgcatcctgggcctggaccagaagaaggactgtgtgcccctgatgaagccccaccggccctgggccgacacctgcagcagcagcggcaaggatggcaacctgtgcctgcacgtgcccaaccccccatctggcatctccttccccagcgtggtggaccaccccatgcctgaggagcgggccagcaaatatgagaactacttcagcgccagcgagcggctgagcctgaagcgggagctgtcctggtacagatag

SEQ ID NO: 141547 - DNA, 558 bp, Artificial Sequence
  derived and/or modified sequence
atgagccccagcctgcaggagggcgcccagctgggcgagaacaagccttccacctgctcgtttagcattgaaagaatcctgggtcttgaccagaagaaggattgcgtcccgctgatgaaaccccacaggccctgggccgacacttgtagttcttcaggtaaagacggaaatctctgtttgcacgtccctaacccccccagtggcatttcttttcccagtgtggtcgatcaccccatgcccgaggagcgggccagcaagtacgaaaactacttttccgcgagtgagagactttcccttaagagggagctgtcttggtaccgcggccggcgaccacgaaccgcctttacacaaaaccagattgaagtgcttgaaaatgtgtttagagtaaactgctatccaggcattgacatcagagaggatctagcccagaagctgaatctggaagaggaccgcattcagatttggtttcagaatcgacgggccaagcttaaacggtcccacagggaatcacagtttctaatggccaaaaaaaattttaacactaacctcttggagtag

SEQ ID NO: 141548 - DNA, 324 bp, Artificial Sequence
  derived and/or modified sequence
atgagccccagcctgcaggagggcgcccagctgggcgagaacaagccctctacatgcagcttctccatcgagcggattctcgggctggaccagaaaaaagattgtgtgcccctgatgaaacctcatcgaccctgggcagatacgtgtagctctagcggcaaagatggaaacttgtgtctgcacgtgccaaacccaccttccgggattagtttcccctcagttgtggatcaccccatgcctgaggagcgcgcgagcaagtatgaaaattacttcagtgcttccgagcgcttgagtttgaaaagagagctgtcttggtacaggtag

SEQ ID NO: 141549 - DNA, 558 bp, Artificial Sequence
  derived and/or modified sequence
atgtccccctccctccaggagggagcacaattgggcgagaataaaccttccacatgtagctttagtatcgagagaatcctgggcttggatcagaagaaggactgcgtgccgctgatgaagccacaccggccatgggccgatacctgctcgtcaagcgggaaggacgggaacctgtgtcttcacgtccccaatccaccttccggcatatcatttcccagcgtagtcgaccaccccatgcccgaagagcgcgcaagtaagtacgagaactactttagcgcttcagaaaggctgtcacttaagcgcgaattgtcctggtatagagggcgacgacctcggactgccttcacgcagaaccagatcgaggttctcgaaaatgtgtttagagtcaattgctaccctggtatcgatattagggaggatttggcacagaaactgaaccttgaagaagaccgaattcaaatttggtttcagaacaggcgggcaaagctaaaacgaagtcaccgcgagagccaatttctcatggcgaaaaagaacttcaataccaatttgctggaatag

SEQ ID NO: 141550 - DNA, 324 bp, Artificial Sequence
  derived and/or modified sequence
atgtccccgtccctgcaggaaggggcacagttgggagaaaacaagccaagtacatgctcgttttccatagagagaattcttggcctcgaccagaagaaagactgcgtccctttgatgaaaccccatcggccttgggctgatacctgctcatctagcggtaaggacggaaatttgtgcctccacgtgcccaacccaccctcagggatcagcttcccgagtgttgtggaccatccaatgcctgaagagcgggcatcaaaatacgaaaactacttttcggcctcagagagattaagcctaaaacgcgagctgtcctggtaccgctag

SEQ ID NO: 141551 - DNA, 558 bp, Artificial Sequence
  derived and/or modified sequence
atgagccccagcctgcaggagggcgcccagctgggcgagaacaagcccagcacctgcagcttcagcatcgagagaatcctgggcctggaccagaagaaggactgcgtgcccctgatgaagccccacagaccctgggccgacacctgcagcagcagcggcaaggacggcaacctgtgcctgcacgtgcccaacccccccagcggcatcagcttccccagcgtggtggaccaccccatgcccgaggagagagccagcaagtacgagaactacttcagcgccagcgagagactgagcctgaagagagagctgagctggtacagaggcagaagacccagaaccgccttcacccagaaccagatcgaggtgctggagaacgtgttcagagtgaactgctaccccggcatcgacatcagagaggacctggcccagaagctgaacctggaggaggacagaatccagatctggttccagaacagaagagccaagctgaagagaagccacagagagagccagttcctgatggccaagaagaacttcaacaccaacctgctggagtag

SEQ ID NO: 141552 - DNA, 324 bp, Artificial Sequence
  derived and/or modified sequence
atgagccccagcctgcaggagggcgcccagctgggcgagaacaagcccagcacctgcagcttcagcatcgagagaatcctgggcctggaccagaagaaggactgcgtgcccctgatgaagccccacagaccctgggccgacacctgcagcagcagcggcaaggacggcaacctgtgcctgcacgtgcccaacccccccagcggcatcagcttccccagcgtggtggaccaccccatgcccgaggagagagccagcaagtacgagaactacttcagcgccagcgagagactgagcctgaagagagagctgagctggtacagatag

SEQ ID NO: 141553 - protein, 216 aa, Artificial Sequence
  derived and/or modified sequence
MGAARLLPNLTLCLQLLILCCQTQGENHPSPNFNQYVRDQGAMTDQLSRRQIREYQLYSRTSGKHVQVTGRRISATAEDGNKFAKLIVETDTFGSRVRIKGAESEKYICMNKRGKLIGKPSGKSKDCVFTEIVLENNYTAFQNARHEGWFMAFTRQGRPRQASRSRQNQREAHFIKRLYQGQLPFPNHAEKQKQFEFVGSAPTRRTKRTRRPQPLT

SEQ ID NO: 141554 - DNA, 651 bp, Artificial Sequence
  derived and/or modified sequence
atgggcgccgccagactgctgcccaacctgaccctgtgcctgcagctgctgatcctgtgctgccagacccagggcgagaaccaccccagccccaacttcaaccagtacgtgagagaccagggcgccatgaccgaccagctgagcagaagacagatcagagagtaccagctgtacagcagaaccagcggcaagcacgtgcaggtgaccggcagaagaatcagcgccaccgccgaggacggcaacaagttcgccaagctgatcgtggagaccgacaccttcggcagcagagtgagaatcaagggcgccgagagcgagaagtacatctgcatgaacaagagaggcaagctgatcggcaagcccagcggcaagagcaaggactgcgtgttcaccgagatcgtgctggagaacaactacaccgccttccagaacgccagacacgagggctggttcatggccttcaccagacagggcagacccagacaggccagcagaagcagacagaaccagagagaggcccacttcatcaagagactgtaccagggccagctgcccttccccaaccacgccgagaagcagaagcagttcgagttcgtgggcagcgcccccaccagaagaaccaagagaaccagaagaccccagcccctgacctag

SEQ ID NO: 141555 - DNA, 651 bp, Artificial Sequence
  derived and/or modified sequence
atgggagccgccagactgttgccgaaccttacgctgtgcctgcagctgctgatcctctgctgccagacacagggggagaatcacccctcaccaaattttaatcaatacgttcgggaccaaggggccatgaccgaccaactgagccgtcggcagatcagagaatatcagctttattcacgaacttctgggaagcacgtccaggtaactggcagacgaatatccgcaaccgcagaagacggcaataagttcgccaagttgatcgtggaaaccgacaccttcggcagtcgtgtccgtattaaaggcgccgaaagtgagaagtacatctgcatgaacaaacgtggtaagctcatcgggaagccgtctggcaagagcaaggattgcgtgtttaccgagatagtgcttgagaacaactataccgccttccagaatgcaaggcacgagggctggtttatggcatttaccagacagggcaggccacgtcaggcctcccgaagcagacaaaaccaaagagaagcacatttcatcaagcgcctgtaccagggccagctcccctttcctaatcacgccgagaagcagaaacagttcgaatttgtggggtctgcgcccaccagacgcacgaagagaacacggcggcctcagcctctgacctag

SEQ ID NO: 141556 - DNA, 651 bp, Artificial Sequence
  derived and/or modified sequence
atgggcgccgcccggctgctgcccaacctgaccctgtgcctgcagctgctgatcctgtgctgccagacccagggcgagaaccaccccagccccaacttcaaccagtatgtgcgggaccagggcgccatgacagaccagctgagccggcggcagatccgggagtaccagctgtacagcaggaccagcggcaagcacgtgcaggtgactggaagacgcatcagcgccacagcagaagatggcaacaagtttgccaagctgattgtggagacagacaccttcggcagccgggtgcgcatcaagggagctgagagcgagaagtacatctgcatgaacaagaggggcaagctgattggcaagcccagcggcaagagcaaggactgtgtgttcacagagatcgtgctggagaacaactacacagccttccagaatgcccggcatgagggctggttcatggccttcacccggcagggccggccccggcaggccagccgcagccggcagaaccagcgggaggcccacttcatcaagaggctgtaccagggccagctgcccttccccaaccacgccgagaagcagaagcagtttgaatttgtgggcagcgcccccaccaggaggaccaagaggacccggcggccccagcccctgacctag

SEQ ID NO: 141557 - DNA, 651 bp, Artificial Sequence
  derived and/or modified sequence
atgggcgccgcccggctgctgcccaacctgaccctgtgcctgcagctcttgatattgtgttgtcaaacccaaggtgaaaatcatccctctcctaatttcaatcaatacgtgcgggaccagggggcaatgaccgaccagttgtcaagaagacagattcgcgaataccagctgtattcaaggacatccggcaaacatgtgcaggtgactggaaggcggatctctgccaccgcggaagacggtaataaatttgccaagctgatcgttgaaacagacacgttcggatccagagtgagaattaagggagccgaaagtgagaagtatatctgcatgaacaaaaggggcaagctcatcggaaagccatccggaaagtcgaaggattgtgttttcaccgaaatcgtgttggagaataattacactgcattccaaaacgcccgccacgaagggtggttcatggcatttacgaggcagggacgcccgaggcaagctagccgttcgaggcagaaccaaagagaggcccactttattaagaggctgtatcaggggcagctgcctttcccaaaccatgcagagaagcagaaacagtttgagttcgtgggtagcgcaccaaccaggcgtacaaagcgtaccaggcgcccccaaccactgacgtag

SEQ ID NO: 141558 - DNA, 651 bp, Artificial Sequence
  derived and/or modified sequence
atgggggcagctcgcctgctgccgaacttgacattgtgtctgcagctcttgattctgtgctgccaaacccaaggggagaaccacccgtccccaaactttaatcagtacgttagggatcagggcgctatgactgaccagctgagtcgacgacagattcgggagtatcaactgtattcccgaacctcgggcaagcacgttcaggttacaggtcggaggatcagtgctactgcggaagacggtaacaagtttgctaagctaattgtggagaccgacaccttcggttctagggtacgcattaagggagcagagtctgaaaagtacatctgtatgaataagagagggaagcttatcgggaaaccatccggaaagtcaaaggactgcgttttcaccgaaatagttctggaaaacaactatactgccttccagaatgccaggcatgaaggctggttcatggccttcacccgccagggcagaccaagacaggcgtctcgctccaggcagaatcaacgcgaagctcattttattaaacgtctttaccagggacagcttccgttccccaaccatgcagagaagcagaaacagtttgaattcgttggtagcgccccaacacgccgtacaaagcgtactagacgacctcagcctctcacatag

SEQ ID NO: 141559 - DNA, 651 bp, Artificial Sequence
  derived and/or modified sequence
atgggcgctgcgcgtctcctcccaaatctgacactctgtcttcaattactcatcctctgctgccaaacacagggcgaaaaccacccttctcccaacttcaaccagtatgtcagagaccaaggtgcaatgactgatcaactgtctcgccggcagattcgcgagtaccaactctatagccggacatccgggaagcatgtccaggtcaccggacgacggatttctgccaccgcagaggacggaaacaagtttgccaaactcatagtggaaaccgatacctttgggtctcgtgtgcgaatcaagggggccgagtctgaaaaatatatttgcatgaataaacgcgggaaactcataggtaaaccatccggaaagagcaaagactgtgtgtttacggaaattgtgctcgagaacaattatacagcattccagaatgctcgacatgaagggtggtttatggcttttacacgacagggccggcctcgacaggccagtcgcagtcggcaaaatcaaagagaagcacacttcataaagaggctgtaccagggacagctgccatttccaaaccacgctgagaagcagaagcaattcgaattcgtgggatctgcccctacgcgccgcacgaagagaacgaggaggcctcaaccactgacctag

SEQ ID NO: 141560 - DNA, 651 bp, Artificial Sequence
  derived and/or modified sequence
atgggcgctgcgcgtctcctcccaaatctgacactctgtcttcaattactcatcctctgctgccaaacacagggcgaaaaccacccttctcccaacttcaaccagtatgtcagagaccaaggtgcaatgactgatcaactgtctcgccggcagattcgcgagtaccaactctatagccggacatccgggaagcatgtccaggtcaccggacgacggatttctgccaccgcagaggacggaaacaagtttgccaaactcatagtggaaaccgatacctttgggtctcgtgtgcgaatcaagggcgccgaatcagaaaagtacatctgcatgaacaaacgcggtaaactaattggtaaaccaagtgggaagtcaaaggattgtgtcttcacagaaatagtactggaaaacaactacaccgctttccagaatgcacgccacgaaggctggttcatggcgttcactcggcaaggacgaccccgccaggcttctagatcacgccaaaatcaacgagaagcacacttcattaagcgtctttaccaaggccagctcccattcccgaaccacgcagaaaagcaaaagcaattcgagtttgtgggatccgcgccaacaagaagaactaagcggactcgacggcctcaacccctgacatag

SEQ ID NO: 141561 - DNA, 1714 bp, Artificial Sequence
  derived and/or modified sequence
tgcggctcacccttggggaggtggggcgccagacctgagtgcaggagacgcagacctggaagggctccccctccctgacctgccacacatcgagtttgtctgcgtcgagtttggccagtctgtgagggtcaggaatagagcaggagacagcagggccacctccttcagaaggcccccaccgctccatccctgcactgggtggcccaggagagactggcagcccagagggcacagcgcgcacgcccccacccgcatctgctttgcagcctcactggccaggaaggtggacacctcatacctcagtctcccaattacgccctcctcctccccctcctcctccctcttttctctcctcctcctcccctttctctcctcctcgcccccctgaaaacctgtggctcggagagaccttggcttctctgggactctacccctggggacttcccacatctgctcctgagcttgggggcaggggggcaaccgcctgaggaacctctccagcgatgggagccgcccgcctgctgcccaacctcactctgtgcttacagctgctgattctctgctgtcaaactcagggggagaatcacccgtctcctaattttaaccagtacgtgagggaccagggcgccatgaccgaccagctgagcaggcggcagatccgcgagtaccaactctacagcaggaccagtggcaagcacgtgcaggtcaccgggcgtcgcatctccgccaccgccgaggacggcaacaagtttgccaagctcatagtggagacggacacgtttggcagccgggttcgcatcaaaggggctgagagtgagaagtacatctgtatgaacaagaggggcaagctcatcgggaagcccagcgggaagagcaaagactgcgtgttcacggagatcgtgctggagaacaactatacggccttccagaacgcccggcacgagggctggttcatggccttcacgcggcaggggcggccccgccaggcttcccgcagccgccagaaccagcgcgaggcccacttcatcaagcgcctctaccaaggccagctgcccttccccaaccacgccgagaagcagaagcagttcgagtttgtgggctccgcccccacccgccggaccaagcgcacacggcggccccagcccctcacgtagtctgggaggcagggggcagcagcccctgggccgcctccccacccctttcccttcttaatccaaggactgggctggggtggcgggaggggagccagatccccgagggaggaccctgagggccgcgaagcatccgagcccccagctgggaaggggcaggccggtgccccaggggcggctggcacagtgcccccttcccggacgggtggcaggccctggagaggaactgagtgtcaccctgatctcaggccaccagcctctgccggcctcccagccgggctcctgaagcccgctgaaaggtcagcgactgaaggccttgcagacaaccgtctggaggtggctgtcctcaaaatctgcttctcggatctccctcagtctgcccccagcccccaaactcctcctggctagactgtaggaagggacttttgtttgtttgtttgtttcaggaaaaaagaaagggagagagaggaaaatagagggttgtccactcctcacattccacgacccaggcctgcaccccacccccaactcccagccccggaataaaaccattttcctgcaaa

SEQ ID NO: 141562 - DNA, 1238 bp, Artificial Sequence
  derived and/or modified sequence
acctctccagcgatgggagccgcccgcctgctgcccaacctcactctgtgcttacagctgctgattctctgctgtcaaactcagggggagaatcacccgtctcctaattttaaccagtacgtgagggaccagggcgccatgaccgaccagctgagcaggcggcagatccgcgagtaccaactctacagcaggaccagtggcaagcacgtgcaggtcaccgggcgtcgcatctccgccaccgccgaggacggcaacaagtttgccaagctcatagtggagacggacacgtttggcagccgggttcgcatcaaaggggctgagagtgagaagtacatctgtatgaacaagaggggcaagctcatcgggaagcccagcgggaagagcaaagactgcgtgttcacggagatcgtgctggagaacaactatacggccttccagaacgcccggcacgagggctggttcatggccttcacgcggcaggggcggccccgccaggcttcccgcagccgccagaaccagcgcgaggcccacttcatcaagcgcctctaccaaggccagctgcccttccccaaccacgccgagaagcagaagcagttcgagtttgtgggctccgcccccacccgccggaccaagcgcacacggcggccccagcccctcacgtagtctgggaggcagggggcagcagcccctgggccgcctccccacccctttcccttcttaatccaaggactgggctggggtggcgggaggggagccagatccccgagggaggaccctgagggccgcgaagcatccgagcccccagctgggaaggggcaggccggtgccccaggggcggctggcacagtgcccccttcccggacgggtggcaggccctggagaggaactgagtgtcaccctgatctcaggccaccagcctctgccggcctcccagccgggctcctgaagcccgctgaaaggtcagcgactgaaggccttgcagacaaccgtctggaggtggctgtcctcaaaatctgcttctcggatctccctcagtctgcccccagcccccaaactcctcctggctagactgtaggaagggacttttgtttgtttgtttgtttcaggaaaaaagaaagggagagagaggaaaatagagggttgtccactcctcacattccacgacccaggcctgcaccccacccccaactcccagccccggaataaaaccattttcctgcaaaaaaaaaaaaaaaaaa

SEQ ID NO: 141563 - RNA, 651 nt, Artificial Sequence
  derived and/or modified sequence
augggcgcugcgcgucuccucccaaaucugacacucugucuucaauuacucauccucugcugccaaacacagggcgaaaaccacccuucucccaacuucaaccaguaugucagagaccaaggugcaaugacugaucaacugucucgccggcagauucgcgaguaccaacucuauagccggacauccgggaagcauguccaggucaccggacgacggauuucugccaccgcagaggacggaaacaaguuugccaaacucauaguggaaaccgauaccuuugggucucgugugcgaaucaagggggccgagucugaaaaauauauuugcaugaauaaacgcgggaaacucauagguaaaccauccggaaagagcaaagacuguguguuuacggaaauugugcucgagaacaauuauacagcauuccagaaugcucgacaugaagggugguuuauggcuuuuacacgacagggccggccucgacaggccagucgcagucggcaaaaucaaagagaagcacacuucauaaagaggcuguaccagggacagcugccauuuccaaaccacgcugagaagcagaagcaauucgaauucgugggaucugccccuacgcgccgcacgaagagaacgaggaggccucaaccacugaccuag

SEQ ID NO: 141564 - RNA, 651 nt, Artificial Sequence
  derived and/or modified sequence
augggcgcugcgcgucuccucccaaaucugacacucugucuucaauuacucauccucugcugccaaacacagggcgaaaaccacccuucucccaacuucaaccaguaugucagagaccaaggugcaaugacugaucaacugucucgccggcagauucgcgaguaccaacucuauagccggacauccgggaagcauguccaggucaccggacgacggauuucugccaccgcagaggacggaaacaaguuugccaaacucauaguggaaaccgauaccuuugggucucgugugcgaaucaagggcgccgaaucagaaaaguacaucugcaugaacaaacgcgguaaacuaauugguaaaccaagugggaagucaaaggauugugucuucacagaaauaguacuggaaaacaacuacaccgcuuuccagaaugcacgccacgaaggcugguucauggcguucacucggcaaggacgaccccgccaggcuucuagaucacgccaaaaucaacgagaagcacacuucauuaagcgucuuuaccaaggccagcucccauucccgaaccacgcagaaaagcaaaagcaauucgaguuugugggauccgcgccaacaagaagaacuaagcggacucgacggccucaaccccugacauag

SEQ ID NO: 141565 - protein, 116 aa, Artificial Sequence
  derived and/or modified sequence
  misc_feature (1)..(1): Xaa can be any naturally occurring amino acid
XILEFISLAVGLISIRGVDSGLYLGMNERGELYGSKKLTRECVFREQFEENWYNTYASTLYKHSDSERQYYVALNKDGSPREGYRTKRHQKFTHFLPRPVDPSKLPSMSRDLFHYR

SEQ ID NO: 141566 - protein, 207 aa, Artificial Sequence
  derived and/or modified sequence
MAEVGGVFASLDWDLHGFSSSLGNVPLADSPGFLNERLGQIEGKLQRGSPTDFAHLKGILRRRQLYCRTGFHLEIFPNGTVHGTRHDHSRFGILEFISLAVGLISIRGVDSGLYLGMNERGELYGSKKLTRECVFREQFEENWYNTYASTLYKHSDSERQYYVALNKDGSPREGYRTKRHQKFTHFLPRPVDPSKLPSMSRDLFHYR

SEQ ID NO: 141567 - DNA, 351 bp, Artificial Sequence
  derived and/or modified sequence
tgaatcctggagttcatcagcctggccgtgggcctgatcagcatcagaggcgtggacagcggcctgtacctgggcatgaacgagagaggcgagctgtacggcagcaagaagctgaccagagagtgcgtgttcagagagcagttcgaggagaactggtacaacacctacgccagcaccctgtacaagcacagcgacagcgagagacagtactacgtggccctgaacaaggacggcagccccagagagggctacagaaccaagagacaccagaagttcacccacttcctgcccagacccgtggaccccagcaagctgcccagcatgagcagagacctgttccactacagatag

SEQ ID NO: 141568 - DNA, 351 bp, Artificial Sequence
  derived and/or modified sequence
tgaatcctggagtttatttcactggccgttggtctgatctccattcgaggcgtggattcgggtctctatctcgggatgaatgagcgcggcgagttgtatggcagcaaaaagctcacacgggaatgcgtgtttagagaacaattcgaagagaattggtacaatacatatgcttctactttgtataaacatagtgacagcgagaggcagtactatgtggccttgaataaagacggaagccctagagaaggctaccgaaccaaaaggcatcagaaatttacacactttcttcctcggcctgtggacccatctaaactgccatctatgagcagggatttattccattatagatag

SEQ ID NO: 141569 - DNA, 351 bp, Artificial Sequence
  derived and/or modified sequence
tgaatcctggagttcatcagcctggccgtgggcctcatcagcatccggggcgtggacagcggcctgtacctgggcatgaatgaaagaggagagctgtatggcagcaagaagctgaccagagaatgtgtgttccgggagcagtttgaggagaactggtacaacacctacgccagcaccctgtacaagcacagcgacagcgagcggcagtactacgtggccctgaacaaggatggcagcccccgggagggctaccgcaccaagaggcaccagaagttcacccacttcctgcccaggcctgtggaccccagcaagctgcccagcatgagccgggacctcttccactacagatag

SEQ ID NO: 141570 - DNA, 351 bp, Artificial Sequence
  derived and/or modified sequence
tgaatcctggagttcatcagcctggccgtgggcctgatcagcatccgtggcgtggactccggcctgtatttgggaatgaacgagagaggcgagctgtacggctctaagaagcttacccgcgaatgtgtattccgagagcaattcgaagagaactggtacaacacctacgccagcactttatataaacatagcgattctgagcggcagtactatgtcgcactgaataaggatggctccccacgggagggctaccggactaagcgacaccagaaatttacccatttcctgccaaggccagtggatcccagtaagctgccttctatgtcgagagaccttttccactatagatag

SEQ ID NO: 141571 - DNA, 351 bp, Artificial Sequence
  derived and/or modified sequence
tgaatattggagttcatatcacttgcagtaggcctgatttccatacgcggagtggactctggactgtatctggggatgaacgagcgcggtgagctttacggatccaagaagctgaccagggagtgcgtattccgcgagcagttcgaagagaactggtacaacacttacgccagcaccctctataaacacagcgattcggaacggcagtattacgtggctctgaacaaagacggatccccaagagaaggttatcggacaaaaagacaccagaaattcacccattttcttccaagacccgtcgaccctagcaaactacccagcatgagtagagatttgtttcattacagatag

SEQ ID NO: 141572 - DNA, 1106 bp, Artificial Sequence
  derived and/or modified sequence
gaatcctggagtttatcagcctggctgtggggctgatcagcatccggggagtggactctggcctgtacctaggaatgaatgagcgaggagaactctatgggtcgaagaaactcacacgtgaatgtgttttccgggaacagtttgaagaaaactggtacaacacctatgcctcaaccttgtacaaacattcggactcagagagacagtattacgtggccctgaacaaagatggctcaccccgggagggatacaggactaaacgacaccagaaattcactcactttttacccaggcctgtagatccttctaagttgccctccatgtccagagacctctttcactataggtaatgaacctctggtgtgccctctgtgacccatgtaccctggggccacggttgtctctgcaagcactatattcatagcttttcaatccttccttcctatcattttagataacagaaaagcacttactgttgaactcaacccagctgttcccttgttgttcaaagtgtatatcaaggttgggttattttggggagggatggggggctgggctcgagggaatcttgtatatacttttttctttactcatgttccttcccctgaggtagcataacaaagaatgggagcccctgctaagggccaggggtgtcttaccccacaatttactcaaataccttgacaatgggtataaatgaaaggccaaggaatctgccacagatgctacctacagagctttggaaaagtctcattaagaaaatccttggggctacagccttgctgcaagccttccctgcattggctctgcagatttctcatctgtcctgacatgcagttttcctgtcattggaagtgggagatggggtaggttgtaagaaaatgatattaaaatgtaagcatggatactgtgcataaggacaaactatttataaaatgtatatgctatttattttatatatttatttatttcaaaataataattttatttttaatgagagatgcgatggctggattttcatcagaaagaataaggtcctactgaaacaggataaaatgagttattaaaggcttttactgacaataaaatttgtctttatattgtaa

SEQ ID NO: 141573 - DNA, 624 bp, Artificial Sequence
  derived and/or modified sequence
atggcagaggtggggggcgtcttcgcctccttggactgggatctacacggcttctcctcgtctctggggaacgtgcccttagctgactccccaggtttcctgaacgagcgcctgggccaaatcgaggggaagctgcagcgtggctcacccacagacttcgcccacctgaaggggatcctgcggcgccgccagctctactgccgcaccggcttccacctggagatcttccccaacggcacggtgcacgggacccgccacgaccacagccgcttcggaatcctggagtttatcagcctggctgtggggctgatcagcatccggggagtggactctggcctgtacctaggaatgaatgagcgaggagaactctatgggtcgaagaaactcacacgtgaatgtgttttccgggaacagtttgaagaaaactggtacaacacctatgcctcaaccttgtacaaacattcggactcagagagacagtattacgtggccctgaacaaagatggctcaccccgggagggatacaggactaaacgacaccagaaattcactcactttttacccaggcctgtagatccttctaagttgccctccatgtccagagacctctttcactataggtaa

SEQ ID NO: 141574 - protein, 623 aa, Artificial Sequence
  derived and/or modified sequence
MTAQSRSPTTPTFPGPSQRTPLTPCPVQTPRLGKALIHCWTDPGQPLGEQQRVRRQRTETSEPTMRLHRLRARLSAVACGLLLLLVRGQGQDSASPIRTTHTGQVLGSLVHVKGANAGVQTFLGIPFAKPPLGPLRFAPPEPPESWSGVRDGTTHPAMCLQDLTAVESEFLSQFNMTFPSDSMSEDCLYLSIYTPAHSHEGSNLPVMVWIHGGALVFGMASLYDGSMLAALENVVVVIIQYRLGVLGFFSTGDKHATGNWGYLDQVAALRWVQQNIAHFGGNPDRVTIFGESAGGTSVSSLVVSPISQGLFHGAIMESGVALLPGLIASSADVISTVVANLSACDQVDSEALVGCLRGKSKEEILAINKPFKMIPGVVDGVFLPRHPQELLASADFQPVPSIVGVNNNEFGWLIPKVMRIYDTQKEMDREASQAALQKMLTLLMLPPTFGDLLREEYIGDNGDPQTLQAQFQEMMADSMFVIPALQVAHFQCSRAPVYFYEFQHQPSWLKNIRPPHMKADHGDELPFVFRSFFGGNYIKFTEEEEQLSRKMMKYWANFARNGNPNGEGLPHWPLFDQEEQYLQLNLQPAVGRALKAHRLQFWKKALPQKIQELEEPEERHTEL

SEQ ID NO: 141575 - DNA, 1872 bp, Artificial Sequence
  derived and/or modified sequence
atgaccgcccagagcagaagccccaccacccccaccttccccggccccagccagagaacccccctgaccccctgccccgtgcagacccccagactgggcaaggccctgatccactgctggaccgaccccggccagcccctgggcgagcagcagagagtgagaagacagagaaccgagaccagcgagcccaccatgagactgcacagactgagagccagactgagcgccgtggcctgcggcctgctgctgctgctggtgagaggccagggccaggacagcgccagccccatcagaaccacccacaccggccaggtgctgggcagcctggtgcacgtgaagggcgccaacgccggcgtgcagaccttcctgggcatccccttcgccaagccccccctgggccccctgagattcgccccccccgagccccccgagagctggagcggcgtgagagacggcaccacccaccccgccatgtgcctgcaggacctgaccgccgtggagagcgagttcctgagccagttcaacatgaccttccccagcgacagcatgagcgaggactgcctgtacctgagcatctacacccccgcccacagccacgagggcagcaacctgcccgtgatggtgtggatccacggcggcgccctggtgttcggcatggccagcctgtacgacggcagcatgctggccgccctggagaacgtggtggtggtgatcatccagtacagactgggcgtgctgggcttcttcagcaccggcgacaagcacgccaccggcaactggggctacctggaccaggtggccgccctgagatgggtgcagcagaacatcgcccacttcggcggcaaccccgacagagtgaccatcttcggcgagagcgccggcggcaccagcgtgagcagcctggtggtgagccccatcagccagggcctgttccacggcgccatcatggagagcggcgtggccctgctgcccggcctgatcgccagcagcgccgacgtgatcagcaccgtggtggccaacctgagcgcctgcgaccaggtggacagcgaggccctggtgggctgcctgagaggcaagagcaaggaggagatcctggccatcaacaagcccttcaagatgatccccggcgtggtggacggcgtgttcctgcccagacacccccaggagctgctggccagcgccgacttccagcccgtgcccagcatcgtgggcgtgaacaacaacgagttcggctggctgatccccaaggtgatgagaatctacgacacccagaaggagatggacagagaggccagccaggccgccctgcagaagatgctgaccctgctgatgctgccccccaccttcggcgacctgctgagagaggagtacatcggcgacaacggcgacccccagaccctgcaggcccagttccaggagatgatggccgacagcatgttcgtgatccccgccctgcaggtggcccacttccagtgcagcagagcccccgtgtacttctacgagttccagcaccagcccagctggctgaagaacatcagacccccccacatgaaggccgaccacggcgacgagctgcccttcgtgttcagaagcttcttcggcggcaactacatcaagttcaccgaggaggaggagcagctgagcagaaagatgatgaagtactgggccaacttcgccagaaacggcaaccccaacggcgagggcctgccccactggcccctgttcgaccaggaggagcagtacctgcagctgaacctgcagcccgccgtgggcagagccctgaaggcccacagactgcagttctggaagaaggccctgccccagaagatccaggagctggaggagcccgaggagagacacaccgagctgtag

SEQ ID NO: 141576 - DNA, 1872 bp, Artificial Sequence
  derived and/or modified sequence
atgactgcccagtctaggagccctacaacccccacattcccaggcccctctcagaggacaccactgacaccttgtcctgtccaaacaccacgactgggtaaagcactaattcactgctggactgatcccggccagcctttaggcgagcagcagcgggtgcgcaggcagaggactgagacgtctgagcctaccatgcgattgcataggttgagggcacgtctttctgctgtcgcctgtgggctcctgctacttctagtccgaggccaagggcaagacagcgcttcgcctatacgaactacccacaccggccaagttcttggatccttggttcacgtcaaaggggccaatgcaggagtgcaaacatttttgggaatccctttcgcaaaaccaccactcggcccattaaggtttgccccacccgaaccccccgagagttggtccggcgtgcgtgatgggaccactcacccagcaatgtgtcttcaggatttgacagcggtggaatccgaattcctgtcacagttcaacatgaccttcccttctgattcaatgtccgaggactgcttgtatctcagcatctatacaccggctcactctcatgagggaagtaatctgcccgtgatggtgtggattcacgggggagccctcgtgttcgggatggcttctttatacgacggtagcatgctagccgctctggaaaacgtggtggttgtaatcattcagtacagattaggggtattagggtttttctctacgggcgacaaacacgctactggaaattgggggtatttggaccaggttgcagcactgcggtgggtgcagcagaacatcgcccactttggaggcaaccctgatcgggtcactatttttggggagtccgctggcgggacaagtgtttccagcctagttgtatcgccaatttctcaggggctctttcacggagctatcatggaatccggggtggctttacttcccggcctgatagcttctagcgcagatgtgatatccactgtggtggccaatctctctgcatgtgatcaggtggatagcgaagcactggtgggctgtctgcggggcaaaagcaaagaggagatcttggccatcaataagccattcaagatgatccctggagtggtggacggtgtgttcctaccccggcacccacaagagcttctggcttctgcagactttcagcctgtcccgtcgatcgttggcgtcaacaacaatgagtttggttggttgatccctaaagtgatgcgcatctatgacacacagaaggaaatggatagggaagcgtcgcaggctgcactgcagaaaatgctgactcttctcatgctcccccccacatttggcgaccttctgcgcgaagagtatataggagacaacggcgatccacagactttgcaagctcagtttcaggagatgatggcagactccatgtttgttattcccgcactgcaggtggctcatttccagtgttctcgggcgcctgtttatttctatgagtttcaacaccagccatcttggcttaagaacatcagaccaccacacatgaaagcagatcacggcgacgaacttccctttgtgtttagatctttcttcggggggaactacattaaatttacagaggaagaggagcaactttccagaaaaatgatgaaatattgggcaaatttcgcacgtaatggcaaccccaatggagagggactgccccactggccgctgttcgaccaggaggaacagtacttacagctcaaccttcagcccgcagtgggtagagctctgaaggcccatcggctgcagttctggaaaaaggccctcccacagaaaatccaggagctggaggagcccgaagaaaggcacacagaattatag

SEQ ID NO: 141577 - DNA, 1872 bp, Artificial Sequence
  derived and/or modified sequence
atgacagcccagagccgcagccccaccacccccaccttccctggccccagccagaggacccccctgaccccctgccctgtgcagaccccccggctgggcaaggccctgatccactgctggacagatcctggccagcccctgggggagcagcagagggtgcggcggcagaggacagagaccagcgagcccaccatgaggctgcaccggctgcgggcccggctgtctgctgtggcctgtggcctgctgctgctgctggtgcggggccagggccaggacagcgccagccccatccgcaccacccacacaggccaggtgctgggcagcctggtgcacgtgaagggggccaatgccggcgtgcagaccttcctgggcatcccctttgccaagccacccctgggccccctgcgctttgcccctcctgagcccccagagagctggagcggcgtgagagatggcaccacccacccagccatgtgcctgcaggacctgacagctgtggagagcgagttcctgagccagttcaacatgaccttccccagcgacagcatgtctgaggactgcctgtacctgagcatctacaccccagcccacagccatgagggcagcaacctgcctgtgatggtgtggattcatggaggagccctggtgtttggcatggccagcctgtatgatggctccatgctggccgccctggagaatgtggtggtggtgatcatccagtaccgcctgggcgtgctgggcttcttcagcactggagacaagcacgccactggaaactggggctacctggaccaggtggccgccctgcgctgggtgcagcagaacatcgcccactttggaggcaacccagacagagtgaccatctttggagagagcgctgggggcacctctgtgagcagcctggtggtgagccccatcagccagggcctcttccacggggccatcatggagagcggcgtggccctgctgcccggcctgattgccagcagcgcagatgtgatcagcacagtggtggccaacctgagcgcctgtgaccaggtggacagcgaggccctggtgggctgcctgcggggcaagagcaaggaggagatcctggccatcaacaagcccttcaagatgatccctggggtggtggatggagtcttcctgcccaggcacccccaggagctgctggccagcgctgacttccagcctgtgcccagcatcgtgggcgtgaacaacaatgaatttggctggctgatccccaaggtgatgaggatctatgacacccagaaggagatggaccgggaggccagccaggccgccctgcagaagatgctgaccctgctgatgctgccccccacctttggagacctgctgcgggaggagtacatcggggacaatggagacccccagaccctgcaggcccagttccaggagatgatggctgacagcatgtttgtgatcccagccctgcaggtggcccacttccagtgcagccgggcccctgtgtacttctatgagttccagcaccagcccagctggctgaagaacatccggcccccccacatgaaggctgaccatggagatgagctgccctttgtgttccgctccttctttggaggcaactacatcaagttcacagaggaggaggagcagctgagcaggaagatgatgaagtactgggccaactttgccagaaatggaaaccccaatggagagggcctgccccactggcccctgtttgaccaggaggagcagtacctgcagctgaacctgcagcctgctgtgggccgggccctgaaggcccaccggctgcagttctggaagaaggccctgccccagaagatccaggagctggaggagcctgaggagcggcacacagagctgtag

SEQ ID NO: 141578 - DNA, 1872 bp, Artificial Sequence
  derived and/or modified sequence
atgaccgcccagagccggagccccaccacccccaccttccccggccccagccagagaactcccctgacaccctgccctgtacaaacaccaaggctaggaaaggccctaatccactgctggacagacccaggccagcctttgggagagcaacagcgtgtgcgtcggcagagaacagagacctccgagcctacaatgcggttacaccgtctgcgcgcccgcctgtctgctgtcgcctgcggactgctcctactactggttagagggcagggtcaggacagcgctagcccaataaggactacccacacggggcaggtgctaggctctctcgtgcatgtgaagggggctaatgccggtgtgcagacattcttagggatcccatttgccaagccccccctaggtcctctgcgatttgccccccccgaaccccccgaatcttggtccggcgtacgtgacggcacaacccatcctgcaatgtgcctgcaggacctgactgccgtggagagcgaatttttgagtcaatttaatatgacattcccttcagactccatgtcagaggactgcctgtacttaagtatctatacccccgcccactcacacgaagggagtaatcttcctgtaatggtttggatccacggaggggcgctggtgtttggcatggcctccctctacgacgggtcaatgcttgccgctctcgaaaacgtggtggtagtgatcatccaatacaggcttggggtgctgggctttttttcgactggggataaacacgccactggcaactggggctacttggaccaggtcgccgccttgcgctgggtacaacagaacatcgctcatttcggcggcaaccccgaccgcgtgactatttttggggaatccgccggcggcacctcagtatccagcttggtggtgtcacctatttcacagggattattccatggtgctatcatggaatccggcgttgccttgctgccgggcctgattgcgagtagcgctgatgtgatctctactgtagttgccaatctgagtgcctgcgatcaggtcgactctgaggcactggtcggttgtctgcgcggcaagtccaaagaggagattttagccatcaacaaaccttttaagatgatacctggcgtggttgacggcgtgttccttccgcggcatccccaggaacttctggcctccgccgactttcagcccgtgccttccatagtaggggtgaacaacaatgagttcggctggctcattccaaaagtgatgcgcatttatgatacccaaaaggagatggatcgggaggccagtcaggcagccctgcagaagatgctgaccttactgatgctgccgccaactttcggggacctccttcgcgaagagtatataggtgacaacggagaccctcagaccttgcaggcccagtttcaggagatgatggcggatagcatgttcgtgatacctgctttgcaggtggctcacttccaatgttcacgcgccccagtgtatttctatgaattccaacaccaaccttcatggctgaaaaacatccggcccccacatatgaaggccgaccatggagacgaactcccattcgtgtttaggagcttcttcggcggaaactacatcaagttcaccgaggaagaggagcagttgagtcgtaaaatgatgaaatactgggccaactttgctagaaatggcaatccgaatggggaaggccttccgcactggcctctgtttgaccaggaggagcagtacctgcagctcaatttacaaccagctgtggggcgagccctcaaggctcatcgcctgcagttctggaaaaaggctctgccccagaagattcaggagctagaagagcccgaggaaaggcataccgaattgtag

SEQ ID NO: 141579 - DNA, 1872 bp, Artificial Sequence
  derived and/or modified sequence
atgaccgcacagtcccgtagtcccactacacccacttttcctggtccatcccagcgaacgcccctgactccctgccccgtgcagacccctagactgggcaaggcactgatccattgttggaccgatccaggtcagcctctgggtgagcagcagcgcgttaggagacagcgaaccgaaacatccgagccaactatgagactgcaccgtctgagggctcggctcagcgccgtcgcctgtggtctgctgcttctgttggtccgaggtcaaggccaggattctgcaagcccgataaggaccacacacaccggccaggtcctgggatcgctagtgcatgtgaaaggcgcaaacgctggagtccagacatttttgggcatcccattcgctaagccacccctgggccctctgcgctttgctcctcctgaacccccagagtcatggagcggagtgagagatggcaccacacaccctgccatgtgcctgcaggacctaactgcagtagaaagcgagtttctgagccagttcaacatgacctttccctctgattcaatgagcgaggactgcctgtacctcagcatttacaccccagcccactcgcatgaagggtccaacctgcctgtgatggtgtggatccatggcggagccctggtgtttggcatggcctcactatatgatggatcaatgttggctgccctcgagaatgtggtggtagtgatcattcagtatcgcctcggcgtgctgggctttttttctaccggagataagcatgcgacaggtaattgggggtacctcgatcaagtcgctgctctccgttgggtccagcaaaacatagcccactttggcggaaatccagaccgggttaccatcttcggagagagtgccggagggacttcggtgtccagcctggtcgtgtcaccaatttctcagggcctattccacggagcgataatggagtccggagtggctctgctgccaggcctgatcgcgagctcggctgacgtcatcagtactgtggtcgcaaacttatcggcttgtgatcaagtggactcagaggcgctggtgggctgcctccgcggaaagtctaaggaagaaattctggccatcaataagcctttcaagatgataccaggggtcgtggacggggtcttcctcccacggcacccgcaggagcttcttgccagcgcagacttccagcctgtgcccagcatagtaggtgtgaataataacgagttcggatggctgatcccaaaggtgatgcggatctacgatacccagaaggagatggaccgggaggcatcgcaagctgctttgcagaaaatgctcactctgttgatgctcccacccacttttggcgacttactgagagaagagtatattggagacaacggcgatccccagacactgcaggcccagttccaggagatgatggccgattccatgtttgtgatccccgcactgcaggtggcacactttcaatgctccagggcccctgtgtacttttacgagtttcaacaccagccttcatggctgaaaaatataaggccgcctcatatgaaggctgatcacggcgatgaactcccttttgtgtttaggtcattcttcggaggcaactatataaagttcaccgaagaagaggaacagctatcacgaaagatgatgaaatattgggccaactttgcccgaaacggcaacccgaatggcgaaggacttccccactggcccctctttgaccaggaggagcaatatctccaattaaacctgcagcccgctgtgggtagagccctcaaagcacacagactgcagttctggaaaaaggccttgccccaaaaaatccaggagctggaggaacccgaagaacgacatacagagctctag

SEQ ID NO: 141580 - DNA, 3927 bp, Artificial Sequence
  derived and/or modified sequence
gtcgcgcgagggacacgccgcgttgtgggttctcggcctgaggtgcgagagaagcggtgaccgcggccctggctgctcggacccgggaacatgatggtcgctggagcagaaggcgctgagaagggaccacggcggcgctgggtcgtgcgagccagtagcgggctgaaacgtagaggccagaaccaggtctcagggggcactaaaggcggtcggaggtaatccccacaccgcttcctcctggaagtcaggctggccgggagctcccgtatccaggacggttggtcgcctctggcctggcagggatcctagtgtctcgggacctcccggtgacgcgcctgcctcccctgctgcaccataggcccgggagtacggcgtccccacagcttggaccggcaggggctcgtgaaatgtttgtcaagtggataaatgaccatggccgtggtctccgcgggaggtgaggaaactgaaagccaccgaggaaaaggggggcgctccttaagaagtgccgcggtcacgtgtacgtttcaaaagaatggcgtgactgagtagggaggggaccgcggagaccctcagaccctggactgtaaggagatgaggggccgtgaaggggaacccaggaaactgagtcctgaaagcaaggaggaacttccagaatgaagggcgccgacactccttcctgcctttgctcaagcggttccttcaccccgatcaagttccttcccatttctccatctgggggatcctgaacgtgcacatcctcagagaagccctcctggggtctccaattctagtttattgccccctcctatcgatcccccagcgcgctcatcgggcctgtggacaaggacaggtttgaagagaggattccctggatcgcggaagggctgcaggaatggcacagccccttccgaggatgccaaaggagcccgggcaaaggaaagtggccgtgcccgggcctgcctaccactagatccccacccacctatgactgctcagtcccgctctcctaccacacccacctttcccggcccaagccagcgcaccccgctgactccctgcccagtccaaactccaaggctgggcaaggcactgatccactgctggacagacccggggcagcctctgggtgaacagcagcgtgtccgccggcagcgaaccgagaccagcgagccgaccatgcggctgcacagacttcgtgcgcggctgagcgcggtggcctgtgggcttctgctgcttcttgtccggggccagggccaggactcagccagtcccatccggaccacacacacggggcaggtgctggggagtcttgtccatgtgaagggcgccaatgccggggtccaaaccttcctgggaattccatttgccaagccacctctaggtccgctgcgatttgcaccccctgagccccctgaatcttggagtggtgtgagggatggaaccacccatccggccatgtgtctacaggacctcaccgcagtggagtcagagtttcttagccagttcaacatgaccttcccttccgactccatgtctgaggactgcctgtacctcagcatctacacgccggcccatagccatgaaggctctaacctgccggtgatggtgtggatccacggtggtgcgcttgtttttggcatggcttccttgtatgatggttccatgctggctgccttggagaacgtggtggtggtcatcatccagtaccgcctgggtgtcctgggcttcttcagcactggagacaagcacgcaaccggcaactggggctacctggaccaagtggctgcactacgctgggtccagcagaatatcgcccactttggaggcaaccctgaccgtgtcaccatttttggcgagtctgcgggtggcacgagtgtgtcttcgcttgttgtgtcccccatatcccaaggactcttccacggagccatcatggagagtggcgtggccctcctgcccggcctcattgccagctcagctgatgtcatctccacggtggtggccaacctgtctgcctgtgaccaagttgactctgaggccctggtgggctgcctgcggggcaagagtaaagaggagattcttgcaattaacaagcctttcaagatgatccccggagtggtggatggggtcttcctgcccaggcacccccaggagctgctggcctctgccgactttcagcctgtccctagcattgttggtgtcaacaacaatgaattcggctggctcatccccaaggtcatgaggatctatgatacccagaaggaaatggacagagaggcctcccaggctgctctgcagaaaatgttaacgctgctgatgttgcctcctacatttggtgacctgctgagggaggagtacattggggacaatggggatccccagaccctccaagcgcagttccaggagatgatggcggactccatgtttgtgatccctgcactccaagtagcacattttcagtgttcccgggcccctgtgtacttctacgagttccagcatcagcccagctggctcaagaacatcaggccaccgcacatgaaggcagaccatggtgatgagcttccttttgttttcagaagtttctttgggggcaactacattaaattcactgaggaagaggagcagctaagcaggaagatgatgaagtactgggccaactttgcgagaaatgggaaccccaatggcgagggtctgccacactggccgctgttcgaccaggaggagcaatacctgcagctgaacctacagcctgcggtgggccgggctctgaaggcccacaggctccagttctggaagaaggcgctgccccaaaagatccaggagctcgaggagcctgaagagagacacacagagctgtagctccctgtgccggggaggagggggtgggttcgctgacaggcgagggtcagcctgctgtgcccacacacacccactaaggagaaagaagttgattccttcattcacttcgccattcattcatacttccgtccatccattcagaaagcatttattaagaatttactcaggcatgatggcccatacttgtaatcccagctattgggaaggatgagatgggaggatggcttgaggccagaggtttgagaccgaccagccagggcaacacagtgagaccccttctcaaaaaaaaaaaaaaaaaagagagagtgtgtgattagaagctaaataggaaagttttgagcttcaagtcagtgaggagtaaaaaagatttttaaaaagcaaagaaaacaaaatataagggaaaaatatgagaaaaataaaaataaaaagagaataataggccaggcactgtggctcatgcccctaatcccagcacttttgggaggtcaaggtgagcagaacacctgaggacaggagtttgagaccagcctgcccaacgtggtgaaaccccatctctatgaaaaatacaaaaatcagacgggcacagtggtggtgcccacctgtgatcccagctactcaggaggctgaggcaggagaattacttgaacctgggaggcagaggttgcagtgagctgagattgtgccactgtactccagcctgggcaacaagagcgagactccgtttccaaaaaaataagagagaatagaagaagctactgcatgatgttagttaccaagcctgccatgggtcctctcttgctagacacactccatagatccccccactgagctgtggatgggcaaaccccggtggaatcccaccctccccaacaccccactgagccctgggccccctcctcccttcctcacctccaccttctccctgccttctctcttctctcgtctgagcccccaggccttttccactttgagggaggtgcttcgaagaatgttgcccacacctaagtgttagaagcctatgtccgttcatccctgagaggtctgaaagaataaaaataaattctaaaaaaa

SEQ ID NO: 141581 - protein, 1657 aa, Artificial Sequence
  derived and/or modified sequence
MSAADEVDGLGVARPHYGSVLDNERLTAEEMDERRRQNVAYEYLCHLEEAKRWMEACLGEDLPPTTELEEGLRNGVYLAKLGNFFSPKVVSLKKIYDREQTRYKATGLHFRHTDNVIQWLNAMDEIGLPKIFYPETTDIYDRKNMPRCIYCIHALSLYLFKLGLAPQIQDLYGKVDFTEEEINNMKTELEKYGIQMPAFSKIGGILANELSVDEAALHAAVIAINEAIDRRIPADTFAALKNPNAMLVNLEEPLASTYQDILYQAKQDKMTNAKNRTENSERERDVYEELLTQAEIQGNINKVNTFSALANIDLALEQGDALALFRALQSPALGLRGLQQQNSDWYLKQLLSDKQQKRQSGQTDPLQKEELQSGVDAANSAAQQYQRRLAAVALINAAIQKGVAEKTVLELMNPEAQLPQVYPFAADLYQKELATLQRQSPEHNLTHPELSVAVEMLSSVALINRALESGDVNTVWKQLSSSVTGLTNIEEENCQRYLDELMKLKAQAHAENNEFITWNDIQACVDHVNLVVQEEHERILAIGLINEALDEGDAQKTLQALQIPAAKLEGVLAEVAQHYQDTLIRAKREKAQEIQDESAVLWLDEIQGGIWQSNKDTQEAQKFALGIFAINEAVESGDVGKTLSALRSPDVGLYGVIPECGETYHSDLAEAKKKKLAVGDNNSKWVKHWVKGGYYYYHNLETQEGGWDEPPNFVQNSMQLSREEIQSSISGVTAAYNREQLWLANEGLITRLQARCRGYLVRQEFRSRMNFLKKQIPAITCIQSQWRGYKQKKAYQDRLAYLRSHKDEVVKIQSLARMHQARKRYRDRLQYFRDHINDIIKIQAFIRANKARDDYKTLINAEDPPMVVVRKFVHLLDQSDQDFQEELDLMKMREEVITLIRSNQQLENDLNLMDIKIGLLVKNKITLQDVVSHSKKLTKKNKEQLSDMMMINKQKGGLKALSKEKREKLEAYQHLFYLLQTNPTYLAKLIFQMPQNKSTKFMDSVIFTLYNYASNQREEYLLLRLFKTALQEEIKSKVDQIQEIVTGNPTVIKMVVSFNRGARGQNALRQILAPVVKEIMDDKSLNIKTDPVDIYKSWVNQMESQTGEASKLPYDVTPEQALAHEEVKTRLDSSIRNMRAVTDKFLSAIVSSVDKIPYGMRFIAKVLKDSLHEKFPDAGEDELLKIIGNLLYYRYMNPAIVAPDAFDIIDLSAGGQLTTDQRRNLGSIAKMLQHAASNKMFLGDNAHLSIINEYLSQSYQKFRRFFQTACDVPELQDKFNVDEYSDLVTLTKPVIYISIGEIINTHTLLLDHQDAIAPEHNDPIHELLDDLGEVPTIESLIGESSGNLNDPNKEALAKTEVSLTLTNKFDVPGDENAEMDARTILLNTKRLIVDVIRFQPGETLTEILETPATSEQEAEHQRAMQRRAIRDAKTPDKMKKSKSVKEDSNLTLQEKKEKIQTGLKKLTELGTVDPKNKYQELINDIARDIRNQRRYRQRRKAELVKLQQTYAALNSKATFYGEQVDYYKSYIKTCLDNLASKGKVSKKPREMKGKKSKKISLKYTAARLHEKGVLLEIEDLQVNQFKNVIFEISPTEEVGDFEVKAKFMGVQMETFMLHYQDLLQLQYEGVAVMKLFDRAKVNVNLLIFLLNKKFYGK

SEQ ID NO: 141582 - DNA, 106 bp, Artificial Sequence
  derived and/or modified sequence
aattgcaaaagaaacacacatatacacatataaaactcaagaaagacaaaactaacctatggtgatagaaatcagaaaagtacagtacattggttgtcttggtggg

SEQ ID NO: 141583 - DNA, 4974 bp, Artificial Sequence
  derived and/or modified sequence
atgtcggctgccgacgaggttgacgggctgggagtggcaaggccacactacgggtccgtactggataatgaaaggttaaccgccgaggagatggatgaaagacgccgtcagaacgttgcctatgaatacctgtgccatttagaggaggccaaacgctggatggaagcctgcctgggcgaagaccttcctccgaccactgagctggaagagggattgcggaacggggtctacctggccaaacttggaaacttcttttctccaaaagtcgtgtccctgaagaagatctacgaccgcgaacaaacccgatacaaagccaccgggctccatttccgacataccgacaatgtgatccaatggctgaacgcaatggatgagatagggctgcctaagatattttacccagagacaaccgatatctatgacagaaaaaatatgccgcggtgtatatactgtattcacgcgctttcgctttacctttttaagttaggtctcgctccccaaatccaggacttgtacgggaaggtggactttaccgaggaagaaatcaataatatgaagacagagcttgaaaaatacggaatccagatgccagcgttctctaaaataggcggaatcctggcaaacgaactctctgttgatgaggctgctctgcatgccgcagtgatagccattaatgaggccattgatcgcagaatccctgccgacacatttgccgccctcaagaatcctaacgccatgttggttaatctggaagaaccattggccagcacttaccaggatatcctctatcaggccaagcaggataagatgaccaatgccaagaaccgcaccgagaactccgagagagagcgagatgtatacgaggagctgctgacccaggccgagattcaggggaacatcaacaaagtgaacacgttcagtgcactggcgaatatcgatctcgccctggaacagggtgacgccttggccttattccgcgccttgcagtcccccgcgctaggacttcggggcttacagcagcaaaatagtgattggtacctcaaacagctgctgtcagacaagcagcagaaacgccaaagcggacagacagaccccctgcagaaagaagagctgcagtccggagttgatgctgccaatagtgcggctcagcaatatcagcggcgactcgcggctgtggccctgattaatgcagcaatacagaagggcgtggctgaaaagaccgtactggagttaatgaaccctgaagcccaattgccgcaggtatacccttttgcagcggatctgtaccagaaggagctggccacccttcagagacagagtcccgaacacaatcttacacatcccgagttaagcgttgccgtcgagatgcttagttctgtggccctaatcaaccgtgccctggaatccggagatgtgaatactgtgtggaagcagctaagttccagcgtgaccggactaacgaatatcgaggaagaaaactgtcagagatacttggacgagctcatgaaactcaaggctcaggcccacgccgaaaacaatgaattcattacatggaacgacattcaggcgtgtgtcgatcacgtcaatttggtcgtccaggaggagcacgaaaggatcctcgctataggcttaataaatgaagcactggatgagggggatgcgcaaaagacactccaggccctccaaatacccgcagccaagttggaaggcgtcctggctgaagtggcgcagcattaccaggacacactgatcagagcaaagcgggagaaagcccaggagatccaagacgaaagcgcagtattgtggctggatgaaatacagggcgggatttggcagagcaacaaggatactcaggaggcccagaagttcgccttggggattttcgccatcaacgaagctgttgagtctggcgatgtgggcaagactttaagcgctctgcgctcgccggatgtaggcctgtacggtgtgatccccgagtgtggggaaacatatcacagtgatctagccgaggctaagaaaaaaaaattagcagtgggcgataacaacagcaaatgggtgaaacattgggtcaaagggggctactactattaccacaatttggagacccaagaaggcgggtgggatgagccccctaacttcgtgcaaaatagtatgcaattgtctagggaagaaatccagagcagtatctcaggggtgactgccgcttacaatcgcgaacagttgtggcttgcaaacgagggcctgatcacccgactgcaggcccggtgccgcggctaccttgtgagacaggaattccgctcccggatgaacttcctcaagaaacaaatccctgcaatcacgtgcatacagagccaatggagagggtacaaacagaaaaaggcatatcaagaccggctggcctatctgcgctcccacaaagatgaagtagtcaaaattcaatccctagctagaatgcatcaggcaagaaaaagatatagagatcgcctgcagtacttcagggatcacattaacgacattataaagattcaggcgttcatccgggcaaacaaagctagggatgattacaaaaccctcattaatgctgaggatccgccgatggtggttgtccgaaagtttgttcacctgctggatcagtcagatcaggactttcaggaagagcttgatctgatgaagatgagagaggaagtcataaccctgatcaggagcaaccaacagttggaaaatgatctgaatctcatggacattaagatcggcctgctagtgaagaacaaaatcaccctgcaggacgtcgtgtcacactccaaaaagctgaccaagaagaataaagagcagctgtccgacatgatgatgatcaacaaacaaaaaggtggcctgaaggccctgtcgaaagagaagcgggagaaactagaggcttaccagcatctcttctatctcctgcaaacaaacccaacgtacctcgccaagctgattttccaaatgcctcaaaataagagcacgaagtttatggatagcgtgatttttactctttacaattacgcttcaaaccagagagaggaatatctgctcctccgcctgttcaaaacagcgcttcaggaagaaatcaaatcgaaagtggatcagatacaggaaattgtgacaggtaaccctactgtgattaagatggtcgtgagttttaacagaggcgcccgcgggcagaacgctttacgccagatcttggcccctgtggtgaaggaaatcatggatgacaaaagtcttaatataaagaccgatccggttgacatctataagtcttgggtgaaccaaatggaatcacagacaggagaagcttcgaagttgccctatgacgtgacacccgagcaagccctggcccatgaagaggtgaagaccaggttagattctagcattcgaaacatgagagctgtcactgataagttcctctctgccatcgtgtcctcagtcgacaagatcccatacggcatgagatttatagctaaagtgctcaaagattccctgcacgaaaaattcccggacgccggcgaagacgaacttttgaaaatcatcggaaacttgctttactatcgctacatgaaccctgccattgtagctccagacgccttcgacattattgacctatctgcaggcggccagttgactacggatcagcgtaggaacctgggttccatcgccaaaatgctccagcatgctgctagcaataagatgtttctgggcgataacgcccaccttagcattatcaacgaatacctctctcaatcttatcagaaattcaggcgattcttccagacagcctgcgatgtaccggagctccaggataagttcaatgttgacgaatactctgatttggtgacactgaccaagcccgtgatttatatttctataggggaaattattaacacccatactctcctgctggaccatcaagacgccatagctccggaacacaacgacccgatccacgagctcctcgacgatttaggggaggtccccaccattgagagtttaatcggcgagtcctcgggtaacttgaatgaccctaataaggaggccctggcaaaaaccgaagtgagcctcactcttacaaacaaatttgacgtccctggggacgagaatgcagagatggatgcacgaacaattctactcaacactaaacgactgatcgtagatgttatcagattccaacccggtgaaactttgaccgaaatcttggagacacccgctacgtccgagcaggaggctgaacatcagcgggccatgcagaggcgcgctatccgggatgccaagacgccagataagatgaaaaaatcaaagtcagtgaaagaagactctaatctcacactccaagagaagaaagagaagattcaaacgggtttaaagaagctgaccgaacttggcaccgtggatcctaaaaataaatatcaggagctcatcaacgacatcgctagagatattagaaatcagagaagataccgtcaacgccggaaagctgagctggtgaagctgcaacaaacttatgctgcgctcaacagcaaagccaccttctacggcgagcaggtagactactacaaatcttatatcaagacatgtcttgacaatctggcctctaaggggaaggtgagcaagaagcctcgggagatgaaaggcaaaaagtcgaaaaaaatatccctgaaatacaccgcagctagactccacgagaagggagtcctcctcgagatagaagatttgcaggtaaaccaatttaagaatgttatctttgaaataagccccaccgaggaggtgggcgactttgaggtcaaagcaaaattcatgggcgttcagatggagaccttcatgcttcattatcaggaccttcttcaactgcagtacgagggcgtagccgttatgaaacttttcgatcgcgctaaagtcaatgtgaatctcctgatttttcttcttaacaagaagttttacgggaaatag

SEQ ID NO: 141584 - DNA, 7233 bp, Artificial Sequence
  derived and/or modified sequence
gacggcacggggcggggcctcggggaccccggcaagcccgcgcacttggcaggagctgtagctaccgccgtccgcgcctccaaggtttcacggcttcctcagcagagactcgggctcgtccgccatgtccgccgcagacgaggttgacgggctgggcgtggcccggccgcactatggctctgtcctggataatgaaagacttactgcagaggagatggatgaaaggagacgtcagaacgtggcttatgagtacctttgtcatttggaagaagcgaagaggtggatggaagcatgcctaggggaagatctgcctcccaccacagaactggaggaggggcttaggaatggggtctaccttgccaaactggggaacttcttctctcccaaagtagtgtccctgaaaaaaatctatgatcgagaacagaccagatacaaggcgactggcctccactttagacacactgataatgtgattcagtggttgaatgccatggatgagattggattgcctaagattttttacccagaaactacagatatctatgatcgaaagaacatgccaagatgtatctactgtatccatgcactcagtttgtacctgttcaagctaggcctggcccctcagattcaagacctatatggaaaggttgacttcacagaagaagaaatcaacaacatgaagactgagttggagaagtatggcatccagatgcctgcctttagcaagattgggggcatcttggctaatgaactgtcagtggatgaagccgcattacatgctgctgttattgctattaatgaagctattgaccgtagaattccagccgacacatttgcagctttgaaaaatccgaatgccatgcttgtaaatcttgaagagcccttggcatccacttaccaggatatactttaccaggctaagcaggacaaaatgacaaatgctaaaaacaggacagaaaactcagagagagaaagagatgtttatgaggagctgctcacgcaagctgaaattcaaggcaatataaacaaagtcaatacattttctgcattagcaaatatcgacctggctttagaacaaggagatgcactggccttgttcagggctctgcagtcaccagccctggggcttcgaggactgcagcaacagaatagcgactggtacttgaagcagctcctgagtgataaacagcagaagagacagagtggtcagactgaccccctgcagaaggaggagctgcagtctggagtggatgctgcaaacagtgctgcccagcaatatcagagaagattggcagcagtagcactgattaatgctgcaatccagaagggtgttgctgagaagactgttttggaactgatgaatcccgaagcccagctgccccaggtgtatccatttgccgccgatctctatcagaaggagctggctaccctgcagcgacaaagtcctgaacataatctcacccacccagagctctctgtcgcagtggagatgttgtcatcggtggccctgatcaacagggcattggaatcaggagatgtgaatacagtgtggaagcaattgagcagttcagttactggtcttaccaatattgaggaagaaaactgtcagaggtatctcgatgagttgatgaaactgaaggctcaggcacatgcagagaataatgaattcattacatggaatgatatccaagcttgcgtggaccatgtgaacctggtggtgcaagaggaacatgagaggattttagccattggtttaattaatgaagccctggatgaaggtgatgcccaaaagactctgcaggccctacagattcctgcagctaaacttgagggagtccttgcagaagtggcccagcattaccaagacacgctgattagagcgaagagagagaaagcccaggaaatccaggatgagtcagctgtgttatggttggatgaaattcaaggtggaatctggcagtccaacaaagacacccaagaagcacagaagtttgccttaggaatctttgccattaatgaggcagtagaaagtggtgatgttggcaaaacactgagtgcccttcgctcccctgatgttggcttgtatggagtcatccctgagtgtggtgaaacttaccacagtgatcttgctgaagccaagaagaaaaaactggcagtaggagataataacagcaagtgggtgaagcactgggtaaaaggtggatattattattaccacaatctggagacccaggaaggaggatgggatgaacctccaaattttgtgcaaaattctatgcagctttctcgggaggagatccagagttctatctctggggtgactgccgcatataaccgagaacagctgtggctggccaatgaaggcctgatcaccaggctgcaggctcgctgccgtggatacttagttcgacaggaattccgatccaggatgaatttcctgaagaaacaaatccctgccatcacctgcattcagtcacagtggagaggatacaagcagaagaaggcatatcaagatcggttagcttacctgcgctcccacaaagatgaagttgtaaagattcagtccctggcaaggatgcaccaagctcgaaagcgctatcgagatcgcctgcagtacttccgggaccatataaatgacattatcaaaatccaggcttttattcgggcaaacaaagctcgggatgactacaagactctcatcaatgctgaggatcctcctatggttgtggtccgaaaatttgtccacctgctggaccaaagtgaccaggattttcaggaggagcttgaccttatgaagatgcgggaagaggttatcaccctcattcgttctaaccagcagctggagaatgacctcaatctcatggatatcaaaattggactgctagtgaaaaataagattacgttgcaggatgtggtttcccacagtaaaaaacttaccaaaaaaaataaggaacagttgtctgatatgatgatgataaataaacagaagggaggtctcaaggctttgagcaaggagaagagagagaagttggaagcttaccagcacctgttttatttattgcaaaccaatcccacctatctggccaagctcatttttcagatgccccagaacaagtccaccaagttcatggactctgtaatcttcacactctacaactacgcgtccaaccagcgagaggagtacctgctcctgcggctctttaagacagcactccaagaggaaatcaagtcgaaggtagatcagattcaagagattgtgacaggaaatcctacggttattaaaatggttgtaagtttcaaccgtggtgcccgtggccagaatgccctgagacagatcttggccccagtcgtgaaggaaattatggatgacaaatctctcaacatcaaaactgaccctgtggatatttacaaatcttgggttaatcagatggagtctcagacaggagaggcaagcaaactgccctatgatgtgacccctgagcaggcgctagctcatgaagaagtgaagacacggctagacagctccatcaggaacatgcgggctgtgacagacaagtttctctcagccattgtcagctctgtggacaaaatcccttatgggatgcgcttcattgccaaagtgctgaaggactcgttgcatgagaagttccctgatgctggtgaggatgagctgctgaagattattggtaacttgctttattatcgatacatgaatccagccattgttgctcctgatgcctttgacatcattgacctgtcagcaggaggccagcttaccacagaccaacgccgaaatctgggctccattgcaaaaatgcttcagcatgctgcttccaataagatgtttctgggagataatgcccacttaagcatcattaatgaatatctttcccagtcctaccagaaattcagacggtttttccaaactgcttgtgatgtcccagagcttcaggataaatttaatgtggatgagtactctgatttagtaaccctcaccaaaccagtaatctacatttccattggtgaaatcatcaacacccacactctcctgttggatcaccaggatgccattgctccggagcacaatgatccaatccacgaactgctggacgacctcggcgaggtgcccaccatcgagtccctgataggggaaagctctggcaatttaaatgacccaaataaggaggcactggctaagacggaagtgtctctcaccctgaccaacaagttcgacgtgcctggagatgagaatgcagaaatggatgctcgaaccatcttactgaatacaaaacgtttaattgtggatgtcatccggttccagccaggagagaccttgactgaaatcctagaaacaccagccaccagtgaacaggaagcagaacatcagagagccatgcagagacgtgctatccgtgatgccaaaacacctgacaagatgaaaaagtcaaaatctgtaaaggaagacagcaacctcactcttcaagagaagaaagagaagatccagacaggtttaaagaagctaacagagcttggaaccgtggacccaaagaacaaataccaggaactgatcaacgacattgccagggatattcggaatcagcggaggtaccgacagaggagaaaggccgaactagtgaaactgcaacagacatacgctgctctgaactctaaggccaccttttatggggagcaggtggattactataaaagctatatcaaaacctgcttggataacttagccagcaagggcaaagtctccaaaaagcctagggaaatgaaaggaaagaaaagcaaaaagatttctctgaaatatacagcagcaagactacatgaaaaaggagttcttctggaaattgaggacctgcaagtgaatcagtttaaaaatgttatatttgaaatcagtccaacagaagaagttggagacttcgaagtgaaagccaaattcatgggagttcaaatggagacttttatgttacattatcaggacctgctgcagctacagtatgaaggagttgcagtcatgaaattatttgatagagctaaagtaaatgtcaacctcctgatcttccttctcaacaaaaagttctacgggaagtaattgatcgtttgctgccagcccagaaggatgaaggaaagaagcacctcacagctcctttctaggtccttctttcctcattggaagcaaagacctagccaacaacagcacctcaatctgatacactcccgatgccacatttttaactcctctcgctctgatgggacatttgttacccttttttcatagtgaaattgtgtttcaggcttagtctgacctttctggtttcttcattttcttccattacttaggaaagagtggaaactccactaaaatttctctgtgttgttacagtcttagaggttgcagtactatattgtaagctttggtgtttgtttaattagcaatagggatggtaggattcaaatgtgtgtcatttagaagtggaagctattagcaccaatgacataaatacatacaagacacacaactaaaatgtcatgttattaacagttattaggttgtcatttaaaaataaagttcctttatatttctgtcccatcaggaaaactgaaggatatggggaatcattggttatcttccattgtgtttttctttatggacaggagctaatggaagtgacagtcatgttcaaaggaagcatttctagaaaaaaggagataatgtttttaaatttcattatcaaacttgggcaattctgtttgtgtaactccccgactagtggatgggagagtcccattgctaaaattcagctactcagataaattcagaatgggtcaaggcacctgcctgtttttgttggtgcacagagattgacttgattcagagagacaattcactccatccctatggcagaggaatgggttagccctaatgtagaatgtcattgtttttaaaactgttttatatcttaagagtgccttattaaagtatagatgtatgtcttaaaatgtgggtgataggaattttaaagatttatataatgcatcaaaagccttagaataagaaaagctttttttaaattgctttatctgtatatctgaactcttgaaacttatagctaaaacactaggatttatctgcagtgttcagggagataattctgcctttaattgtctaaaacaaaaacaaaaccagccaacctatgttacacgtgagattaaaaccaattttttccccattttttctccttttttctcttgctgcccacattgtgcctttattttatgagccccagttttctgggcttagtttaaaaaaaaaatcaagtctaaacattgcatttagaaagcttttgttcttggataaaaagtcatacactttaaaaaaaaaaaaaactttttccaggaaaatatattgaaatcatgctgctgagcctctattttctttctttgatgttttgattcagtattcttttatcataaatttttagcatttaaaaattcactgatgtacattaagccaataaactgctttaatgaataacaaactatgtagtgtgtccctattataaatgcattggagaagtatttttatgagactctttactcaggtgcatggttacagcccacagggaggcatggagtgccatggaaggattcgccactacccagaccttgttttttgttgtattttggaagacaggttttttaaagaaacattttcctcagattaaaagatgatgctattacaactagcattgcctcaaaaactgggaccaaccaaagtgtgtcaaccctgtttccttaaaagaggctatgaatcccaaaggccacatccaagacaggcaataatgagcagagtttacagctcctttaataaaatgtgtcagtaattttaaggtttatagttccctcaacacaattgctaatgcagaatagtgtaaaatgcgcttcaagaatgttgatgatgatgatatagaattgtggctttagtagcacagaggatgccccaacaaactcatggcgttgaaaccacacagttctcattactgttatttattagctgtagcattctctgtctcctctctctcctcctttgaccttctcctcgaccagccatcatgacatttaccatgaatttacttcctcccaagagtttggactgcccgtcagattgttgctgcacatagttgcctttgtatctctgtatgaaataaaaggtcatttgttcatgtt

SEQ ID NO: 141585 - DNA, 4974 bp, Artificial Sequence
  derived and/or modified sequence
atgtctgctgctgatgaggtggatggcctgggcgtggcccggccccactacggctctgtgctggacaatgaaaggctgacagctgaggagatggatgagcggcggcggcagaatgtggcctatgagtacctgtgccacctggaggaggccaagcgctggatggaggcctgcctgggggaggacctgccccccaccacagagctggaggagggcctgagaaatggagtgtacctggccaagctgggcaacttcttcagccccaaggtggtgtccctgaagaagatctatgaccgggagcagacccgctacaaggccaccggcctgcacttccgccacacagacaacgtcatccagtggctgaatgccatggatgagatcggcctgcccaagatcttctacccagagaccacagacatctatgacaggaagaacatgccccgctgcatctactgcatccacgccctgagcctgtacctgttcaagctgggcctggccccccagatccaggacctgtatggcaaggtggacttcacagaggaggagatcaacaacatgaagacagagctggagaagtatggcatccagatgcctgccttcagcaagattggaggcatcctggccaatgagctgtctgtggatgaagctgccctgcatgctgctgtgattgccatcaatgaggccatcgaccggcgcatcccagctgacacctttgctgccctgaagaaccccaatgccatgctggtgaacctggaggagcccctggccagcacctaccaggacatcctgtaccaggccaagcaggacaagatgaccaatgccaagaacagaacagagaacagcgagcgggagagagatgtgtatgaggagctgctgacccaggccgagatccagggcaacatcaacaaggtgaacaccttcagcgccctggccaacatcgacctggccctggagcagggagatgccctggccctcttccgggccctgcagagccctgccctgggcctgcggggcctgcagcagcagaacagcgactggtacctgaagcagctgctgagtgacaagcagcagaagaggcagagcggccagacagaccccctgcagaaggaggagctgcagagcggcgtggatgctgccaacagcgctgcccagcagtaccagaggcggctggccgctgtggccctgatcaatgctgccatccagaagggcgtggccgagaagacagtgctggagctgatgaaccctgaggcccagctgccccaggtgtacccctttgctgctgacctgtaccagaaggagctggccaccctgcagaggcagagccctgagcacaacctgacccaccctgagctgtctgtggccgtggagatgctgagctctgtggccctgatcaacagagccctggagagcggagatgtgaacacagtgtggaagcagctgagcagctctgtgacaggcctgaccaacatcgaggaggagaactgccagcgctacctggatgagctgatgaagctgaaggcccaggcccacgcagaaaataatgagttcatcacctggaatgacatccaggcctgtgtggaccacgtgaacctggtggtgcaggaggagcacgagcgcatcctggccatcggcctcatcaatgaggccctggatgaaggagatgcccagaagaccctgcaggccctgcagatcccagctgccaagctggagggcgtgctggccgaggtggcccagcactaccaggacaccctcatccgggccaagcgggagaaggcccaggagatccaggatgagagcgctgtgctgtggctggatgagatccagggcggcatctggcagagcaacaaggacacccaggaggcccagaagtttgccctgggcatctttgccatcaatgaagctgtggagagcggagatgtgggcaagaccctgagcgccctgcggagcccagatgtgggcctgtatggagtcatcccagaatgtggggagacctaccacagcgacctggccgaggccaagaagaagaagctggccgtgggggacaacaacagcaagtgggtgaagcactgggtgaagggcggctactactactaccacaacctggagacccaggagggcggctgggatgagccccccaactttgtgcagaacagcatgcagctgagccgggaggagatccagagcagcatcagcggcgtgacagctgcctacaaccgggagcagctgtggctggccaatgaaggcctcatcacccggctgcaggcccgctgccggggctacctggtgcggcaggagttccgcagcaggatgaacttcctgaagaagcagatcccagccatcacctgcatccagagccagtggaggggctacaagcagaagaaggcctaccaggaccggctggcctacctgcggagccacaaggatgaggtggtgaagatccagagcctggccaggatgcaccaggccaggaagcgctacagagaccggctgcagtacttccgggaccacatcaatgacatcatcaagatccaggccttcatccgggccaacaaggccagagatgactacaagaccctcatcaatgctgaggacccccccatggtggtggtgaggaagtttgtgcacctgctggaccagagcgaccaggacttccaggaggagctggacctgatgaagatgagggaggaggtgatcaccctcatccgcagcaaccagcagctggagaatgacctgaacctgatggacatcaagattggcctgctggtgaagaacaagatcaccctgcaggatgtggtgagccacagcaagaagctgaccaagaagaacaaggagcagctgagtgacatgatgatgatcaacaagcagaagggcggcctgaaggccctgagcaaggagaagcgggagaagctggaggcctaccagcacctgttctacctgctgcagaccaaccccacctacctggccaagctgatcttccagatgccccagaacaagagcaccaagttcatggacagcgtcatcttcaccctgtacaactatgccagcaaccagcgggaggagtacctgctgctgcggctcttcaagacagccctgcaggaggagatcaagagcaaggtggaccagatccaggagatcgtgacaggcaaccccaccgtcatcaagatggtggtgtccttcaacagaggagcccggggccagaatgccctgcggcagatcctggcccctgtggtgaaggagatcatggatgacaagagcctgaacatcaagacagatcctgtggacatctacaagtcctgggtgaaccagatggagagccagacaggagaggccagcaagctgccctatgatgtgaccccagagcaggccctggcccacgaggaggtgaagacccggctggacagcagcatccggaacatgagagctgtgacagacaagttcctgagcgccatcgtgtcctctgtggacaagatcccctacggcatgaggttcatcgccaaggtgctgaaggacagcctgcacgagaagttcccagatgctggggaggatgagctgctgaagatcatcggcaacctgctgtactaccgctacatgaacccagccatcgtggccccagatgcctttgacatcatcgacctgtctgctgggggccagctgaccacagaccagaggaggaacctgggcagcatcgccaagatgctgcagcacgccgccagcaacaagatgttcctgggggacaatgcccacctgagcatcatcaatgagtacctgagccagagctaccagaagttccgccgcttcttccagacagcctgtgatgtgcctgagctgcaggacaagttcaacgtggatgagtacagcgacctggtgaccctgaccaagcctgtgatctacatcagcattggagagatcatcaacacccacaccctgctgctggaccaccaggatgccatcgcccctgagcacaatgaccccatccacgagctgctggatgacctgggggaggtgcccaccatcgagagcctgattggagagagcagcggcaacctgaatgaccccaacaaggaggccctggccaagacagaggtgtccctgaccctgaccaacaagtttgatgtgcctggagatgaaaatgctgagatggatgcccggaccatcctgctgaacaccaagaggctcatcgtggatgtgatccgcttccagcccggggagaccctgacagagatcctggagaccccagccaccagcgagcaggaggccgagcaccagagggccatgcagaggcgggccatcagagatgccaagaccccagacaagatgaagaagagcaagtctgtgaaggaggacagcaacctgaccctgcaggagaagaaggagaagatccagacaggcctgaagaagctgacagagctgggcaccgtggaccccaagaacaagtaccaggagctgatcaatgacatcgcccgggacatccggaaccagaggcgctaccggcagaggaggaaggccgagctggtgaagctgcagcagacctatgctgccctgaacagcaaggccaccttctacggggagcaggtggactactacaagagctacatcaagacctgcctggacaacctggccagcaagggcaaggtgtccaagaagccccgggagatgaagggcaagaagagcaagaagatcagcctgaagtacacagctgcccggctgcacgagaagggcgtgctgctggagattgaggacctgcaggtgaaccagttcaagaatgtcatctttgagatcagccccacagaggaggtgggggactttgaggtgaaggccaagttcatgggcgtgcagatggagaccttcatgctgcactaccaggacctgctgcagctgcagtatgaaggagtggccgtgatgaagctgtttgaccgggccaaggtgaatgtgaacctgctgatcttcctgctgaacaagaagttctacggcaagtag

SEQ ID NO: 141586 - DNA, 4974 bp, Artificial Sequence
  derived and/or modified sequence
atgagcgccgccgacgaggtggacggcctgggcgtggcccggccccactacgggtcagtccttgataatgaacgcttaaccgctgaagagatggacgagcgaagacgacaaaatgtagcctatgaatatttatgccacctcgaagaagccaagcgctggatggaagcctgtttgggagaggatctccctcctactacggagcttgaagagggcctaagaaacggggtgtatctggcaaagctgggcaatttcttcagccccaaagtagtgtctctcaagaagatttacgatagagagcagacaagatataaagctacaggtttacatttcaggcacaccgacaacgtcatacagtggctgaacgccatggacgaaatcgggttgcccaagatcttttatcccgagaccactgacatctacgacagaaagaacatgcctaggtgcatttattgcatacacgcactgagtctctacctgttcaaactgggacttgcgccccagattcaggatctctacggaaaagtcgatttcacagaagaggagatcaacaacatgaagactgagctggaaaagtatggcatccaaatgcctgccttcagtaagatcggcgggatactcgcgaacgagctgtcagtcgatgaagccgccctgcatgcagcagtgattgccattaatgaggctatagacaggcgcataccagccgatacatttgccgccctaaaaaatcccaatgccatgctggttaaccttgaagagcctctggcctccacttaccaggacatcctgtaccaggcaaaacaggataagatgactaatgccaaaaaccgcacagaaaatagcgagcgcgaaagagatgtatatgaagaacttctcacacaggcggagatccaaggaaatatcaacaaagtcaacacttttagcgcccttgccaacattgacttggctctcgaacagggtgacgccctggcactctttcgcgccctgcaatctccagctctgggactgcgaggcctgcaacagcaaaattctgactggtatctcaagcagctcctgtccgacaagcagcagaagcgccagtctggtcagacggatccactgcagaaggaggagctgcagtccggagtcgacgctgcgaatagcgcagcacagcagtaccaacgacggctggccgcagtggctctgatcaacgctgctattcagaaaggggtcgcagagaaaaccgtcctcgagctgatgaatcctgaagcacaactgccacaggtgtacccgttcgcggcggatctgtaccagaaggaacttgccactctgcagcgacagtcccctgagcataaccttactcatcccgagttgtccgtagctgtggagatgctatcctcagttgccttgattaatcgggctcttgaatcaggcgatgtgaatacagtgtggaagcagctatcaagtagcgtgaccggacttaccaacattgaagaggagaactgccagaggtacttggacgagctcatgaaactgaaggctcaagctcacgctgagaataatgaatttataacctggaatgatattcaggcctgcgttgaccacgtaaatttggttgtccaggaggagcacgagcggatcctagcgatcggtttgattaacgaagcgctcgatgagggtgacgctcagaagacactgcaagcgctgcagattcccgccgccaaactggaaggagtccttgccgaggtggcccagcattaccaggacacacttatccgggccaagcgagagaaagcccaggagattcaggacgaatcagccgtcctctggctggacgaaattcagggtggaatttggcaatccaacaaggacacccaggaggcacaaaagtttgcactgggtattttcgcaatcaacgaggcagtggagtcaggggatgttggcaagaccttgtctgcacttcgatcgcccgatgttggattgtacggcgttattccagagtgcggagagacctaccacagcgatctggctgaggctaagaaaaagaagctagctgttggggataacaattctaagtgggttaaacattgggttaagggcggttactactactaccataacttggaaacccaggaaggtggctgggatgaacctcccaactttgtgcaaaatagcatgcagctttcccgagaggagatacagagctccattagtggggtcaccgccgcatataacagggagcagctatggctggcgaacgaggggctaatcacacggcttcaagctcggtgcagagggtaccttgtgaggcaggaatttagaagcagaatgaacttcctgaagaaacagattcctgccataacatgcatccagtctcaatggcgaggatacaagcagaaaaaagcctaccaagaccggctggcctacttgcggtcccacaaggatgaagtcgtcaagattcagtccctcgccaggatgcaccaagccaggaaacgctatagagatcgcctgcaatactttcgcgatcatattaatgatataatcaagattcaggccttcattagggctaataaagcaagagatgattataaaacgctgataaatgccgaggatccgcccatggtggttgtcagaaagttcgtccaccttctggaccagtctgatcaggactttcaggaggaactggacctcatgaagatgcgcgaggaggtgatcaccctgatccgttctaatcagcagctggagaatgacctgaatctgatggacattaaaataggccttttggtgaaaaacaagatcaccctgcaggatgtggtgtcacattcaaagaaactgacgaagaagaacaaagaacagctgtctgacatgatgatgataaataagcagaaggggggcctgaaggccttaagtaaagagaaaagggagaagctggaggcgtaccaacatctgttttacctgctgcagacgaatcccacctatctggctaagctgatctttcaaatgccccagaataaatctaccaaattcatggattctgtgattttcacgctctataactacgcgtctaaccagagagaagagtacctgcttttgcgcttgttcaagactgccctgcaggaggaaatcaagtctaaggtggatcagatccaggaaatcgtcaccggcaaccctaccgtgataaaaatggtcgtctccttcaatcgcggcgcccgaggtcagaacgccctgcggcagatccttgccccagtcgtgaaggaaattatggatgacaagtctttgaatattaaaacagatcccgtcgacatttacaagtcttgggtgaatcagatggagagccagacaggggaggctagtaagcttccgtacgatgtgaccccagaacaggccctggcgcatgaggaggtgaagaccagactggatagctcaatacgtaatatgagggctgtcactgataaatttttgtccgccatagtatcaagtgtggataaaatcccctatggtatgaggttcatcgcaaaggtgcttaaggatagcctgcatgagaagttcccagatgcgggagaagacgagttgctgaagattataggaaatctgctgtattaccggtatatgaacccggccatcgtggctccagacgcttttgatatcatcgacctctccgctggagggcagcttactaccgaccagcgccggaacctgggttccatagccaaaatgctgcagcatgctgctagtaacaaaatgttcttgggtgataatgcccatctgagtatcatcaacgaatatctgtctcagagctaccagaagttcagaagattctttcagaccgcctgcgatgtgcctgagctgcaggataaattcaacgtggatgaatacagcgacctagtcactctcacaaagcccgtcatctatatctcaatcggggagattataaatactcatacacttctgctggatcaccaggacgctattgcacctgaacataatgacccaattcacgaactgctggatgacctgggcgaagtgcccaccattgagtctctcatcggggagagttctggtaatctgaatgatcctaacaaagaggccttggcaaaaactgaggtttccctaacactgactaataagttcgatgttcctggggacgagaacgctgaaatggacgctcgcaccatcttactgaatacgaagcgcctgatcgttgacgttatcaggttccagcccggtgaaacgcttactgagatactggaaaccccagcaacctctgagcaggaagcagagcaccaaagggctatgcaaaggagagccattcgtgacgctaaaactcccgacaagatgaaaaagagcaaatccgttaaagaagattccaatcttaccctgcaggagaagaaagagaagattcaaaccggactaaagaagctgactgaactcggtacggtggatcctaaaaataaataccaggagctgattaacgacattgctcgcgacattaggaatcagcgcaggtatagacaacgacgcaaagccgaactggtgaaactgcagcagacatatgccgccttgaattctaaggcaaccttttatggtgaacaggtagattactataagagttacattaaaacttgtctagacaacctggccagtaagggtaaagtctctaaaaagcctcgggaaatgaaaggtaagaaatccaaaaagatcagtctcaagtatactgcagcccgtctgcacgagaagggtgtcctgcttgagatcgaagacttgcaggtgaatcaattcaagaacgtaatctttgaaatttctcccacggaagaagtgggcgactttgaagtgaaggcaaagtttatgggggtgcaaatggagacctttatgctgcattatcaggatttgctgcagctacagtatgaaggtgtggccgtgatgaagctttttgaccgcgccaaggtgaacgttaacctgctgatttttctgctaaacaagaagttctatgggaagtag

SEQ ID NO: 141587 - DNA, 4973 bp, Artificial Sequence
  derived and/or modified sequence
atgtctgctgccgacgaagtggatggactaggtgtggcaagacctcactacggatctgtgctcgataacgagcggctgactgcagaagagatggacgaacgtcgtagacaaaatgtggcatacgaatatctgtgtcacctggaggaggccaagcggtggatggaagcctgcctaggggaagatttgccacccacgactgaactcgaggaaggcctgcgcaacggagtgtatttggcaaaactgggcaactttttttccccgaaagtcgtgtccttgaaaaaaatctacgatagagagcagactagatacaaagcgacgggactacacttcagacatactgataatgtgatccaatggttgaacgccatggacgaaatcggactgcccaagattttctaccctgagactaccgatatctacgaccggaagaacatgcccaggtgcatatattgtatccatgcactgagcctctatctgttcaagcttggcctggctccccagatccaggacctctatgggaaggtggacttcacagaagaggagataaataatatgaagaccgagcttgagaaatatggtatccagatgcctgctttttccaagattggaggtattcttgcaaatgagttgagcgtagacgaagccgctctccacgcagcggtgattgctattaacgaggctattgatcggagaatacctgccgatacattcgctgcccttaaaaacccgaatgcaatgttagttaacctcgaggagcccttggcgtctacataccaggacattctgtaccaggccaagcaggataagatgacaaacgcaaagaacaggaccgaaaatagtgagagagaacgcgatgtctatgaggagttgctgacacaggctgagattcagggcaacattaataaagtgaataccttctctgcgctcgccaatattgacctagcccttgagcagggcgacgcactcgcgctgtttcgggcactccagtcgcctgcacttggcctgagaggcctacagcagcaaaattccgattggtatctgaagcagctcctcagcgacaagcagcagaagcgccagtccggccagaccgaccccctgcaaaaggaagaactccaatccggtgtcgacgcggcaaattcagcggcacagcagtatcagagaagactcgcagccgtcgctctgatcaacgccgcaattcaaaaaggggtcgctgaaaaaactgtgttagaattgatgaaccccgaagctcagttaccacaggtttatcctttcgccgcagatctgtatcaaaaggaactggctaccttacagcgacaatcaccagaacacaatctcacgcaccctgaactttccgtggccgttgagatgctcagcagtgtggcgcttattaatcgggcattagaatcaggagatgtcaataccgtctggaagcaactatcctccagtgtgacggggctcacgaacattgaggaagagaactgccagcgttatctcgatgagctgatgaaactgaaggcccaggctcatgcagagaacaatgagttcatcacctggaacgacatccaagcctgcgtggatcacgtcaacctcgtggtgcaggaggagcacgagcgcattctggccatcggattgattaatgaagcgctggatgagggcgatgcccagaagactctacaagccctacaaatccccgcagcaaaactggagggggttctggcagaagtcgcccagcactaccaggatactttaattagggccaaacgggaaaaggcacaggaaatccaagacgagagcgcagtgctgtggctcgacgaaatccaagggggtatttggcagtctaataaagatacccaggaagcccagaaatttgccctgggaatcttcgccatcaacgaggccgtggaatccggcgacgttggaaagactttgtctgcccttagaagcccggacgttgggctgtacggcgtgataccagagtgtggcgaaacttatcatagtgatctggctgaggctaagaagaagaagctggccgttggggataataactccaagtgggttaaacactgggtcaaaggagggtattactactatcacaacctggaaacccaggaagggggatgggacgagccacccaattttgtacagaattcgatgcagttgagtagagaagagatccagtcctctatttccggggtgaccgcagcatataaccgggagcagttatggcttgcaaacgaaggacttattacaaggctgcaggccaggtgtcggggttacctcgtgagacaggaattcaggtctaggatgaactttctcaagaaacagatccccgctattacatgcattcaatcgcagtggcgcggatacaagcagaagaaggcttatcaggaccgcttggcttacctgaggtctcacaaggacgaggtggtaaaaattcagagcctcgctcgcatgcaccaggccagaaaaaggtaccgggaccgcctccaatatttccgagatcacattaacgatattatcaagatacaggccttcattagggccaacaaggctcgtgacgattacaaaactctgataaacgcagaggatccccctatggtcgttgtacgaaagttcgtgcacctgctggaccagagtgatcaggactttcaggaagagctggatcttatgaagatgcgggaggaagtgattaccctcattcgctccaatcagcaactcgaaaatgatcttaatctgatggacataaagatcggcctcttggtcaagaacaaaatcacactgcaggacgtggtttcccactccaaaaaactcaccaaaaaaaataaagaacagctgagtgatatgatgatgattaacaaacagaagggaggcctcaaggccctgtccaaagaaaaacgagaaaaactggaggcctatcaacacctgttctacctgcttcaaactaaccctacttacctcgcaaaactaatcttccagatgccacaaaacaaatcaacaaagttcatggatagcgtcatctttaccctctataactatgcctcgaaccagcgggaggagtacctgctccttcgactgtttaagacagccctgcaagaggaaattaaaagcaaggtcgaccagatccaagagatcgttaccgggaacccaacagtaatcaaaatggttgtgtcttttaatagaggggctagaggtcagaacgcattgaggcagattctagcccctgtggtgaaggagattatggatgacaagagcctgaacatcaagaccgatccagtggacatttataaatcttgggtgaaccagatggaatctcagactggcgaagcttccaagctcccttacgatgtcacaccggaacaagctctagcccatgaggaggtcaagacccggctggactcttcaatccggaatatgcgcgctgtcacggacaaattcctctccgcaatagtaagcagtgtcgacaagatcccttatggtatgcgttttattgcgaaggtcctgaaggactctctccacgaaaagtttccagacgccggtgaggatgagttactgaagattattggcaacttgctgtattaccggtacatgaatcctgcaattgtggcaccagacgctttcgatattattgatctgagcgcagggggacagttaaccaccgaccaacgccgaaatttgggcagcattgctaagatgcttcagcatgcagcctctaataaaatgttcctgggtgacaacgctcatctatctattattaatgagtacctgagccaatcttaccagaaatttcgtcgctttttccagaccgcctgtgacgtgcccgaattgcaggacaaatttaatgtggatgaatatagcgatctcgtgactctgaccaaacccgtgatttatatctctatcggcgaaatcattaatacccataccctgctgctggatcatcaggacgccattgccccagaacataacgatcccattcatgagctgctggacgatctgggtgaagttccaaccattgaatcccttatcggcgaatcctccgggaatctcaatgatcccaacaaggaagcactggctaaaacagaggtcagcttgacactgacgaataaattcgatgtgcccggagacgaaaacgcggagatggacgcccgtaccatactccttaatactaagcggctgattgtggacgtgataaggtttcaacctggagaaactctgaccgagatccttgagactcccgctacgagcgagcaggaggctgagcaccagagggctatgcagcgcagagcgatccgagatgcgaagacccctgataagatgaagaagtccaaatctgtaaaagaggactccaatctgaccctccaggaaaaaaaagagaagatccaaactggcctgaagaaacttactgaactggggaccgtggaccccaagaataaataccaggaactgattaacgatatcgcacgcgacatccgcaaccagaggaggtaccgtcagcggaggaaggctgaacttgtgaagctccagcagacatatgcagcgctaaattcaaaagcaacattttacggagaacaggtggattattataaaagctacattaaaacctgtctcgacaatctggccagcaagggaaaggtcagtaaaaagcccagggaaatgaaaggcaagaaatccaaaaagatttccttgaagtataccgccgcaaggcttcatgagaaaggggtcctgctagagattgaggatttgcaggttaatcagtttaagaacgtgattttcgagattagccccaccgaagaggtcggcgacttcgaagttaaagccaaattcatgggggtccagatggaaacgtttatgcttcattaccaggatctgctccagctgcagtatgaaggcgtcgctgtgatgaagctcttcgaccgggcaaaggttaacgtcaacctgctgatctttctgttgaacaaaaagttctatgggaaata

SEQ ID NO: 141588 - DNA, 4974 bp, Artificial Sequence
  derived and/or modified sequence
atgagcgccgccgacgaggtggacggcctgggcgtggccagaccccactacggcagcgtgctggacaacgagagactgaccgccgaggagatggacgagagaagaagacagaacgtggcctacgagtacctgtgccacctggaggaggccaagagatggatggaggcctgcctgggcgaggacctgccccccaccaccgagctggaggagggcctgagaaacggcgtgtacctggccaagctgggcaacttcttcagccccaaggtggtgagcctgaagaagatctacgacagagagcagaccagatacaaggccaccggcctgcacttcagacacaccgacaacgtgatccagtggctgaacgccatggacgagatcggcctgcccaagatcttctaccccgagaccaccgacatctacgacagaaagaacatgcccagatgcatctactgcatccacgccctgagcctgtacctgttcaagctgggcctggccccccagatccaggacctgtacggcaaggtggacttcaccgaggaggagatcaacaacatgaagaccgagctggagaagtacggcatccagatgcccgccttcagcaagatcggcggcatcctggccaacgagctgagcgtggacgaggccgccctgcacgccgccgtgatcgccatcaacgaggccatcgacagaagaatccccgccgacaccttcgccgccctgaagaaccccaacgccatgctggtgaacctggaggagcccctggccagcacctaccaggacatcctgtaccaggccaagcaggacaagatgaccaacgccaagaacagaaccgagaacagcgagagagagagagacgtgtacgaggagctgctgacccaggccgagatccagggcaacatcaacaaggtgaacaccttcagcgccctggccaacatcgacctggccctggagcagggcgacgccctggccctgttcagagccctgcagagccccgccctgggcctgagaggcctgcagcagcagaacagcgactggtacctgaagcagctgctgagcgacaagcagcagaagagacagagcggccagaccgaccccctgcagaaggaggagctgcagagcggcgtggacgccgccaacagcgccgcccagcagtaccagagaagactggccgccgtggccctgatcaacgccgccatccagaagggcgtggccgagaagaccgtgctggagctgatgaaccccgaggcccagctgccccaggtgtaccccttcgccgccgacctgtaccagaaggagctggccaccctgcagagacagagccccgagcacaacctgacccaccccgagctgagcgtggccgtggagatgctgagcagcgtggccctgatcaacagagccctggagagcggcgacgtgaacaccgtgtggaagcagctgagcagcagcgtgaccggcctgaccaacatcgaggaggagaactgccagagatacctggacgagctgatgaagctgaaggcccaggcccacgccgagaacaacgagttcatcacctggaacgacatccaggcctgcgtggaccacgtgaacctggtggtgcaggaggagcacgagagaatcctggccatcggcctgatcaacgaggccctggacgagggcgacgcccagaagaccctgcaggccctgcagatccccgccgccaagctggagggcgtgctggccgaggtggcccagcactaccaggacaccctgatcagagccaagagagagaaggcccaggagatccaggacgagagcgccgtgctgtggctggacgagatccagggcggcatctggcagagcaacaaggacacccaggaggcccagaagttcgccctgggcatcttcgccatcaacgaggccgtggagagcggcgacgtgggcaagaccctgagcgccctgagaagccccgacgtgggcctgtacggcgtgatccccgagtgcggcgagacctaccacagcgacctggccgaggccaagaagaagaagctggccgtgggcgacaacaacagcaagtgggtgaagcactgggtgaagggcggctactactactaccacaacctggagacccaggagggcggctgggacgagccccccaacttcgtgcagaacagcatgcagctgagcagagaggagatccagagcagcatcagcggcgtgaccgccgcctacaacagagagcagctgtggctggccaacgagggcctgatcaccagactgcaggccagatgcagaggctacctggtgagacaggagttcagaagcagaatgaacttcctgaagaagcagatccccgccatcacctgcatccagagccagtggagaggctacaagcagaagaaggcctaccaggacagactggcctacctgagaagccacaaggacgaggtggtgaagatccagagcctggccagaatgcaccaggccagaaagagatacagagacagactgcagtacttcagagaccacatcaacgacatcatcaagatccaggccttcatcagagccaacaaggccagagacgactacaagaccctgatcaacgccgaggacccccccatggtggtggtgagaaagttcgtgcacctgctggaccagagcgaccaggacttccaggaggagctggacctgatgaagatgagagaggaggtgatcaccctgatcagaagcaaccagcagctggagaacgacctgaacctgatggacatcaagatcggcctgctggtgaagaacaagatcaccctgcaggacgtggtgagccacagcaagaagctgaccaagaagaacaaggagcagctgagcgacatgatgatgatcaacaagcagaagggcggcctgaaggccctgagcaaggagaagagagagaagctggaggcctaccagcacctgttctacctgctgcagaccaaccccacctacctggccaagctgatcttccagatgccccagaacaagagcaccaagttcatggacagcgtgatcttcaccctgtacaactacgccagcaaccagagagaggagtacctgctgctgagactgttcaagaccgccctgcaggaggagatcaagagcaaggtggaccagatccaggagatcgtgaccggcaaccccaccgtgatcaagatggtggtgagcttcaacagaggcgccagaggccagaacgccctgagacagatcctggcccccgtggtgaaggagatcatggacgacaagagcctgaacatcaagaccgaccccgtggacatctacaagagctgggtgaaccagatggagagccagaccggcgaggccagcaagctgccctacgacgtgacccccgagcaggccctggcccacgaggaggtgaagaccagactggacagcagcatcagaaacatgagagccgtgaccgacaagttcctgagcgccatcgtgagcagcgtggacaagatcccctacggcatgagattcatcgccaaggtgctgaaggacagcctgcacgagaagttccccgacgccggcgaggacgagctgctgaagatcatcggcaacctgctgtactacagatacatgaaccccgccatcgtggcccccgacgccttcgacatcatcgacctgagcgccggcggccagctgaccaccgaccagagaagaaacctgggcagcatcgccaagatgctgcagcacgccgccagcaacaagatgttcctgggcgacaacgcccacctgagcatcatcaacgagtacctgagccagagctaccagaagttcagaagattcttccagaccgcctgcgacgtgcccgagctgcaggacaagttcaacgtggacgagtacagcgacctggtgaccctgaccaagcccgtgatctacatcagcatcggcgagatcatcaacacccacaccctgctgctggaccaccaggacgccatcgcccccgagcacaacgaccccatccacgagctgctggacgacctgggcgaggtgcccaccatcgagagcctgatcggcgagagcagcggcaacctgaacgaccccaacaaggaggccctggccaagaccgaggtgagcctgaccctgaccaacaagttcgacgtgcccggcgacgagaacgccgagatggacgccagaaccatcctgctgaacaccaagagactgatcgtggacgtgatcagattccagcccggcgagaccctgaccgagatcctggagacccccgccaccagcgagcaggaggccgagcaccagagagccatgcagagaagagccatcagagacgccaagacccccgacaagatgaagaagagcaagagcgtgaaggaggacagcaacctgaccctgcaggagaagaaggagaagatccagaccggcctgaagaagctgaccgagctgggcaccgtggaccccaagaacaagtaccaggagctgatcaacgacatcgccagagacatcagaaaccagagaagatacagacagagaagaaaggccgagctggtgaagctgcagcagacctacgccgccctgaacagcaaggccaccttctacggcgagcaggtggactactacaagagctacatcaagacctgcctggacaacctggccagcaagggcaaggtgagcaagaagcccagagagatgaagggcaagaagagcaagaagatcagcctgaagtacaccgccgccagactgcacgagaagggcgtgctgctggagatcgaggacctgcaggtgaaccagttcaagaacgtgatcttcgagatcagccccaccgaggaggtgggcgacttcgaggtgaaggccaagttcatgggcgtgcagatggagaccttcatgctgcactaccaggacctgctgcagctgcagtacgagggcgtggccgtgatgaagctgttcgacagagccaaggtgaacgtgaacctgctgatcttcctgctgaacaagaagttctacggcaagtag

SEQ ID NO: 141589 - protein, 926 aa, Artificial Sequence
  derived and/or modified sequence
MDMFPLTWVFLALYFSRHQVRGQPDPPCGGRLNSKDAGYITSPGYPQDYPSHQNCEWIVYAPEPNQKIVLNFNPHFEIEKHDCKYDFIEIRDGDSESADLLGKHCGNIAPPTIISSGSMLYIRFTSDYARQGAGFSLRYEIFKTGSEDCSKNFTSPNGTIESPGFPEKYPHNLDCTFTILAKPKMEIILQFLIFDLEHDPLQVGEGDCKYDWLDIWDGIPHVGPLIGKYCGTKTPSELRSSTGILSLTFHTDMAVAKDGFSARYYLVHQEPLENFQCNVPLGMESGRIANEQISASSTYSDGRWTPQQSRLHGDDNGWTPNLDSNKEYLQVDLRFLTMLTAIATQGAISRETQNGYYVKSYKLEVSTNGEDWMVYRHGKNHKVFQANNDATEVVLNKLHAPLLTRFVRIRPQTWHSGIALRLELFGCRVTDAPCSNMLGMLSGLIADSQISASSTQEYLWSPSAARLVSSRSGWFPRIPQAQPGEEWLQVDLGTPKTVKGVIIQGARGGDSITAVEARAFVRKFKVSYSLNGKDWEYIQDPRTQQPKLFEGNMHYDTPDIRRFDPIPAQYVRVYPERWSPAGIGMRLEVLGCDWTDSKPTVETLGPTVKSEETTTPYPTEEEATECGENCSFEDDKDLQLPSGFNCNFDFLEEPCGWMYDHAKWLRTTWASSSSPNDRTFPDDRNFLRLQSDSQREGQYARLISPPVHLPRSPVCMEFQYQATGGRGVALQVVREASQESKLLWVIREDQGGEWKHGRIILPSYDMEYQIVFEGVIGKGRSGEIAIDDIRISTDVPLENCMEPISAFAVDIPEIHEREGYEDEIDDEYEVDWSNSSSATSGSGAPSTDKEKSWLYTLDPILITIIAMSSLGVLLGATCAGLLLYCTCSYSGLSSRSCTTLENYNFELYDGLKHKVKMNHQKCCSEA

SEQ ID NO: 141590 - protein, 926 aa, Artificial Sequence
  derived and/or modified sequence
MDMFPLTWVFLALYFSRHQVRGQPDPPCGGRLNSKDAGYITSPGYPQDYPSHQNCEWIVYAPEPNQKIVLNFNPHFEIEKHDCKYDFIEIRDGDSESADLLGKHCGNIAPPTIISSGSMLYIRFTSDYARQGAGFSLRYEIFKTGSEDCSKNFTSPNGTIESPGFPEKYPHNLDCTFTILAKPKMEIILQFLIFDLEHDPLQVGEGDCKYDWLDIWDGIPHVGPLIGKYCGTKTPSELRSSTGILSLTFHTDMAVAKDGFSARYYLVHQEPLENFQCNVPLGMESGRIANEQISASSTYSDGRWTPQQSRLHGDDNGWTPNLDSNKEYLQVDLRFLTMLTAIATQGAISRETQNGYYVKSYKLEVSTNGEDWMVYRHGKNHKVFQANNDATEVVLNKLHAPLLTRFVRIRPQTWHSGIALRLELFGCRVTDAPCSNMLGMLSGLIADSQISASSTQEYLWSPSAARLVSSRSGWFPRIPQAQPGEEWLQVDLGTPKTVKGVIIQGARGGDSITAVEARAFVRKFKVSYSLNGKDWEYIQDPRTQQPKLFEGNMHYDTPDIRRFDPIPAQYVRVYPERWSPAGIGMRLEVLGCDWTDSKPTVETLGPTVKSEETTTPYPTEEEATECGENCSFEDDKDLQLPSGFNCNFDFLEEPCGWMYDHAKWLRTTWASSSSPNDRTFPDDRNFLRLQSDSQREGQYARLISPPVHLPRSPVCMEFQYQATGGRGVALQVVREASQESKLLWVIREDQGGEWKHGRIILPSYDMEYQIVFEGVIGKGRSGEIAIDDIRISTDVPLENCMATVSASIVDIPEIHEREGYEDEIDDEYEVDWSNSSSATSGSGAPSTDKEKSWLYTLDPILITIIAMSSLGVLLGATCAGLLLYCTCSYSGLSSRSCTTLENYNFELYDGLKHKVKMNHQKCCSEA

SEQ ID NO: 141591 - DNA, 2781 bp, Artificial Sequence
  derived and/or modified sequence
atggacatgttccccctgacctgggtgttcctggccctgtacttcagcagacaccaggtgagaggccagcccgaccccccctgcggcggcagactgaacagcaaggacgccggctacatcaccagccccggctacccccaggactaccccagccaccagaactgcgagtggatcgtgtacgcccccgagcccaaccagaagatcgtgctgaacttcaacccccacttcgagatcgagaagcacgactgcaagtacgacttcatcgagatcagagacggcgacagcgagagcgccgacctgctgggcaagcactgcggcaacatcgccccccccaccatcatcagcagcggcagcatgctgtacatcagattcaccagcgactacgccagacagggcgccggcttcagcctgagatacgagatcttcaagaccggcagcgaggactgcagcaagaacttcaccagccccaacggcaccatcgagagccccggcttccccgagaagtacccccacaacctggactgcaccttcaccatcctggccaagcccaagatggagatcatcctgcagttcctgatcttcgacctggagcacgaccccctgcaggtgggcgagggcgactgcaagtacgactggctggacatctgggacggcatcccccacgtgggccccctgatcggcaagtactgcggcaccaagacccccagcgagctgagaagcagcaccggcatcctgagcctgaccttccacaccgacatggccgtggccaaggacggcttcagcgccagatactacctggtgcaccaggagcccctggagaacttccagtgcaacgtgcccctgggcatggagagcggcagaatcgccaacgagcagatcagcgccagcagcacctacagcgacggcagatggaccccccagcagagcagactgcacggcgacgacaacggctggacccccaacctggacagcaacaaggagtacctgcaggtggacctgagattcctgaccatgctgaccgccatcgccacccagggcgccatcagcagagagacccagaacggctactacgtgaagagctacaagctggaggtgagcaccaacggcgaggactggatggtgtacagacacggcaagaaccacaaggtgttccaggccaacaacgacgccaccgaggtggtgctgaacaagctgcacgcccccctgctgaccagattcgtgagaatcagaccccagacctggcacagcggcatcgccctgagactggagctgttcggctgcagagtgaccgacgccccctgcagcaacatgctgggcatgctgagcggcctgatcgccgacagccagatcagcgccagcagcacccaggagtacctgtggagccccagcgccgccagactggtgagcagcagaagcggctggttccccagaatcccccaggcccagcccggcgaggagtggctgcaggtggacctgggcacccccaagaccgtgaagggcgtgatcatccagggcgccagaggcggcgacagcatcaccgccgtggaggccagagccttcgtgagaaagttcaaggtgagctacagcctgaacggcaaggactgggagtacatccaggaccccagaacccagcagcccaagctgttcgagggcaacatgcactacgacacccccgacatcagaagattcgaccccatccccgcccagtacgtgagagtgtaccccgagagatggagccccgccggcatcggcatgagactggaggtgctgggctgcgactggaccgacagcaagcccaccgtggagaccctgggccccaccgtgaagagcgaggagaccaccaccccctaccccaccgaggaggaggccaccgagtgcggcgagaactgcagcttcgaggacgacaaggacctgcagctgcccagcggcttcaactgcaacttcgacttcctggaggagccctgcggctggatgtacgaccacgccaagtggctgagaaccacctgggccagcagcagcagccccaacgacagaaccttccccgacgacagaaacttcctgagactgcagagcgacagccagagagagggccagtacgccagactgatcagcccccccgtgcacctgcccagaagccccgtgtgcatggagttccagtaccaggccaccggcggcagaggcgtggccctgcaggtggtgagagaggccagccaggagagcaagctgctgtgggtgatcagagaggaccagggcggcgagtggaagcacggcagaatcatcctgcccagctacgacatggagtaccagatcgtgttcgagggcgtgatcggcaagggcagaagcggcgagatcgccatcgacgacatcagaatcagcaccgacgtgcccctggagaactgcatggagcccatcagcgccttcgccgtggacatccccgagatccacgagagagagggctacgaggacgagatcgacgacgagtacgaggtggactggagcaacagcagcagcgccaccagcggcagcggcgcccccagcaccgacaaggagaagagctggctgtacaccctggaccccatcctgatcaccatcatcgccatgagcagcctgggcgtgctgctgggcgccacctgcgccggcctgctgctgtactgcacctgcagctacagcggcctgagcagcagaagctgcaccaccctggagaactacaacttcgagctgtacgacggcctgaagcacaaggtgaagatgaaccaccagaagtgctgcagcgaggcctag

SEQ ID NO: 141592 - DNA, 2781 bp, Artificial Sequence
  derived and/or modified sequence
atggacatgttccccctgacctgggtgttcctggccctgtacttcagcagacaccaggtgagaggccagcccgaccccccctgcggcggcagactgaacagcaaggacgccggctacatcaccagccccggctacccccaggactaccccagccaccagaactgcgagtggatcgtgtacgcccccgagcccaaccagaagatcgtgctgaacttcaacccccacttcgagatcgagaagcacgactgcaagtacgacttcatcgagatcagagacggcgacagcgagagcgccgacctgctgggcaagcactgcggcaacatcgccccccccaccatcatcagcagcggcagcatgctgtacatcagattcaccagcgactacgccagacagggcgccggcttcagcctgagatacgagatcttcaagaccggcagcgaggactgcagcaagaacttcaccagccccaacggcaccatcgagagccccggcttccccgagaagtacccccacaacctggactgcaccttcaccatcctggccaagcccaagatggagatcatcctgcagttcctgatcttcgacctggagcacgaccccctgcaggtgggcgagggcgactgcaagtacgactggctggacatctgggacggcatcccccacgtgggccccctgatcggcaagtactgcggcaccaagacccccagcgagctgagaagcagcaccggcatcctgagcctgaccttccacaccgacatggccgtggccaaggacggcttcagcgccagatactacctggtgcaccaggagcccctggagaacttccagtgcaacgtgcccctgggcatggagagcggcagaatcgccaacgagcagatcagcgccagcagcacctacagcgacggcagatggaccccccagcagagcagactgcacggcgacgacaacggctggacccccaacctggacagcaacaaggagtacctgcaggtggacctgagattcctgaccatgctgaccgccatcgccacccagggcgccatcagcagagagacccagaacggctactacgtgaagagctacaagctggaggtgagcaccaacggcgaggactggatggtgtacagacacggcaagaaccacaaggtgttccaggccaacaacgacgccaccgaggtggtgctgaacaagctgcacgcccccctgctgaccagattcgtgagaatcagaccccagacctggcacagcggcatcgccctgagactggagctgttcggctgcagagtgaccgacgccccctgcagcaacatgctgggcatgctgagcggcctgatcgccgacagccagatcagcgccagcagcacccaggagtacctgtggagccccagcgccgccagactggtgagcagcagaagcggctggttccccagaatcccccaggcccagcccggcgaggagtggctgcaggtggacctgggcacccccaagaccgtgaagggcgtgatcatccagggcgccagaggcggcgacagcatcaccgccgtggaggccagagccttcgtgagaaagttcaaggtgagctacagcctgaacggcaaggactgggagtacatccaggaccccagaacccagcagcccaagctgttcgagggcaacatgcactacgacacccccgacatcagaagattcgaccccatccccgcccagtacgtgagagtgtaccccgagagatggagccccgccggcatcggcatgagactggaggtgctgggctgcgactggaccgacagcaagcccaccgtggagaccctgggccccaccgtgaagagcgaggagaccaccaccccctaccccaccgaggaggaggccaccgagtgcggcgagaactgcagcttcgaggacgacaaggacctgcagctgcccagcggcttcaactgcaacttcgacttcctggaggagccctgcggctggatgtacgaccacgccaagtggctgagaaccacctgggccagcagcagcagccccaacgacagaaccttccccgacgacagaaacttcctgagactgcagagcgacagccagagagagggccagtacgccagactgatcagcccccccgtgcacctgcccagaagccccgtgtgcatggagttccagtaccaggccaccggcggcagaggcgtggccctgcaggtggtgagagaggccagccaggagagcaagctgctgtgggtgatcagagaggaccagggcggcgagtggaagcacggcagaatcatcctgcccagctacgacatggagtaccagatcgtgttcgagggcgtgatcggcaagggcagaagcggcgagatcgccatcgacgacatcagaatcagcaccgacgtgcccctggagaactgcatggccaccgtgagcgccagcatcgtggacatccccgagatccacgagagagagggctacgaggacgagatcgacgacgagtacgaggtggactggagcaacagcagcagcgccaccagcggcagcggcgcccccagcaccgacaaggagaagagctggctgtacaccctggaccccatcctgatcaccatcatcgccatgagcagcctgggcgtgctgctgggcgccacctgcgccggcctgctgctgtactgcacctgcagctacagcggcctgagcagcagaagctgcaccaccctggagaactacaacttcgagctgtacgacggcctgaagcacaaggtgaagatgaaccaccagaagtgctgcagcgaggcctag

SEQ ID NO: 141593 - DNA, 2781 bp, Artificial Sequence
  derived and/or modified sequence
atggatatgtttcctctgacgtgggttttcctggccctatacttcagccggcaccaggtaagagggcaaccagaccccccttgcggtggaaggttgaactcaaaagatgccggatacattacctccccgggatatccgcaggattacccatctcaccaaaactgcgagtggatagtctacgccccggagccaaatcaaaagatcgttctcaatttcaaccctcatttcgaaatagagaaacacgattgcaagtatgactttattgagattagggacggggattcagaatcagccgatctgctgggaaagcactgcggaaatatcgcccccccaacaatcatctcaagtggttctatgctctacatccggtttacttccgactacgcccgccagggagccggcttctcccttagatatgaaatcttcaagacaggatctgaagactgcagtaaaaacttcacaagtcctaatggcaccattgaaagcccaggattcccagagaagtacccacacaacttggactgtactttcactatcctggctaagccaaagatggagatcatcctgcagttcctgatatttgatctcgaacacgatccactgcaagttggagagggagattgtaagtatgattggctggacatatgggacgggattccacacgtgggccccttgattgggaagtactgtggcaccaagacaccaagcgaattgaggagcagtaccggcattctaagcctgaccttccatactgatatggccgtggccaaggacgggttctccgccagatattacttagtgcaccaggagcctctcgagaatttccagtgtaacgtgcccctgggaatggaatcaggccggatcgccaacgagcaaatttccgcctctagtacttactcagacggccggtggaccccacagcagtcgcgcctccatggagacgacaatggatggacaccgaatttagactcaaacaaagaatacctgcaggtggacttgagattcctaactatgctgaccgccattgcaacccagggtgcgatcagtcgagagacacagaatgggtactacgtgaaatcctacaagcttgaggtttcaacgaacggggaggattggatggtctaccgccatggtaagaaccacaaggtttttcaagctaataatgatgccacggaagtggttctcaacaagttacacgctcccttgctcacaaggttcgttcgcatccgcccgcagacctggcattctggcatagcacttagacttgaactgttcggctgcagagttacagacgcaccatgctctaacatgctcggtatgctcagcggcctgattgctgacagccagatctccgctagcagtactcaggaatacctctggtcaccatcagcagcacggctggtcagctcccgctcagggtggttccctcgtatccctcaggcacaacctggggaggaatggctccaagtggatctcgggacgcctaagacagttaaaggcgtcattatccagggcgctcgcgggggagacagcatcaccgcagtagaggccagagctttcgtgaggaagttcaaggtgagttattctctgaacgggaaagactgggagtacatccaggacccgcgtactcaacaacccaagctctttgaaggcaatatgcattacgatactcctgacatcagacgttttgaccccatcccggcacaatatgttagagtttaccccgaacgatggtctccggccggtattggcatgcgcctcgaggttctcggatgtgattggactgattcaaaacccaccgttgagaccctgggccctactgtgaaatcagaagaaacgaccaccccctatcctacagaagaggaggccaccgaatgcggtgaaaattgcagctttgaggacgacaaggacctgcaactgccctccggttttaactgtaattttgacttcctggaggaaccatgtggatggatgtatgatcacgccaagtggctgagaacgacatgggctagttccagttcaccgaatgacagaacattcccagacgatcgtaacttcctgcggttgcagagtgattcccagcgtgaaggccagtacgccaggctgatatctccccctgttcatctgcccaggtcacctgtatgcatggaatttcagtaccaggcaacaggtggcaggggagttgccctgcaagtggtcagagaagccagccaagagagcaagctactttgggtgattagggaagatcagggaggggaatggaaacacggtcggattatcctgcccagctatgatatggagtatcaaattgtttttgagggggtgatcggcaaaggcaggagcggcgaaatcgcgatcgatgatatcagaattagtaccgacgtacccctggaaaattgtatggaaccaatctcagccttcgccgtggatatacccgagatccatgaacgagaaggctacgaagacgaaatcgatgacgagtatgaagtggactggagcaattcatccagcgccacatccgggagtggtgccccatcaacggacaaagagaaatcctggttgtacacactcgaccccattctgattaccatcatcgcgatgtctagcctaggagtactgcttggggcaacctgcgcggggctgttgctatactgcacttgcagctattcggggctgtcctcccggtcttgtacaacactggagaactacaattttgagctgtatgacgggttgaagcacaaggtgaagatgaaccaccaaaagtgctgttcagaagcctag

SEQ ID NO: 141594 - DNA, 2781 bp, Artificial Sequence
  derived and/or modified sequence
atggatatgttccccctgacatgggtgttcctcgctttgtactttagtcgtcatcaggtcagagggcaacccgaccctccttgtggcggcagacttaattctaaagacgccggatatattaccagccccggatatcctcaggactatccatcacatcaaaattgcgaatggatagtttacgcccctgaaccgaaccagaagattgtcctgaatttcaatccacatttcgaaattgagaaacatgactgtaaatatgatttcattgaaatccgcgacggcgactcagaatccgcagacctcctcggaaagcattgcggaaatatcgctcctcccaccattatttcaagcgggtccatgctttatatccggttcacctccgattacgctagacagggggctggattctcactgcgctatgagatcttcaagaccgggagtgaggattgttccaaaaactttactagccctaacggaaccatcgagagtcctggtttcccggaaaagtacccccacaacctggactgtacattcaccattctcgccaagccgaagatggagataatcttgcaatttctgatcttcgacctggagcacgatcctcttcaagtgggggagggcgactgtaagtatgactggctcgatatatgggacggcattccgcatgtaggtccactcatcgggaagtattgcggcaccaagaccccttctgagcttcgatcatccacagggattctttcactgaccttccacaccgacatggccgtggctaaagacggattctctgcccggtattatctggtacaccaggagcccctggagaactttcagtgcaacgtgccactgggtatggaatctggccggattgccaatgaacagatcagcgcaagtagtacctacagcgatggcaggtggactccgcaacagtctcgcctccacggggacgataatgggtggactccaaatttggactcgaacaaggaatatctgcaggtagatctgcgttttctgacaatgttgactgcaattgcaacccagggggcgattagccgggaaacccagaatggatattatgttaagtcatataagctggaagtcagcaccaacggagaggattggatggtctacaggcatggcaaaaatcataaagttttccaagcgaataatgacgccacagaggtcgtgttaaataaactccacgcccctttgcttacccgctttgttcgaatccgtccacaaacctggcatagtggaattgcactgcggttggagttgttcggatgccgggtgacggacgccccttgcagcaatatgctcggcatgttatccggtctcatagcagattcacagatcagtgccagcagcacacaggaatatctatggtccccatcagccgcccggttggtcagcagtcggagcggctggttcccacgaataccccaggcccagcccggtgaggagtggttgcaggtggacctgggaactcctaagaccgttaaaggggtgatcattcagggggcgcgcggcggcgactctataaccgccgtcgaggccagagcatttgtcagaaaattcaaagtgagttattccctgaatggcaaggactgggagtacattcaggatcctcgcacacagcagcctaagctgtttgagggcaacatgcattatgacacccccgacattcgcaggttcgaccccatccccgcccagtacgttagagtataccccgagcggtggagccctgctgggattgggatgcgccttgaggtgctgggttgcgattggacagacagcaaaccaactgtcgaaaccctcggccctaccgttaagtcggaagagacaaccactccataccctacggaggaagaggctacagagtgtggcgaaaactgcagttttgaggacgataaggacctacagttgccaagtggttttaattgcaactttgacttcctcgaagagccctgtggctggatgtatgatcacgcaaaatggctgagaacaacatgggcgtctagtagttctccaaacgaccgcacattccccgatgacaggaacttcctcaggcttcagagcgattcccagagggaaggccagtacgcccgccttatttcaccgcccgtgcatctccctcggtcccccgtctgcatggaatttcagtaccaggctactggtggtcgaggggttgccctgcaggtggtgcgcgaagcatctcaggagtccaaactgctgtgggtcatcagagaagaccaagggggagaatggaagcacggccgcatcattctaccatcttacgatatggagtatcaaatcgtgtttgaaggcgtgattggaaagggacgcagcggcgaaattgccatcgatgatattagaatttcaacggacgttcccctggagaactgcatggcaaccgtctctgccagtatcgtggatatccccgagatccacgagcgggaagggtacgaggacgagattgatgatgagtatgaggtagactggtctaacagcagcagtgcgacatccggaagcggagctccctccaccgataaagaaaaatcttggctgtatacactggatcctattctgatcaccattattgctatgagcagtctcggcgtactgctgggcgctacatgtgctgggcttttactgtactgtacatgtagttactctgggttgagttccagatcttgcaccacgctcgagaattacaatttcgagctatatgacggcctgaaacacaaggtcaagatgaatcatcagaagtgttgctcagaagcgtag

SEQ ID NO: 141595 - DNA, 2781 bp, Artificial Sequence
  derived and/or modified sequence
atggacatgttccccctgacctgggtgttcctggccctgtacttcagccgccaccaggtgcggggccagcctgaccccccctgtggcggccgcctgaacagcaaggatgctggctacatcaccagccctggctacccccaggactaccccagccaccagaactgtgagtggatcgtgtatgcccctgagcccaaccagaagatcgtgctgaacttcaacccccactttgaaattgagaagcatgactgcaagtatgacttcatcgagatcagagatggagacagcgagagcgctgacctgctgggcaagcactgcggcaacatcgccccacccaccatcatcagcagcggctccatgctgtacatccgcttcaccagtgactatgcccggcagggcgccggcttcagcctgcgctatgagatcttcaagacaggcagcgaggactgcagcaagaacttcaccagccccaacggcaccatcgagagccctggcttccctgagaagtacccccacaacctggactgcaccttcaccatcctggccaagcccaagatggagatcatcctgcagttcctgatctttgacctggagcatgaccccctgcaggtgggggagggggactgcaagtatgactggctggacatctgggatggcatcccccacgtgggccccctcatcggcaagtactgcggcaccaagacccccagcgagctgcggagcagcacaggcatcctgagcctgaccttccacacagacatggctgtggccaaggatggcttcagcgcccgctactacctggtgcaccaggagcccctggagaacttccagtgcaatgtgcccctgggcatggagagcggccgcatcgccaatgagcagatcagcgccagcagcacctacagtgatggccgctggaccccccagcagagccggctgcatggagatgacaatggctggacccccaacctggacagcaacaaggagtacctgcaggtggacctgcgcttcctgaccatgctgacagccatcgccacccagggcgccatcagccgggagacccagaatggctactacgtgaagagctacaagctggaggtgtccaccaacggggaggactggatggtgtacagacatggcaagaaccacaaggtgttccaggccaacaatgatgccacagaggtggtgctgaacaagctgcacgcccccctgctgaccaggtttgtgcgcatccggccccagacctggcacagcggcatcgccctgcggctggagctgtttggctgccgggtgacagatgccccctgcagcaacatgctgggcatgctgagcggcctgattgctgacagccagatcagcgccagcagcacccaggagtacctgtggagccccagcgctgcccggctggtgagcagccgcagcggctggttcccccgcatcccccaggcccagcctggagaggagtggctgcaggtggacctgggcacccccaagacagtgaagggcgtcatcatccagggcgcccggggcggggacagcatcacagctgtggaggcccgggcctttgtgaggaagttcaaggtgtcctacagcctgaatggcaaggactgggagtacatccaggaccccaggacccagcagcccaagctgtttgagggcaacatgcactatgacaccccagacatcagaagatttgaccccatcccagcccagtatgtgcgggtgtacccagagcgctggagccctgctggcatcggcatgaggctggaggtgctgggctgtgactggacagacagcaagcccaccgtggagaccctgggccccaccgtgaagtctgaggagaccaccaccccctaccccacagaggaggaggccacagaatgtggggagaactgcagctttgaagatgacaaggacctgcagctgcccagcggcttcaactgcaactttgacttcctggaggagccctgtggctggatgtatgaccacgccaagtggctgcggaccacctgggccagcagcagcagccccaatgacaggaccttcccagatgacaggaacttcctgcggctgcagagcgacagccagcgggagggccagtatgcccggctcatcagcccccctgtgcacctgcccaggagccctgtgtgcatggagttccagtaccaggccactggaggccggggcgtggccctgcaggtggtgcgggaggccagccaggagagcaagctgctgtgggtgatccgggaggaccagggcggggagtggaagcacggccgcatcatcctgcccagctatgacatggagtaccagatcgtgtttgagggcgtcatcggcaagggccgctctggagagatcgccattgatgacatccgcatcagcacagatgtgcccctggagaactgcatggagcccatcagcgcctttgctgtggacatccctgagatccacgagcgggagggctatgaagatgaaattgatgatgaatatgaggtggactggagcaacagcagcagcgccaccagcggcagcggggcccccagcacagacaaggagaagtcctggctgtacaccctggaccccatcctgatcaccatcatcgccatgagcagcctgggcgtgctgctgggcgccacctgtgccggcctgctgctgtactgcacctgcagctacagcggcctgagcagccgcagctgcaccaccctggagaactacaactttgagctgtatgatggcctgaagcacaaggtgaagatgaaccaccagaagtgctgcagcgaggcctag

SEQ ID NO: 141596 - DNA, 2781 bp, Artificial Sequence
  derived and/or modified sequence
atggacatgttccccctgacctgggtgttcctggccctgtacttcagccgccaccaggtgcggggccagcctgaccccccctgtggcggccgcctgaacagcaaggatgctggctacatcaccagccctggctacccccaggactaccccagccaccagaactgtgagtggatcgtgtatgcccctgagcccaaccagaagatcgtgctgaacttcaacccccactttgaaattgagaagcatgactgcaagtatgacttcatcgagatcagagatggagacagcgagagcgctgacctgctgggcaagcactgcggcaacatcgccccacccaccatcatcagcagcggctccatgctgtacatccgcttcaccagtgactatgcccggcagggcgccggcttcagcctgcgctatgagatcttcaagacaggcagcgaggactgcagcaagaacttcaccagccccaacggcaccatcgagagccctggcttccctgagaagtacccccacaacctggactgcaccttcaccatcctggccaagcccaagatggagatcatcctgcagttcctgatctttgacctggagcatgaccccctgcaggtgggggagggggactgcaagtatgactggctggacatctgggatggcatcccccacgtgggccccctcatcggcaagtactgcggcaccaagacccccagcgagctgcggagcagcacaggcatcctgagcctgaccttccacacagacatggctgtggccaaggatggcttcagcgcccgctactacctggtgcaccaggagcccctggagaacttccagtgcaatgtgcccctgggcatggagagcggccgcatcgccaatgagcagatcagcgccagcagcacctacagtgatggccgctggaccccccagcagagccggctgcatggagatgacaatggctggacccccaacctggacagcaacaaggagtacctgcaggtggacctgcgcttcctgaccatgctgacagccatcgccacccagggcgccatcagccgggagacccagaatggctactacgtgaagagctacaagctggaggtgtccaccaacggggaggactggatggtgtacagacatggcaagaaccacaaggtgttccaggccaacaatgatgccacagaggtggtgctgaacaagctgcacgcccccctgctgaccaggtttgtgcgcatccggccccagacctggcacagcggcatcgccctgcggctggagctgtttggctgccgggtgacagatgccccctgcagcaacatgctgggcatgctgagcggcctgattgctgacagccagatcagcgccagcagcacccaggagtacctgtggagccccagcgctgcccggctggtgagcagccgcagcggctggttcccccgcatcccccaggcccagcctggagaggagtggctgcaggtggacctgggcacccccaagacagtgaagggcgtcatcatccagggcgcccggggcggggacagcatcacagctgtggaggcccgggcctttgtgaggaagttcaaggtgtcctacagcctgaatggcaaggactgggagtacatccaggaccccaggacccagcagcccaagctgtttgagggcaacatgcactatgacaccccagacatcagaagatttgaccccatcccagcccagtatgtgcgggtgtacccagagcgctggagccctgctggcatcggcatgaggctggaggtgctgggctgtgactggacagacagcaagcccaccgtggagaccctgggccccaccgtgaagtctgaggagaccaccaccccctaccccacagaggaggaggccacagaatgtggggagaactgcagctttgaagatgacaaggacctgcagctgcccagcggcttcaactgcaactttgacttcctggaggagccctgtggctggatgtatgaccacgccaagtggctgcggaccacctgggccagcagcagcagccccaatgacaggaccttcccagatgacaggaacttcctgcggctgcagagcgacagccagcgggagggccagtatgcccggctcatcagcccccctgtgcacctgcccaggagccctgtgtgcatggagttccagtaccaggccactggaggccggggcgtggccctgcaggtggtgcgggaggccagccaggagagcaagctgctgtgggtgatccgggaggaccagggcggggagtggaagcacggccgcatcatcctgcccagctatgacatggagtaccagatcgtgtttgagggcgtcatcggcaagggccgctctggagagatcgccattgatgacatccgcatcagcacagatgtgcccctggagaactgcatggccaccgtgtctgccagcatcgtggacatccctgagatccacgagcgggagggctatgaagatgaaattgatgatgaatatgaggtggactggagcaacagcagcagcgccaccagcggcagcggggcccccagcacagacaaggagaagtcctggctgtacaccctggaccccatcctgatcaccatcatcgccatgagcagcctgggcgtgctgctgggcgccacctgtgccggcctgctgctgtactgcacctgcagctacagcggcctgagcagccgcagctgcaccaccctggagaactacaactttgagctgtatgatggcctgaagcacaaggtgaagatgaaccaccagaagtgctgcagcgaggcctag

SEQ ID NO: 141597 - DNA, 2781 bp, Artificial Sequence
  derived and/or modified sequence
atggacatgttccccctgacctgggtgttcctggccctgtacttcagtcggcaccaagtgagagggcaacccgacccaccctgcgggggtcgacttaactccaaggacgctggatatatcacttcccccgggtaccctcaggactatcccagtcatcaaaattgtgaatggattgtctatgcccccgaacctaaccaaaagatcgttctgaacttcaatccacacttcgagatagaaaaacatgactgcaagtacgactttatcgagattcgggacggggattccgagagtgccgacctgttggggaagcattgcggcaacattgctcctcccacaatcatcagcagtggatccatgctgtatatccgttttacctccgattacgccagacagggagccggcttctcactgcggtacgaaattttcaagactggtagtgaggactgctccaaaaatttcacaagtccaaacggtacgatcgaaagtcctggcttccctgaaaagtacccacataacctggactgcacattcaccattttagcaaaaccaaagatggaaatcatcttgcagtttctaattttcgacctggagcacgatcctctccaggtaggcgaaggcgattgcaagtatgactggttggacatttgggacgggatccctcacgttggccctctaattggcaaatattgtggtactaagacaccgagcgagttgcggagctcaactgggatcttaagcctcacattccatacagatatggctgtggccaaagacgggttcagcgctcgttactatctcgtccaccaagagccactcgagaattttcagtgcaacgtgcccttagggatggagagcggccgcatcgcaaatgagcagatctcagcatcaagtacgtattcagacggaagatggaccccacagcagtcacgtttacatggggacgataacggctggactcccaaccttgattcaaataaagagtatctgcaggtcgacctccgatttttgaccatgctcactgcgatcgcaacccagggagccatcagtcgcgagacacaaaacggctactacgtcaagagctacaagctcgaagttagtaccaacggggaggactggatggtgtatagacacggaaaaaatcacaaggtgttccaggctaacaacgatgctactgaggtcgttctcaataagctccacgctccattgctgaccaggtttgtgcggattcgcccccagacttggcactcaggtatagcactccgtttggagctgtttggctgtcgggtaaccgacgccccctgttctaacatgttagggatgctctctgggctgatcgcagactcccagatcagcgctagttccacccaggagtatctgtggagccccagcgctgcgcgccttgtgagttcacgctctggatggttcccaaggattcctcaagcacagcctggggaagagtggctgcaagtcgatttgggaacgcccaaaacagtgaaaggcgtgattatacagggcgctcggggtggcgactctataactgcagtcgaagccagagcctttgttcgcaagttcaaggttagctatagcttgaatggaaaggactgggagtatatccaggaccctcgcacacaacaacctaagctgtttgagggcaacatgcattacgataccccagatatccgccggttcgatcctatacccgcacaatatgtgagagtgtatccggagagatggagcccggcaggcatcgggatgcgcctggaggtgctcggatgtgattggaccgacagcaagccgaccgtggagacgctcggccccaccgtgaaatctgaagagactaccacaccttatcctacggaggaggaagctacagagtgcggggagaattgcagctttgaggacgacaaggacctgcagctgcctagcggctttaactgcaatttcgacttcttggaggaaccctgcggctggatgtatgatcatgcgaagtggctgagaaccacctgggcttctagttcttctccaaatgatcgtacctttcccgacgatcgaaactttttgaggttgcaaagtgattcacagagagagggacaatacgcacgtctgatttcccccccagtccacttgccgcgatcaccagtgtgtatggaattccagtaccaggccactggaggtcggggagtggctctccaggtcgtacgtgaggcgagccaagagtcaaaactgctgtgggttatccgcgaggaccaaggaggtgaatggaaacacggcaggatcattctccccagttatgacatggaataccagatcgtgtttgaaggggtgattgggaaaggcagatcaggtgaaattgcaatagatgacattcggatttctacagacgttccgttggaaaactgcatggagcctataagcgccttcgcagtggatataccagagatccatgaacgggaaggctacgaagatgagatcgatgacgaatacgaagttgactggtctaattcttcctcggcgactagtggatctggcgccccatccaccgataaggagaaatcatggctgtacactttggacccaatactcattaccatcatcgcgatgtcatccttgggcgtgctgctcggcgccacctgtgctggtctattactgtactgcacatgctcctacagtggactatcatcacggtcatgtactacactggagaattataactttgagctgtatgacggactcaagcacaaagtgaaaatgaaccatcagaagtgctgtagcgaggcgtag

SEQ ID NO: 141598 - DNA, 2781 bp, Artificial Sequence
  derived and/or modified sequence
atggacatgttccccctgacctgggtgttcctggccctgtacttctcgagacaccaagtgagaggccagccagatcctccatgcggtggacgactcaattcgaaggacgcgggatatataacatcgcccggctatccacaggactatccctcccatcagaattgcgaatggatagtttacgctcccgagcccaaccaaaaaatcgtgctgaatttcaatccgcattttgaaatcgaaaaacacgattgtaaatacgattttatcgaaatcagagacggcgactcagagagtgcggacttactcggtaaacactgtgggaacatcgcacctcctacaattatctcatcaggatcgatgctgtacatcaggttcacaagcgattatgctcggcaaggcgctggcttctccctccgctacgaaattttcaagaccggaagcgaggactgttcaaagaactttacctcccctaatggtacaatcgagagcccaggatttcccgaaaaatacccccacaatctggattgtacattcactatcttggcaaaacccaaaatggaaatcattctccagtttcttatattcgacctcgagcacgacccactacaggtgggcgaaggagattgcaaatacgactggcttgatatctgggacggtatccctcacgtgggaccccttattggaaagtactgtggaaccaagaccccctccgaactcagatcgagcacagggatactgtctcttaccttccataccgatatggccgtcgctaaggatggtttttccgccagatattatttagtccaccaggaaccgcttgaaaacttccagtgcaacgtgcccttgggaatggagtccggaagaattgccaacgagcagatttctgcgtcctctacttactccgacgggagatggacacctcagcaatcaaggctgcacggcgatgacaatggctggacacccaatttagactccaataaagagtacctgcaggttgatctgcggttccttacaatgttaacagccatcgccacccagggggcaataagccgggagactcaaaatggctactacgttaagtcttataaactcgaggtttccactaatggcgaagactggatggtgtatagacatggaaagaatcacaaagtatttcaagccaataatgacgcaactgaagtggtgctgaacaagctgcatgcaccactgctcacaagatttgtaaggattcgacctcagacgtggcatagcggcatcgccttacggctcgagctatttggctgtcgcgtgaccgatgccccctgttccaacatgctgggcatgttgtccggccttatagccgatagccagatctcagccagttctacacaggagtacctctggtccccatcagccgcccggctggtgtcttctagaagcggttggttcccgcgaataccacaggctcaaccaggagaggaatggctccaggtggatctcggaacacctaaaactgttaaaggcgtgattatacagggagcgaggggcggagacagcattaccgccgttgaagcgcgggcctttgtccgaaaattcaaggtttcatatagcctgaatggtaaggactgggagtacattcaggatccccggactcagcagcccaaactatttgagggcaacatgcattatgatacccctgacatccgacgatttgaccccatacccgctcaatatgtgcgcgtctatcccgaaaggtggtcccccgctggaatcggtatgcgactggaagtattgggctgcgattggacagactcaaagcccaccgttgagacgctggggccgacggtcaaaagcgaagaaactacaactccgtatcccactgaagaagaggccaccgaatgtggggagaattgctctttcgaggatgacaaagacctgcagttgcctagtggcttcaactgtaattttgacttcctagaagaaccttgtggctggatgtatgaccacgcaaagtggctgcgtacaacttgggccagtagctcatcacctaacgaccggacattccccgacgataggaatttcctgcggctccaaagtgactcccagcgggagggtcagtacgctcgcctcatctcccctccagtccatctgccaagatcaccagtgtgtatggagtttcaataccaggccaccggcggacggggggttgccttgcaggtcgtccgtgaagccagccaagaaagcaaactgctttgggtaattagggaggatcaagggggtgagtggaagcacggcagaattatactgccttcctacgacatggagtaccaaattgttttcgaaggcgtcattggaaaggggaggtccggggagatagctatcgatgatatcagaatttccaccgatgttccgttagaaaattgcatggccactgtaagcgcgtctatcgttgatattccggagatacacgagagggaggggtacgaggacgaaattgatgatgaatatgaggtcgactggtctaactcatctagtgccaccagcggctctggagccccatctacagacaaggaaaaatcatggctttacaccctggaccctattctgataacaattatcgccatgtcctcattgggagtgctgctcggggctacatgcgcaggccttctcctgtactgcacttgcagctactcgggcctaagttccaggagctgtactacactggaaaactataattttgagctctacgatgggttaaaacataaagttaaaatgaatcaccaaaagtgctgttcagaggcctag

SEQ ID NO: 141599 - DNA, 2926 bp, Artificial Sequence
  derived and/or modified sequence
cccagctctggaaagagccaccttctccaaaatggatatgtttcctctcacctgggttttcttagccctctacttttcaagacaccaagtgagaggccaaccagacccaccgtgcggaggtcgtttgaattccaaagatgctggctatatcacctctcccggttacccccaggactacccctcccaccagaactgcgagtggattgtttacgcccccgaacccaaccagaagattgtcctcaacttcaaccctcactttgaaatcgagaagcacgactgcaagtatgactttatcgagattcgggatggggacagtgaatccgcagacctcctgggcaaacactgtgggaacatcgccccgcccaccatcatctcctcgggctccatgctctacatcaggttcacctccgactacgcccggcagggggcaggcttctctctgcgctacgagatcttcaagacaggctctgaagattgctcaaaaaacttcacaagccccaacgggaccatcgaatctcctgggtttcctgagaagtatccacacaacttggactgcacctttaccatcctggccaaacccaagatggagatcatcctgcagttcctgatctttgacctggagcatgaccctttgcaggtgggagagggggactgcaagtacgattggctggacatctgggatggcattccacatgttggccccctgattggcaagtactgtgggaccaaaacaccctctgaacttcgttcatcgacggggatcctctccctgacctttcacacggacatggcggtggccaaggatggcttctctgcgcgttactacctggtccaccaagagccactagagaactttcagtgcaatgttcctctgggcatggagtctggccggattgctaatgaacagatcagtgcctcatctacctactctgatgggaggtggacccctcaacaaagccggctccatggtgatgacaatggctggacccccaacttggattccaacaaggagtatctccaggtggacctgcgctttttaaccatgctcacggccatcgcaacacagggagcgatttccagggaaacacagaatggctactatgtcaaatcctacaagctggaagtcagcactaatggagaggactggatggtgtaccggcatggcaaaaaccacaaggtatttcaagccaacaacgatgcaactgaggtggttctgaacaagctccacgctccactgctgacaaggtttgttagaatccgccctcagacctggcactcaggtatcgccctccggctggagctcttcggctgccgggtcacagatgctccctgctccaacatgctggggatgctctcaggcctcattgcagactcccagatctccgcctcttccacccaggaatacctctggagccccagtgcagcccgcctggttagcagccgctcgggctggttccctcgaatccctcaggcccagcccggtgaggagtggcttcaggtagatctgggaacacccaagacagtgaaaggtgtcatcatccagggagcccgcggaggagacagtatcactgctgtggaagccagagcatttgtgcgcaagttcaaagtctcctacagcctaaacggcaaggactgggaatacattcaggaccccaggacccagcagccaaagctgttcgaagggaacatgcactatgacacccctgacatccgaaggtttgaccccattccggcacagtatgtgcgggtatacccggagaggtggtcgccggcggggattgggatgcggctggaggtgctgggctgtgactggacagactccaagcccacggtagagacgctgggacccactgtgaagagcgaagagacaaccaccccctaccccaccgaagaggaggccacagagtgtggggagaactgcagctttgaggatgacaaagatttgcagctcccttcgggattcaattgcaacttcgatttcctcgaggagccctgtggttggatgtatgaccatgccaagtggctccggaccacctgggccagcagctccagcccaaacgaccggacgtttccagatgacaggaatttcttgcggctgcagagtgacagccagagagagggccagtatgcccggctcatcagcccccctgtccacctgccccgaagcccggtgtgcatggagttccagtaccaggccacgggcggccgcggggtggcgctgcaggtggtgcgggaagccagccaggagagcaagttgctgtgggtcatccgtgaggaccagggcggcgagtggaagcacgggcggatcatcctgcccagctacgacatggagtaccagattgtgttcgagggagtgatagggaaaggacgttccggagagattgccattgatgacattcggataagcactgatgtcccactggagaactgcatggaacccatctcggcttttgcagtggacatcccagaaatacatgagagagaaggatatgaagatgaaattgatgatgaatacgaggtggactggagcaattcttcttctgcaacctcagggtctggcgccccctcgaccgacaaagaaaagagctggctgtacaccctggatcccatcctcatcaccatcatcgccatgagctcactgggcgtcctcctgggggccacctgtgcaggcctcctgctctactgcacctgttcctactcgggcctgagctcccgaagctgcaccacactggagaactacaacttcgagctctacgatggccttaagcacaaggtcaagatgaaccaccaaaagtgctgctccgaggcatgacggattgcacctgaatcctatctgacgtttcattccagcaagaggggctggggaagattacatttttttttcctttggaaactgaatgccataatctcgatcaaaccgatccag

SEQ ID NO: 141600 - DNA, 6644 bp, Artificial Sequence
  derived and/or modified sequence
cagagatcgcgagcgaggcaccagcctgcagccggcccccagcacatcctcagccgcacagacactcggcgaggtggaggtgagggcgggcgccagcgaactcggagaggggctcgctcactcccaggcgatcccagccgccaccgccgccgcaccagcagcagcaacagcagcagcagcttccttcctcagactcccctcgagaggctggccaagcgggtgtagccgttgggggaggctcccgccgggggaacccggcgaggacaagagcagggcggccgccttccactcgggctgtccggcggcggctgcctccgcccgtgtgtccgtcaagggtgccgcgggatgtgtgtcagtttacgcctctgagatcacacagctgcctgggggccgtgtgatgcccaaggcaagtcttggttttaattattattattatcattattgttacgcttggctttcgggaaatactcgtgatatttgtaggataaaggaaatgacactttgaggaactggagagaacatatatgcgttttgtttttaagaggaaaaccgtgttctcttcccggcttgttccctctttgctgatttcaggagctactctcctcctggtgaggtggaaattccagcaagaatagaggtgaagacaagccaccaggactcaggagggaaacgctgaccattagaaacctctgcataagacgttgtaaggaggaaaataaaagagagaaaaacacaaagatttaaacaagaaacctacgaacccagctctggaaagagccaccttctccaaaatggatatgtttcctctcacctgggttttcttagccctctacttttcaagacaccaagtgagaggccaaccagacccaccgtgcggaggtcgtttgaattccaaagatgctggctatatcacctctcccggttacccccaggactacccctcccaccagaactgcgagtggattgtttacgcccccgaacccaaccagaagattgtcctcaacttcaaccctcactttgaaatcgagaagcacgactgcaagtatgactttatcgagattcgggatggggacagtgaatccgcagacctcctgggcaaacactgtgggaacatcgccccgcccaccatcatctcctcgggctccatgctctacatcaggttcacctccgactacgcccggcagggggcaggcttctctctgcgctacgagatcttcaagacaggctctgaagattgctcaaaaaacttcacaagccccaacgggaccatcgaatctcctgggtttcctgagaagtatccacacaacttggactgcacctttaccatcctggccaaacccaagatggagatcatcctgcagttcctgatctttgacctggagcatgaccctttgcaggtgggagagggggactgcaagtacgattggctggacatctgggatggcattccacatgttggccccctgattggcaagtactgtgggaccaaaacaccctctgaacttcgttcatcgacggggatcctctccctgacctttcacacggacatggcggtggccaaggatggcttctctgcgcgttactacctggtccaccaagagccactagagaactttcagtgcaatgttcctctgggcatggagtctggccggattgctaatgaacagatcagtgcctcatctacctactctgatgggaggtggacccctcaacaaagccggctccatggtgatgacaatggctggacccccaacttggattccaacaaggagtatctccaggtggacctgcgctttttaaccatgctcacggccatcgcaacacagggagcgatttccagggaaacacagaatggctactatgtcaaatcctacaagctggaagtcagcactaatggagaggactggatggtgtaccggcatggcaaaaaccacaaggtatttcaagccaacaacgatgcaactgaggtggttctgaacaagctccacgctccactgctgacaaggtttgttagaatccgccctcagacctggcactcaggtatcgccctccggctggagctcttcggctgccgggtcacagatgctccctgctccaacatgctggggatgctctcaggcctcattgcagactcccagatctccgcctcttccacccaggaatacctctggagccccagtgcagcccgcctggttagcagccgctcgggctggttccctcgaatccctcaggcccagcccggtgaggagtggcttcaggtagatctgggaacacccaagacagtgaaaggtgtcatcatccagggagcccgcggaggagacagtatcactgctgtggaagccagagcatttgtgcgcaagttcaaagtctcctacagcctaaacggcaaggactgggaatacattcaggaccccaggacccagcagccaaagctgttcgaagggaacatgcactatgacacccctgacatccgaaggtttgaccccattccggcacagtatgtgcgggtatacccggagaggtggtcgccggcggggattgggatgcggctggaggtgctgggctgtgactggacagactccaagcccacggtagagacgctgggacccactgtgaagagcgaagagacaaccaccccctaccccaccgaagaggaggccacagagtgtggggagaactgcagctttgaggatgacaaagatttgcagctcccttcgggattcaattgcaacttcgatttcctcgaggagccctgtggttggatgtatgaccatgccaagtggctccggaccacctgggccagcagctccagcccaaacgaccggacgtttccagatgacaggaatttcttgcggctgcagagtgacagccagagagagggccagtatgcccggctcatcagcccccctgtccacctgccccgaagcccggtgtgcatggagttccagtaccaggccacgggcggccgcggggtggcgctgcaggtggtgcgggaagccagccaggagagcaagttgctgtgggtcatccgtgaggaccagggcggcgagtggaagcacgggcggatcatcctgcccagctacgacatggagtaccagattgtgttcgagggagtgatagggaaaggacgttccggagagattgccattgatgacattcggataagcactgatgtcccactggagaactgcatggccacagtctctgcaagtatagtggacatcccagaaatacatgagagagaaggatatgaagatgaaattgatgatgaatacgaggtggactggagcaattcttcttctgcaacctcagggtctggcgccccctcgaccgacaaagaaaagagctggctgtacaccctggatcccatcctcatcaccatcatcgccatgagctcactgggcgtcctcctgggggccacctgtgcaggcctcctgctctactgcacctgttcctactcgggcctgagctcccgaagctgcaccacactggagaactacaacttcgagctctacgatggccttaagcacaaggtcaagatgaaccaccaaaagtgctgctccgaggcatgacggattgcacctgaatcctatctgacgtttcattccagcaagaggggctggggaagattacatttttttttcctttggaaactgaatgccataatctcgatcaaaccgatccagaataccgaaggtatggacaggacagaaaagcgagtcgcaggaggaagggagatgcagccgcacaggggatgattaccctcctaggaccgcggtggctaagtcattgcaggaacggggctgtgttctctgctgggacaaaacaggagctcatctctttggggtcacagttctattttgtttgtgagtttgtattattattattattattattattattatattttatttctttggtctgtgagcaactcaaagaggcagaagaggagaatgacttttccagaatagaagtggagcagtgatcattattctccgctttctctttctaatcaacacttgaaaagcaaagtgtcttttcagcctttccatctttacaaataaaactcaaaaaagccgtccagcttatcccatcctctgattgtcttctgacttaagggatttactgtggtgtaggttctgccagccaaccctacaagctgccatttccagtcctagcatttaagtaggatgttgttgcctttaacttttcttatccaggggaaaattgccattttagggtcagcatgaacagctctttcttgtatgcgatttaaaacaaactggaaaggaaacttcacacgtcaaaatccatagaagcgcctggacgaggcttaaagtgctttgtgagtgaataggagccattcgctaattctagacccacagtgtctggtggtggggcttcccttgtggggcttctggtggtggttttgccttttcttttccctcctccatgttcttctaaaacatatacatatatacatacacacatacacatattcttcaggtctctaagcccctggaagcagcattgtgtgatattctcagaggcaggggaaaatagagggaaaaatagagactattggtatgttctccccatcagcgagttattgtaactggtcaccactggacgggaaggagaacagaggagagggaaagagaagcccaacctctgtgatcatatgagggccaaggctgagcagtgtagacagagaccctttgaaatgcatttgtctctcaaatagactagtaaacaccgacttctcctttgggttacaaacaccatttcaacctttcgggagagtcagagctaggatgtacaagaactgattctaaccagaagtccgcaagtactgtggacaagaatgcttaaccatgctgcttcagccttgagagacctaggttcttacacatatgcacacacgcatacacacatgcacgcacacacacatacacacatgcacgcacgcacgcatgcacaccaatttatgtttttattaagtgccttgaaaaaatgaagaaaaatgtattttccctttatgtaaaaattagtgaatatcttatgaattaaggcattcctctttccctaaccccgatggctccattcccaagtaccccaactcactgctgatcctattaaaggaatgagtcctgctacccgagtggtagtcatagccctagatgactctcaactactcttcaaagggaggcatcaggaatagaatgaaactgtgtgaaggataagattgttcgcatcaagatccaaatcttgatttcatattaacgcctaaggattgcctgtgtgctggaaatatatttgaaactcaaccagtatgcccagcctattgcatatcattgtcagaccatttttgctgctgtggtcacccacgatttcatttgtcttatacccaggtgaaaggggaagggtgaatgggactggctggttcctttaaatgttaacttatggaaatgctagttcaaatggtaatgtcacagtgttttgtatgcagagagcaagagttcaaccaacagctgtttattcatgtgtgtgtgtctttgctgctttgagttctctgtatctactgtgtatgtgaatggtcatgtgggactcagtggtggtgttgtgactttgacctagggtccgagtgtcacagctgatcttggcactcggcactcattggcacagtggtagttagaggtgaaaagtagagctgtcaagcccaagggcttagctttagggctcctcctgagttcggcccacagtagaagcaagattttaactagccccttttcctcttcaccctcccatgatgcgcagtgttcagaaagctggtaagtcctagggatttccagaagtagcctgcagaagaaggtaagtttgaaagccactccaggggtcctgatgctgtcatgctcagtgagccattttacagttctccaaagtctagccctgtttcggacctgcacttcacctctaagttatgtacaactcaacctgcatccctctaaaagtcctatatccatattcaccattggctaatttgaggccctgagtgggccttgaatgctaaaaagaagcagggtacgcagggctacatgtagataccacaccaaggctggaggctggtctgtcataagacagaaagaaagacgctgggcccaattttgacttggccaggggacaccttggtgtgtttgttatctttatctgtgggtaggctagctgacccatctccttgagtcattccctttgggaaaccccactgccagtattgatctcctttttgccttgtactgaatgacacattacctccacactctcccggactaggtggtcaacagggccacagggttgctttctgtctttggtggggcaggggagttgacagggatgagggtccaaggaataagcatgaatgacaagaaaacaagggaaagagttaacctgtcacatagcaggttaactttttcagggtttgcagttagaggtattcgaccattcactggctgagccagatcacgggaacttgagagcttttactgtgattcttcaatgtaaaaaataaacaacaatgtcaaactgtgtttatatgatttgtataaagcctttttaagattactatttaaataaacattataccagag

SEQ ID NO: 141601 - DNA, 2781 bp, Artificial Sequence
  derived and/or modified sequence
atggacatgttcccgctaacctgggtgtttctcgcgttgtatttctctcgccaccaggtcagaggacaacccgaccccccttgtggcggaaggctgaactcaaaggacgctggatacatcaccagcccaggctaccctcaggactacccatcgcaccaaaactgtgaatggatcgtctatgccccagaacccaaccagaagattgttcttaactttaatcctcactttgaaatcgagaaacacgactgtaagtatgacttcattgagatccgcgatggcgattcagaaagcgcggatctcttgggtaagcactgcggcaatattgcaccccctacaatcatctccagcggcagtatgctgtatatccgtttcacatctgactacgccaggcagggcgctgggttctccttgagatatgagatatttaaaacaggcagcgaggactgttctaaaaatttcacctcacccaacgggaccattgaaagtccgggttttcccgagaaatacccgcacaacctcgattgtaccttcaccattctagccaagcctaaaatggaaataattctccaattcttgatttttgacctggaacatgatcctctgcaggtgggcgagggcgactgtaagtatgattggctggacatatgggatgggatacctcatgtaggaccgctaattgggaagtattgtggcacgaaaacaccctctgagctacgaagttctaccggaattctgagcctgacttttcatactgacatggcggtggctaaagatggattcagtgctagatactatctcgtccatcaggagcctttggagaattttcagtgcaatgtcccgctcggtatggagtcaggaagaatagccaacgaacagatctccgcatcatctacctattcagatggcaggtggactccacaacagagccgtttacacggagatgataacgggtggactcccaatctcgattctaataaggagtatttacaggtggacctgagatttctgaccatgctcactgccatcgccacgcagggcgctatctctcgggagactcagaatgggtattacgtgaaatcttataagctggaggtttccacgaacggggaagactggatggtctatcgccatgggaagaatcataaagtatttcaagccaacaatgacgcaacggaagtggtactgaacaaactgcacgcccctctactgacacgattcgttcggattcgtcctcagacctggcattcaggtatcgctcttcgactggagctcttcggatgccgcgtaacagatgcgccttgctccaatatgctcggcatgctgagcggcctcatagcagacagtcagatctccgccagctctactcaggaatacttgtggagccccagcgctgctaggctcgtgtccagtagaagtggctggtttccaagaattccccaggctcagccaggggaagagtggctgcaagttgatctgggcacccccaaaacggtgaagggagtgattatccagggggctcgcggaggcgactccataactgccgtagaggctcgcgcatttgtgagaaagttcaaggtgtcatattcactcaacggaaaagactgggagtacattcaggatccacgtacccagcaacccaagctcttcgagggcaacatgcactacgatacacccgacatacggcgattcgatccgattcctgcgcaatatgttcgcgtttatcccgagagatggtcacctgccggtattggcatgcggctggaagtgcttggatgcgattggacggattcaaagcctactgtcgagactctcggccctaccgttaaatcggaggaaacgacaacaccatatcccaccgaagaagaagccactgagtgtggtgaaaactgttcattcgaggatgataaagatcttcaattgccgtcagggtttaactgtaatttcgattttctagaggaaccttgtgggtggatgtacgaccacgccaaatggctccggacaacatgggcttccagcagtagccctaatgacaggactttccccgatgacagaaatttcctgaggctgcagagtgattcccaacgcgaggggcagtacgctcgccttatctcccctccggtgcacctcccacgcagcccagtgtgtatggaattccaatatcaagcaacagggggtcgcggtgtagccctgcaggtggtgcgcgaggcgtcacaagagtccaagctgctgtgggttattcgcgaagatcagggcggagagtggaagcatgggaggattatactgccgagttatgatatggaataccagatcgtgttcgagggagtgatcgggaaaggccgatccggagaaattgccatcgatgacataaggataagcaccgatgtcccactggagaactgcatggagcctatatcggcgttcgccgtggatatccccgagatacacgagcgggaaggatatgaagatgaaatcgatgatgagtacgaagtggattggtctaactcgagtagtgctaccagtggcagcggagcccctagcaccgacaaggaaaaatcctggctgtacacactggacccaatcctgattacaataatcgccatgagcagcttgggagtcctgttgggagccacatgcgccggattgctgctgtattgcacctgttcatactcaggtctgagcagtcgttcttgcacaacactggaaaactacaatttcgaattgtatgatggactaaagcacaaagtgaaaatgaatcaccagaagtgctgttccgaagcctag

SEQ ID NO: 141602 - DNA, 2781 bp, Artificial Sequence
  derived and/or modified sequence
atggatatgtttccactgacctgggtgtttctggcgctttacttttccagacatcaggttcgtgggcagcccgatcccccatgtgggggtaggctcaatagcaaagatgctggatacatcacatcccccggttacccacaggattatcccagccatcagaactgtgagtggattgtttatgccccagaaccaaaccagaagatcgtacttaatttcaatccccatttcgagattgagaagcatgactgtaagtacgactttattgagatccgggacggcgattcagagagcgctgatttactcgggaagcattgcgggaatatcgctcccccaacaatcattagttctggatcgatgctgtacataaggttcactagcgattacgctcgacaaggcgcaggattctctctgagatacgagattttcaaaacagggtctgaggactgtagtaaaaacttcacatcaccgaatggtacgattgaaagtcctgggtttccggaaaaatatccacataacctcgattgtaccttcaccatactggccaagccaaagatggagattatcctgcagttcttgatcttcgaccttgaacatgacccactccaggtgggagaaggcgactgcaagtacgattggttggatatctgggatggcatccctcacgtcgggccattgatcggtaaatactgcggaaccaagacaccaagcgaactgagatcctccacagggatattgtcactgaccttccacaccgacatggctgtggctaaggatggcttcagtgcgcgatactacctggtgcaccaggagcccttagagaacttccagtgcaatgtgcccctcgggatggagagcggtcgtatcgcgaacgagcagattagtgccagctcaacatattccgacgggaggtggacgccacagcaatcacgactccacggggacgacaacggctggactcccaatctggatagcaacaaggaatatttgcaggtcgacctccgatttcttacaatgctcaccgcgatcgcgacacagggcgctattagtcgggagactcagaacggctattatgtgaaaagctacaagctcgaagtctctactaatggggaggattggatggtttataggcacggtaaaaaccataaagtgttccaggccaacaatgacgccaccgaagttgtacttaacaaactgcatgcaccgttattgactaggtttgtgcgaatccgacctcagacttggcactccggcattgcactgagactggagctttttgggtgccgtgttacagatgctccatgttccaatatgctcggcatgctctcaggattaatagccgattcccaaatatccgcatcctcaacacaagaatacctgtggtccccaagcgcagcgaggctagttagcagccggtccggctggtttcccaggatacctcaggcccagcctggagaggagtggctccaggttgacttgggaactcctaaaaccgtgaagggtgtcatcatccagggggctcggggaggcgattcaataaccgcggttgaagccagagccttcgtgcgcaaatttaaggtctcatatagcctgaatggaaaggactgggaatacattcaagacccacgcacccagcagcccaaattgtttgaagggaatatgcattacgatacacctgatattagacggttcgatccaattccagcccagtacgttcgtgtgtaccctgagcgatggagtcctgctggaataggcatgagactggaagtgctgggctgtgactggacagatagtaagccaacggtggagactcttggtcccaccgtcaagtcggaggaaacaactacaccttatccgacagaagaggaggccaccgagtgtggggagaactgctcctttgaggacgataaggatctgcagctacctagcggatttaactgtaatttcgatttcttggaggagccatgtggctggatgtacgatcatgccaagtggctgagaaccacttgggctagctcctcatccccaaacgataggacgtttccagatgatcgaaatttcctgaggcttcagtctgattctcaaagggagggccagtacgccaggcttatttcccctcccgtgcatttgcccagatcccctgtatgtatggaattccaatatcaggcaaccggcggtcgaggggttgccctgcaggtggtgcgggaggccagccaggagagtaagctcctctgggtgatcagagaagatcagggcggagagtggaaacacggaaggataatcctgccttcctacgatatggagtaccagatagtgtttgaaggagtcatcggcaagggacgctccggagagatcgcaattgatgacattcgcatcagcacagatgtaccgttggaaaactgcatggctacagtttctgcaagtattgtggacatcccagaaatccacgagcgggagggatacgaagacgaaattgatgacgaatacgaggtggattggtcaaatagctcatccgccacatctggttctggagctcccagcaccgacaaagagaagagctggctgtatacattagaccccatcctcatcaccattatagccatgtcctccctaggggttcttcttggggcaacttgcgccggtctccttttgtactgtacttgcagctatagcggtctgagctcccgatcttgcactacactggagaattataactttgaattgtacgatggcctgaaacacaaagtcaaaatgaaccaccagaaatgttgcagcgaggcctag

SEQ ID NO: 141603 - protein, 923 aa, Artificial Sequence
  derived and/or modified sequence
MERGLPLLCAVLALVLAPAGAFRNDKCGDTIKIESPGYLTSPGYPHSYHPSEKCEWLIQAPDPYQRIMINFNPHFDLEDRDCKYDYVEVFDGENENGHFRGKFCGKIAPPPVVSSGPFLFIKFVSDYETHGAGFSIRYEIFKRGPECSQNYTTPSGVIKSPGFPEKYPNSLECTYIVFVPKMSEIILEFESFDLEPDSNPPGGMFCRYDRLEIWDGFPDVGPHIGRYCGQKTPGRIRSSSGILSMVFYTDSAIAKEGFSANYSVLQSSVSEDFKCMEALGMESGEIHSDQITASSQYSTNWSAERSRLNYPENGWTPGEDSYREWIQVDLGLLRFVTAVGTQGAISKETKKKYYVKTYKIDVSSNGEDWITIKEGNKPVLFQGNTNPTDVVVAVFPKPLITRFVRIKPATWETGISMRFEVYGCKITDYPCSGMLGMVSGLISDSQITSSNQGDRNWMPENIRLVTSRSGWALPPAPHSYINEWLQIDLGEEKIVRGIIIQGGKHRENKVFMRKFKIGYSNNGSDWKMIMDDSKRKAKSFEGNNNYDTPELRTFPALSTRFIRIYPERATHGGLGLRMELLGCEVEAPTAGPTTPNGNLVDECDDDQANCHSGTGDDFQLTGGTTVLATEKPTVIDSTIQSEFPTYGFNCEFGWGSHKTFCHWEHDNHVQLKWSVLTSKTGPIQDHTGDGNFIYSQADENQKGKVARLVSPVVYSQNSAHCMTFWYHMSGSHVGTLRVKLRYQKPEEYDQLVWMAIGHQGDHWKEGRVLLHKSLKLYQVIFEGEIGKGNLGGIAVDDISINNHISQEDCAKPADLDKKNPEIKIDETGSTPGYEGEGEGDKNISRKPGNVLKTLDPILITIIAMSALGVLLGAVCGVVLYCACWHNGMSERNLSALENYNFELVDGVKLKKDKLNTQSTYSEA

SEQ ID NO: 141604 - DNA, 2772 bp, Artificial Sequence
  derived and/or modified sequence
atggagagaggcctgcccctgctgtgcgccgtgctggccctggtgctggcccccgccggcgccttcagaaacgacaagtgcggcgacaccatcaagatcgagagccccggctacctgaccagccccggctacccccacagctaccaccccagcgagaagtgcgagtggctgatccaggcccccgacccctaccagagaatcatgatcaacttcaacccccacttcgacctggaggacagagactgcaagtacgactacgtggaggtgttcgacggcgagaacgagaacggccacttcagaggcaagttctgcggcaagatcgcccccccccccgtggtgagcagcggccccttcctgttcatcaagttcgtgagcgactacgagacccacggcgccggcttcagcatcagatacgagatcttcaagagaggccccgagtgcagccagaactacaccacccccagcggcgtgatcaagagccccggcttccccgagaagtaccccaacagcctggagtgcacctacatcgtgttcgtgcccaagatgagcgagatcatcctggagttcgagagcttcgacctggagcccgacagcaacccccccggcggcatgttctgcagatacgacagactggagatctgggacggcttccccgacgtgggcccccacatcggcagatactgcggccagaagacccccggcagaatcagaagcagcagcggcatcctgagcatggtgttctacaccgacagcgccatcgccaaggagggcttcagcgccaactacagcgtgctgcagagcagcgtgagcgaggacttcaagtgcatggaggccctgggcatggagagcggcgagatccacagcgaccagatcaccgccagcagccagtacagcaccaactggagcgccgagagaagcagactgaactaccccgagaacggctggacccccggcgaggacagctacagagagtggatccaggtggacctgggcctgctgagattcgtgaccgccgtgggcacccagggcgccatcagcaaggagaccaagaagaagtactacgtgaagacctacaagatcgacgtgagcagcaacggcgaggactggatcaccatcaaggagggcaacaagcccgtgctgttccagggcaacaccaaccccaccgacgtggtggtggccgtgttccccaagcccctgatcaccagattcgtgagaatcaagcccgccacctgggagaccggcatcagcatgagattcgaggtgtacggctgcaagatcaccgactacccctgcagcggcatgctgggcatggtgagcggcctgatcagcgacagccagatcaccagcagcaaccagggcgacagaaactggatgcccgagaacatcagactggtgaccagcagaagcggctgggccctgccccccgccccccacagctacatcaacgagtggctgcagatcgacctgggcgaggagaagatcgtgagaggcatcatcatccagggcggcaagcacagagagaacaaggtgttcatgagaaagttcaagatcggctacagcaacaacggcagcgactggaagatgatcatggacgacagcaagagaaaggccaagagcttcgagggcaacaacaactacgacacccccgagctgagaaccttccccgccctgagcaccagattcatcagaatctaccccgagagagccacccacggcggcctgggcctgagaatggagctgctgggctgcgaggtggaggcccccaccgccggccccaccacccccaacggcaacctggtggacgagtgcgacgacgaccaggccaactgccacagcggcaccggcgacgacttccagctgaccggcggcaccaccgtgctggccaccgagaagcccaccgtgatcgacagcaccatccagagcgagttccccacctacggcttcaactgcgagttcggctggggcagccacaagaccttctgccactgggagcacgacaaccacgtgcagctgaagtggagcgtgctgaccagcaagaccggccccatccaggaccacaccggcgacggcaacttcatctacagccaggccgacgagaaccagaagggcaaggtggccagactggtgagccccgtggtgtacagccagaacagcgcccactgcatgaccttctggtaccacatgagcggcagccacgtgggcaccctgagagtgaagctgagataccagaagcccgaggagtacgaccagctggtgtggatggccatcggccaccagggcgaccactggaaggagggcagagtgctgctgcacaagagcctgaagctgtaccaggtgatcttcgagggcgagatcggcaagggcaacctgggcggcatcgccgtggacgacatcagcatcaacaaccacatcagccaggaggactgcgccaagcccgccgacctggacaagaagaaccccgagatcaagatcgacgagaccggcagcacccccggctacgagggcgagggcgagggcgacaagaacatcagcagaaagcccggcaacgtgctgaagaccctggaccccatcctgatcaccatcatcgccatgagcgccctgggcgtgctgctgggcgccgtgtgcggcgtggtgctgtactgcgcctgctggcacaacggcatgagcgagagaaacctgagcgccctggagaactacaacttcgagctggtggacggcgtgaagctgaagaaggacaagctgaacacccagagcacctacagcgaggcctag

SEQ ID NO: 141605 - DNA, 2772 bp, Artificial Sequence
  derived and/or modified sequence
atggagcgaggcctgcctttattgtgcgccgtgctggccctggtcctggcacccgctggcgcctttcggaacgataaatgcggtgacactatcaaaatagaaagccccggataccttacatctcccggctacccacactcctaccatccgagtgagaagtgtgaatggctgattcaggccccggatccatatcagcggattatgatcaatttcaacccccactttgacttggaagacagagactgcaaatacgattatgttgaagtgttcgacggcgagaatgagaacggccatttcaggggcaagttctgtggaaaaattgccccacctcctgtggtgagtagcggccccttccttttcatcaaattcgtatccgattacgagacacacggggctggttttagtatacgctacgagattttcaagagaggacctgaatgtagtcagaattacactactccgtccggggtgattaagagtcccggatttcccgagaaataccctaactcgctcgagtgtacttacattgtcttcgtgccaaaaatgtccgaaatcatattagaattcgagagtttcgacctcgagcccgattcaaacccgcccggcggtatgttctgccgatatgaccgccttgagatctgggacgggtttcccgatgttggacctcatatcggccgatactgtgggcaaaagacgccaggccgaatcagatctagcagtggaatcctaagtatggtgttttacacagattctgcaatcgcgaaggaaggcttcagtgcgaactacagtgttctgcaaagttctgtgtcagaagatttcaaatgcatggaggcattaggcatggagtcaggcgaaattcactccgatcaaataactgcttcatctcaatactccacgaactggagcgccgagagaagccgccttaactaccctgagaacggctggacaccgggagaggattcttacagggagtggatccaggtggatttaggcctgctgcgctttgtcacagcggttggaactcagggggcaattagtaaagaaaccaagaaaaaatactatgtgaagacctacaagatagatgtgtccagcaatggagaggactggatcaccatcaaggaaggaaataaacccgtgctgtttcaggggaataccaaccctacggacgtcgtggtcgccgtattcccaaagcccttaataacaagattcgttcggatcaaaccagccacttgggagacaggaatcagtatgcgctttgaggtgtacgggtgcaaaatcacagactacccctgctccggtatgctaggcatggtaagcggacttatttccgattcacaaattacctcctctaatcagggagatcgtaattggatgcctgagaatattcggctggtgacgagccggagcggttgggccctgccccctgctcctcactcctatatcaacgagtggttacaaattgatctgggtgaggagaaaattgtccgcgggatcatcattcaaggcggcaaacaccgcgagaacaaagtcttcatgcggaagtttaagattggatatagcaataacggaagtgactggaagatgataatggatgactcaaaaaggaaggctaaatcatttgaggggaataacaactacgacacaccggagctgcgaacttttccagctctgagcacccgcttcattcggatatatcccgagagagctacacacggaggtctgggactgcgtatggagttattgggatgcgaggtggaggctcccaccgctgggcccactacccccaatggtaacttagtggacgagtgcgatgacgaccaagccaattgccatagcggtaccggtgatgactttcagctcactggtggcacaaccgtgttggccaccgagaagccgacagttattgacagtactattcagagcgagttccctacatacgggttcaattgcgaattcggctgggggagccataaaaccttctgtcactgggagcacgataaccatgttcagctgaagtggagcgttttaacctcaaagaccggcccaattcaagatcataccggagatggtaatttcatttatagtcaagctgacgagaatcagaagggcaaggtcgcccgacttgtgtcacctgtagtatattcccagaattcagctcactgtatgaccttttggtaccacatgtccggcagtcacgttggcacacttagagtgaaactccgctaccaaaaaccagaggagtacgaccagttggtgtggatggcgatcggacaccagggagatcactggaaggaaggaagagtgctcctgcacaaatcgttgaagctgtaccaggttatctttgaaggggaaatcggcaagggcaatttgggcgggattgccgttgacgatattagtattaacaatcatatctcacaggaagactgtgctaagccagctgacttagataaaaaaaatcctgaaatcaaaatagacgaaacaggctctactcctggctacgagggtgaaggagaaggtgataagaatatctcaagaaagccgggcaatgtgctcaaaacacttgaccccattcttattactataattgcaatgagcgccttgggggtgctcttaggcgccgtgtgcggcgtcgtgctgtactgtgcctgttggcacaatggtatgtcagaacgcaatctgagtgcgctcgaaaattacaatttcgaactcgtggatggtgttaagttgaagaaggataaactgaatacgcagagtacttacagtgaagcttag

SEQ ID NO: 141606 - DNA, 2772 bp, Artificial Sequence
  derived and/or modified sequence
atggaaagaggactccccctactttgtgcagtgctggcccttgtgctcgctcccgctggcgcgtttagaaatgacaagtgcggcgataccatcaaaatcgaaagcccaggctacctaacaagccctggatatcctcatagctatcatccttctgaaaaatgtgagtggctgatacaggcaccagacccctaccagcggattatgattaattttaatccccatttcgaccttgaggaccgtgactgtaagtacgactatgttgaggtgttcgacggcgagaacgagaatgggcacttccggggaaagttctgtggtaaaatcgccccgccaccagtagtgagctcaggcccattcctctttatcaaatttgtctcagactacgagacacacggggcggggttcagtataaggtacgaaatattcaagagaggaccagagtgcagccagaattatactaccccgagtggagtaatcaagagcccgggcttcccggagaaatatcctaattccttagaatgcacatacattgtgttcgtgcccaaaatgtctgaaatcattctggaatttgaatctttcgacctggagccagacagcaacccaccagggggaatgttttgcagatacgatcgtctcgaaatatgggatggcttccctgacgtcggcccgcacatcggccgttactgcggccagaaaaccccggggagaattaggagctcatctgggattttgtctatggtattttacaccgatagtgctatcgccaaagaaggcttctccgccaactacagcgttctgcagtcctcggtttctgaagattttaagtgcatggaggcccttggaatggagagcggagaaatacacagcgaccagataacagcatctagccaatacagtacgaactggagcgctgagcgctccaggcttaactaccccgagaatgggtggactccaggagaagattcctacagagagtggatccaggtcgaccttgggctcctgaggttcgtgacagctgtaggcacccaaggcgcaatctccaaggagaccaagaagaagtactacgttaagacttacaagatcgatgtatccagtaatggcgaagattggattactatcaaggaaggtaacaagcctgtactatttcaggggaatacaaatcccaccgatgtcgtggtggctgtttttcccaagccgctcataacccggtttgtacgaatcaaacctgctacatgggaaacgggtatttcgatgcgcttcgaggtttatggttgcaaaatcacagactatccgtgtagcggaatgctcggcatggtgtccgggctgatctctgattcacagatcacgtctagcaaccagggcgacagaaactggatgccagagaacatcaggctggtgacctcgaggtcaggctgggctctccctccggcccctcacagctacatcaatgagtggctgcagatcgatttgggggaggagaagattgtgcggggtatcatcatacaaggtggaaagcaccgagagaataaggtttttatgaggaaattcaaaatcggctattccaacaacgggtctgactggaaaatgattatggacgacagtaagcggaaggcaaagtcatttgaggggaacaataattatgacacacctgagttgagaacctttcctgccctgtcaactagatttatcaggatctaccccgaaagggccactcacggaggtctgggtctccgcatggagctgttaggatgcgaggttgaagctccaaccgccggcccaacaacacctaacggcaatctggtggacgaatgcgatgacgaccaggccaattgtcactctggcacgggtgacgatttccagcttactggaggcacaaccgtgttagcaactgaaaagccaaccgtcatagattccacaatacagtccgaattccctacctatggcttcaattgcgagtttggttggggcagccacaagaccttttgtcactgggagcatgataatcatgtacagctcaagtggtcagtcctcaccagtaagacaggaccaatccaagatcacactggcgatggcaacttcatctactctcaagcagacgagaatcaaaagggaaaggtggccagattggtgtctccagtggtgtactcccaaaattccgcccattgcatgacgttctggtaccacatgagtggatcccatgtagggaccttgcgtgttaaactgaggtaccagaagcccgaggagtatgatcagctcgtgtggatggctattggtcatcaaggagaccattggaaagagggccgtgtgttactccacaaatccctgaagttgtatcaggttattttcgagggcgaaatcggaaagggcaatcttgggggcattgccgtggatgatatatcaatcaacaatcacatttctcaagaggactgcgctaagccggcggaccttgacaaaaagaaccccgagatcaagatcgatgagaccgggtccacccccgggtacgagggggagggcgaaggtgacaaaaatatctcacgcaagcccgggaacgtcctgaaaacacttgatccaatcctaataactatcatcgccatgtccgcactgggcgttctcctaggtgcagtgtgcggcgtcgtgctgtactgtgcctgttggcataatggcatgtcagaaagaaacctcagtgctctagagaactacaatttcgagttagtagacggagttaaattgaagaaggataagctcaacacccaaagcacctattctgaagcctag

SEQ ID NO: 141607 - DNA, 2772 bp, Artificial Sequence
  derived and/or modified sequence
atggagcggggcctgcccctgctgtgtgctgtgctggccctggtgctggccccagctggggccttcagaaatgacaagtgtggggacaccatcaagattgagagccctggctacctgaccagccctggctacccccacagctaccaccccagcgagaagtgtgagtggctgatccaggccccagacccctaccagaggatcatgatcaacttcaacccccactttgacctggaggaccgggactgcaagtatgactatgtggaggtgtttgatggagaaaatgaaaatggccacttccggggcaagttctgtgggaagatcgcccctcctcctgtggtgagcagcggccccttcctgttcatcaagtttgtgtctgactatgagacccacggggccggcttcagcatccgctatgagatcttcaagaggggccctgagtgcagccagaactacaccaccccatctggagtcatcaagagccctggcttccctgagaagtaccccaacagcctggagtgcacctacatcgtgtttgtgcccaagatgtctgagatcatcctggagtttgagagctttgacctggagccagacagcaaccccccaggcggcatgttctgccgctatgaccggctggagatctgggatggcttcccagatgtgggcccccacatcggccgctactgcggccagaagaccccaggccgcatccgcagcagcagcggcatcctgtccatggtgttctacacagattctgccatcgccaaggagggcttcagcgccaactacagcgtgctgcagagctctgtgtctgaggacttcaagtgcatggaggccctgggcatggagagcggggagatccacagcgaccagatcacagccagcagccagtacagcaccaactggagcgctgagaggagccggctgaactacccagaaaatggctggaccccaggagaagattcctaccgggagtggatccaggtggacctgggcctgctgcgctttgtgacagctgtgggcacccagggcgccatcagcaaggagaccaagaagaagtactacgtgaagacctacaagattgatgtgagcagcaatggagaggactggatcaccatcaaggagggcaacaagcctgtgctcttccagggcaacaccaaccccacagatgtggtggtggccgtgttccccaagcccctcatcaccaggtttgtgcgcatcaagccagccacctgggagaccggcatctccatgagatttgaggtgtatggctgcaagatcacagactacccctgcagcggcatgctgggcatggtgtctggcctcatcagtgacagccagatcaccagcagcaaccagggcgacaggaactggatgcctgagaacatccggctggtgaccagccgcagcggctgggccctgcccccagccccccacagctacatcaatgagtggctgcagattgacctgggggaggagaagatcgtgcggggcatcatcatccagggcggcaagcaccgggagaacaaggtgttcatgaggaagttcaagattggctacagcaacaacggcagtgactggaagatgatcatggatgacagcaagaggaaggccaagagctttgagggcaacaacaactatgacaccccagagctgcggaccttccctgccctgagcacccgcttcatccgcatctacccagagcgggccacccatggaggcctgggcctgaggatggagctgctgggctgtgaggtggaggcccccacagctggccccaccacccccaacggcaacctggtggatgaatgtgatgatgaccaggccaactgccacagcggcactggagatgacttccagctgactggaggcaccaccgtgctggccacagagaagcccaccgtgattgacagcaccatccagagcgagttccccacctacggcttcaactgtgaatttggctggggcagccacaagaccttctgccactgggagcatgacaaccacgtgcagctgaagtggagcgtgctgaccagcaagacaggccccatccaggaccacactggagatggcaacttcatctacagccaggctgatgagaaccagaagggcaaggtggcccggctggtgtcccctgtggtgtacagccagaacagcgcccactgcatgaccttctggtaccacatgagcggcagccacgtgggcaccctgcgggtgaagctgcgctaccagaagccagaggagtatgaccagctggtgtggatggccatcggccaccagggcgaccactggaaggagggccgggtgctgctgcacaagagcctgaagctgtaccaggtgatctttgaaggagaaattggaaaaggaaacctgggcggcattgctgtggatgacatcagcatcaacaaccacatcagccaggaggactgtgccaagccagctgacctggacaagaagaaccctgagatcaagattgatgaaacaggcagcaccccaggctatgaaggagagggggagggggacaagaacatcagcaggaagccaggaaatgtgctgaagaccctggaccccatcctgatcaccatcatcgccatgtctgccctgggcgtgctgctgggcgctgtgtgtggggtggtgctgtactgtgcctgctggcacaacggcatgtctgaaagaaacctgagcgccctggagaactacaactttgagctggtggatggagtgaagctgaagaaggacaagctgaacacccagagcacctacagcgaggcctag

SEQ ID NO: 141608 - DNA, 2772 bp, Artificial Sequence
  derived and/or modified sequence
atggagcggggcctgcccctgctgtgcgccgtgctggccctggtgctggctccggctggagccttccgcaacgacaaatgcggagacaccataaaaattgagagccccggatacctgactagtcctggatacccccacagctaccacccctcggagaaatgtgaatggttaatccaggctcctgacccctaccaaagaataatgatcaatttcaatccacacttcgatctcgaggatcgggattgcaagtacgactacgttgaagtgtttgatggcgagaatgagaacggccacttcagagggaaattctgcgggaaaatcgctccaccgcccgtggtctccagcggccccttcctcttcattaagttcgtgtcagactacgagacacatggcgccggtttcagtatcaggtatgagattttcaagcgggggcccgagtgttcccagaattacactaccccttctggtgtcatcaagtcccctggcttcccagagaaatatcccaattccctcgagtgtacttacatcgtgttcgtgcctaagatgtctgagatcatactagagtttgaatcctttgacctggagccagacagcaaccctcccggcgggatgttttgtcggtacgaccggctggaaatctgggatggcttcccagacgtcgggccccatataggtagatactgcggacagaagacacctggaaggattcggtcgtcctccggaatcctgtctatggtattctatactgactccgccatcgcaaaggaaggcttttcggccaactacagcgtgttgcagtcctccgtgagcgaagattttaagtgcatggaagccctgggaatggaatccggtgagatacatagcgaccagataactgcaagctcccagtacagcacaaattggtctgcggagcggtcgagactgaattaccctgaaaatgggtggacccctggagaggactcctaccgggagtggatccaggtcgacctggggctgcttaggttcgttaccgccgtgggaacgcagggcgctattagcaaggagaccaaaaagaagtactatgttaagacatacaaaattgacgtttcttccaacggcgaagactggatcaccataaaagagggcaataagccagtgctattccagggcaatacaaaccctactgatgtggtcgtggcggtctttccaaagcccttgatcacaaggttcgtgcggatcaagcctgctacctgggagactggaatctcaatgcgattcgaggtgtacggctgcaagatcactgactacccctgctctgggatgcttggaatggtgagtgggttgattagcgattcccagattacctcttctaaccagggtgataggaactggatgcccgaaaacatcaggcttgtgacttctaggagcggatgggccctccctcctgctccccactcctacataaatgaatggctccagatagacctgggagaagagaagatcgtgcggggaatcattatacaaggcggtaagcaccgcgagaacaaggtctttatgcggaaattcaaaattgggtattccaacaacggcagcgattggaaaatgattatggacgatagcaaaaggaaggctaagtcatttgagggcaacaacaactatgatacccccgaactgagaacgttcccagcattgagcaccaggtttattcgcatttaccccgagagggctacacacggcggcctaggccttcgtatggaattgttagggtgcgaggtggaggctccgaccgcaggacccacaacccctaatggaaacttggtggatgagtgcgatgacgatcaggctaattgccacagtggaacaggtgatgacttccagctaaccggagggacgaccgtgctcgctaccgaaaagcccactgtcatcgactcgaccatccagagcgaatttccaacctacggcttcaattgtgagtttggatgggggagccacaaaacattttgtcattgggagcacgacaaccatgtgcagttgaaatggagcgtcctgacaagcaagactggcccaatccaggaccacacaggagatggtaacttcatttattcccaggctgatgagaaccagaagggtaaggtagcccgcctggtgtcgcctgtagtgtattcacagaactctgcccactgtatgactttctggtaccacatgagtggcagccatgttggcacactgcgcgtcaaattgagataccaaaaaccagaagagtacgaccaattagtctggatggctatcggacatcagggagatcactggaaagagggtcgagtcttactgcataaatctctgaaactctatcaagtcatctttgagggcgaaataggtaaaggaaacttggggggcattgcagtcgacgacatctctataaacaatcatatatcccaggaggattgcgccaaaccggccgacctggacaaaaaaaatcctgaaattaagattgacgagacaggaagcacccctggctacgagggggagggggagggcgataagaatattagtagaaaaccgggcaacgtgctcaagactctggatcccatcttgatcacaatcatcgctatgagtgccctgggggtcctgctgggtgcagtgtgtggggttgtgttgtactgtgcctgctggcataatggcatgagcgagcgcaacctgagtgctttggagaactataactttgagctcgtggacggcgtaaagctcaagaaggataagttgaatacccaatctacttattcggaagcatag

SEQ ID NO: 141609 - DNA, 2772 bp, Artificial Sequence
  derived and/or modified sequence
atggagcggggcctgcccctgctgtgcgccgtgctggccctggtgttagctcctgcaggtgcgttcaggaatgataagtgtggggatactatcaaaattgagtcgccgggctatttaacaagtccagggtatccccattcttaccatccctcggagaaatgtgaatggctgattcaagccccagatccatatcaacgcattatgatcaactttaaccctcacttcgatctggaagatcgcgactgtaagtatgattacgtggaggtgttcgatggagagaacgagaacggacactttcgcggaaagttctgtgggaagattgcaccccctcctgtagtctcatctgggccttttttgttcatcaaattcgtatcagattacgagacgcatggcgccgggttttccattcggtacgaaatttttaaaagaggcccagaatgctcccaaaattacaccacaccctctggagtcatcaagtcacctggcttcccagaaaaatacccaaatagtcttgaatgcacttacattgtgtttgtgcccaaaatgtcagagatcatcctagagtttgagtcctttgacctggaaccagacagcaatccccccggcggaatgttttgtcggtatgacagactggagatctgggatggcttccccgacgtgggcccacacattggaagatattgcgggcagaagacgcccgggaggattcggtctagctcaggaatactgtcaatggtgttttacacagactcagccattgctaaggagggtttctcagcaaattatagtgtccttcaatcttccgtgagcgaagacttcaagtgcatggaagctctggggatggaatccggcgaaattcattcagatcagattaccgctagcagtcagtactcgacaaactggtctgccgaaagatctcgactgaattaccctgagaatggatggacgcccggggaagatagttaccgtgaatggatccaagtggacctcggacttctccggttcgtcaccgcggtcgggacccagggagccatttctaaggaaacaaagaagaaatattatgttaagacatacaaaatagatgtctcctcaaatggcgaggactggatcaccattaaggaaggaaacaaacccgtgctgttccagggcaatactaatcctacggatgtggtggtggctgtctttcctaaaccactaataaccaggtttgtcaggatcaagccagccacctgggagacaggtatttctatgcgcttcgaggtatacggttgcaagattacagattatccttgttccgggatgctgggaatggtgagtggcctaatctcagacagccaaatcaccagctccaaccaaggagacagaaactggatgcccgagaatattcggttggtgacctcgcgctccgggtgggcactgccaccggccccgcacagctacatcaatgaatggttacaaatcgatcttggggaagaaaaaatagtgagagggataatcatccaggggggaaagcatcgcgagaacaaagtgtttatgcgaaaattcaaaatcgggtattcaaataacggctccgactggaagatgattatggacgacagcaaacggaaagctaagagcttcgagggtaacaataattacgacacccccgaattgaggacattcccagccctttctactcggtttattcggatttatcctgagcgcgctactcacgggggacttgggctcaggatggaattgctaggatgtgaggtggaagcccccacggcaggacccactacacccaacggcaacttggttgatgagtgtgacgatgaccaggcaaactgccactccggcaccggcgacgattttcagttgactggaggtactactgtcctcgccaccgagaaacctacagttatagacagcacaatacagtccgagtttccaacatacggatttaattgtgagtttggatggggatcccataaaacattctgtcactgggagcacgacaaccacgtccagctcaagtggtcagtccttacaagcaagacaggaccaatccaggatcacactggagacggtaacttcatctactcacaagccgacgaaaaccagaaggggaaagtcgcgagactggtgagtcctgttgtgtactctcaaaattccgcccactgtatgactttttggtaccatatgtcaggaagtcacgttgggaccttgagggtgaagctacggtaccagaagcctgaggagtacgatcagctcgtctggatggccattggccaccagggggaccattggaaagaaggacgggtactgctccacaagagtttaaagctgtatcaagtgatcttcgaaggagagattggcaaagggaatctagggggcatcgctgttgacgacatcagcatcaataaccatatctcacaagaggattgtgccaaaccagccgatttagacaagaaaaaccctgagattaaaattgacgagacagggtcaaccccgggctatgagggcgagggcgaaggcgacaagaatattagtaggaaaccaggtaacgtccttaagaccttagaccccatcttgatcaccataattgcaatgagcgctttgggtgtcttactgggggcagtttgcggtgtggtactctactgtgcatgctggcacaacggcatgagtgaacgcaatttgagtgctctggagaattataactttgaactggtagacggagtgaaattgaagaaggacaaattgaatacacagtccacttactccgaggcttag

SEQ ID NO: 141610 - DNA, 5728 bp, Artificial Sequence
  derived and/or modified sequence
gccaaaacctttgaccagagtctccttgccagcattcctacctccctttggccagctatttgtgccagttttttttttttttttttgagacatggcccgggcagtggctcctggaagaggaacaagtgtgggaaaagggagaggaagccggagctaaatgacaggatgcaggcgacttgagacacaaaaagagaagcgttcctctcggatccaggcattgcctcgctgctttcttttctccaagacgggctgaggattgtacagctctaggcggagttggggctcttcggatcgcttagattctcctctttgctgcatttccccccacgtcctcgttctcccgcgtctgcctgcggacccggagaagggagaatggagagggggctgccgctcctctgcgccgtgctcgccctcgtcctcgccccggccggcgcttttcgcaacgataaatgtggcgatactataaaaattgaaagccccgggtaccttacatctcctggttatcctcattcttatcacccaagtgaaaaatgcgaatggctgattcaggctccggacccataccagagaattatgatcaacttcaaccctcacttcgatttggaggacagagactgcaagtatgactacgtggaagtcttcgatggagaaaatgaaaatggacattttaggggaaagttctgtggaaagatagcccctcctcctgttgtgtcttcagggccatttctttttatcaaatttgtctctgactacgaaacacatggtgcaggattttccatacgttatgaaattttcaagagaggtcctgaatgttcccagaactacacaacacctagtggagtgataaagtcccccggattccctgaaaaatatcccaacagccttgaatgcacttatattgtctttgtgccaaagatgtcagagattatcctggaatttgaaagctttgacctggagcctgactcaaatcctccaggggggatgttctgtcgctacgaccggctagaaatctgggatggattccctgatgttggccctcacattgggcgttactgtggacagaaaacaccaggtcgaatccgatcctcatcgggcattctctccatggttttttacaccgacagcgcgatagcaaaagaaggtttctcagcaaactacagtgtcttgcagagcagtgtctcagaagatttcaaatgtatggaagctctgggcatggaatcaggagaaattcattctgaccagatcacagcttcttcccagtatagcaccaactggtctgcagagcgctcccgcctgaactaccctgagaatgggtggactcccggagaggattcctaccgagagtggatacaggtagacttgggccttctgcgctttgtcacggctgtcgggacacagggcgccatttcaaaagaaaccaagaagaaatattatgtcaagacttacaagatcgacgttagctccaacggggaagactggatcaccataaaagaaggaaacaaacctgttctctttcagggaaacaccaaccccacagatgttgtggttgcagtattccccaaaccactgataactcgatttgtccgaatcaagcctgcaacttgggaaactggcatatctatgagatttgaagtatacggttgcaagataacagattatccttgctctggaatgttgggtatggtgtctggacttatttctgactcccagatcacatcatccaaccaaggggacagaaactggatgcctgaaaacatccgcctggtaaccagtcgctctggctgggcacttccacccgcacctcattcctacatcaatgagtggctccaaatagacctgggggaggagaagatcgtgaggggcatcatcattcagggtgggaagcaccgagagaacaaggtgttcatgaggaagttcaagatcgggtacagcaacaacggctcggactggaagatgatcatggatgacagcaaacgcaaggcgaagtcttttgagggcaacaacaactatgatacacctgagctgcggacttttccagctctctccacgcgattcatcaggatctaccccgagagagccactcatggcggactggggctcagaatggagctgctgggctgtgaagtggaagcccctacagctggaccgaccactcccaacgggaacttggtggatgaatgtgatgacgaccaggccaactgccacagtggaacaggtgatgacttccagctcacaggtggcaccactgtgctggccacagaaaagcccacggtcatagacagcaccatacaatcagagtttccaacatatggttttaactgtgaatttggctggggctctcacaagaccttctgccactgggaacatgacaatcacgtgcagctcaagtggagtgtgttgaccagcaagacgggacccattcaggatcacacaggagatggcaacttcatctattcccaagctgacgaaaatcagaagggcaaagtggctcgcctggtgagccctgtggtttattcccagaactctgcccactgcatgaccttctggtatcacatgtctgggtcccacgtcggcacactcagggtcaaactgcgctaccagaagccagaggagtacgatcagctggtctggatggccattggacaccaaggtgaccactggaaggaagggcgtgtcttgctccacaagtctctgaaactttatcaggtgattttcgagggcgaaatcggaaaaggaaaccttggtgggattgctgtggatgacattagtattaataaccacatttcacaagaagattgtgcaaaaccagcagacctggataaaaagaacccagaaattaaaattgatgaaacagggagcacgccaggatacgaaggtgaaggagaaggtgacaagaacatctccaggaagccaggcaatgtgttgaagaccttagaccccatcctcatcaccatcatagccatgagtgccctgggggtcctcctgggggctgtctgtggggtcgtgctgtactgtgcctgttggcataatgggatgtcagaaagaaacttgtctgccctggagaactataactttgaacttgtggatggtgtgaagttgaaaaaagacaaactgaatacacagagtacttattcggaggcatgaaggcagacagagatgaaaagacagtcaaaggacggaagtggaaggacgggagtgagctggggagctgttgatctttcactatacaggctgggaagtgtgttgatgaccactgagccaggcttttctcaggagcttcaatgagtatggccgacagacatggacaaggagctgtgttcaccatcggactcatgtgcagtcagcttttttcctgttggtttcatttgaataatcagatgctggtgttgagaccaagtatgattgacataatcattcatttcgacccctcctgcccctctctctctctctcctctcccctttgtggattctttttggaaactgagcgaaatccaagatgctggcaccaagcgtattccgtgtggccctttggatggacatgctacctgaaacccagtgcccagaatatactagaatcaccgcatttcagtggactcctgaagttgtacttgtgtataattgcccgcgtcgtgcataggcaaagaaggattaggctgttttctttttaaagtactgtagcctcagtactggtgtagtgtgtcagctctgtttacgaagcaatactgtccagttttcttgctgtttttccggtgttgtactaaacctcgtgcttgtgaactccatacagaaaacggtgccatccctgaacacggctggccactgggtatactgctgacaaccgcaacaacaaaaacacaaatccttggcactggctagtctatgtcctctcaagtgcctttttgtttgtactggttcattgtgttacattaacgacccactctgcttcttgctggtgaaagccctgctctttaatcaaactctggtggcccactgactaagaagaaagtttattttcgtgtgagatgccagcccctccgggcaggcaagggctctgaagatttggcaacgtggcttaattgttctgctttttctgtagttcaatttcatgtttcttgacccttttgtataaagctacaatattctctcttattgttctttcatatggaatgtattttcaaatgtaaactctcttctctttctctctcctatctctctgtcttttttctctcttagaattggaggatttgccattgtccaggaaagaaacttgcagctttaacctgctgggaatggcaaacgattttactagactttatgtttaaaaataaataaataagggaaattcctaactttgccctccaaagtctaactttggttttcttgttaactggttaaagtgacagtatcttttttccttatctattctattcaaaatgacctttgatagaaatgttggcatttagtagaaatagtgataagttgaggaaagaaataatacaaattggctttcaagtgagacccaaaggaagaactggataaaatcttccaaatccaaaagcatgagatttttctatccaaatatgcaaaaatgacccaagagaactttcttattttgctactgagtcacacaagggaagtggaaggaagaacagttaatttaagaatgaaactataaatcctgatgcctgggggtcaagtattttaagataagagggggaaaaacacataaagtcaaacaaatgttttaaaaattcataacagcaaccttgaaaaaatagacttaaatgaatgcttctagaaacttccagcggctcacaaagaataagcctgccttagggctggcaacatctaagcctctaacagcacagggaagcaaatatcttaccaggcagcctatgaattaacccaaagaagctttggttggttttggtggatttttatcatgccatgttggacatgagattttttagatcttccttcccacattgctagacgtctcactcaaagacatttgttgggagtcacatttgcatcatagacgagacagtccattcatcttagttaaattggattgagaatgccttttgtttccaggaaaatattgatcaccatgaaagaagaatagttttttgtccccagagacattcatttagttgatataatcctaccagaaggaaagcactaagaaacactcgtttgttgtttttaaaggcaacagacttaaagttgtcctcagccaaggaaaaatgatactgcaactttaaaatttaaagtatcttgcactgataaatatatttaaaaattatatgtttataaagttattaatttgtaaaggcagtgttacaaaatgttcagtttatattgttttagattgttttgtaatttttaaaggtgtaaaataacatattttttctttatggaaatctataaaactttctgtagtaaaatgttttcattttactggtatattattgcttcatgttttgtaccatcataagattttgtgcagattttttttacagaaattattattttctatgacaatatgacacttgtaaattgttgtttcaaaatgaacagcgaagccttaactttaaatgacatttgtattctcagacactgagtagcataaaaaccacatagaactgaactgtaacttaaattccaaactatgactactacattccaaagaaacagttgaattaaacattttcataaaatatcccac

SEQ ID NO: 141611 - DNA, 5877 bp, Artificial Sequence
  derived and/or modified sequence
gcagttggtgaaactcctctgtctcccgctcatcttttcattgctcgttcccctccttcccgcagacacccggacctcccctgggcgccagctccgcggctccaacgggtccagaaacaagccggattttttttttttcttcctggaaattggctttggtgtgtgttgccctacctccctcctccccctcccacccacagcccccccccggccttttttttttttttttttttttttgagacatggcccgggcagtggctcctggaagaggaacaagtgtgggaaaagggagaggaagccggagctaaatgacaggatgcaggcgacttgagacacaaaaagagaagcgttcctctcggatccaggcattgcctcgctgctttcttttctccaagacgggctgaggattgtacagctctaggcggagttggggctcttcggatcgcttagattctcctctttgctgcatttccccccacgtcctcgttctcccgcgtctgcctgcggacccggagaagggagaatggagagggggctgccgctcctctgcgccgtgctcgccctcgtcctcgccccggccggcgcttttcgcaacgataaatgtggcgatactataaaaattgaaagccccgggtaccttacatctcctggttatcctcattcttatcacccaagtgaaaaatgcgaatggctgattcaggctccggacccataccagagaattatgatcaacttcaaccctcacttcgatttggaggacagagactgcaagtatgactacgtggaagtcttcgatggagaaaatgaaaatggacattttaggggaaagttctgtggaaagatagcccctcctcctgttgtgtcttcagggccatttctttttatcaaatttgtctctgactacgaaacacatggtgcaggattttccatacgttatgaaattttcaagagaggtcctgaatgttcccagaactacacaacacctagtggagtgataaagtcccccggattccctgaaaaatatcccaacagccttgaatgcacttatattgtctttgtgccaaagatgtcagagattatcctggaatttgaaagctttgacctggagcctgactcaaatcctccaggggggatgttctgtcgctacgaccggctagaaatctgggatggattccctgatgttggccctcacattgggcgttactgtggacagaaaacaccaggtcgaatccgatcctcatcgggcattctctccatggttttttacaccgacagcgcgatagcaaaagaaggtttctcagcaaactacagtgtcttgcagagcagtgtctcagaagatttcaaatgtatggaagctctgggcatggaatcaggagaaattcattctgaccagatcacagcttcttcccagtatagcaccaactggtctgcagagcgctcccgcctgaactaccctgagaatgggtggactcccggagaggattcctaccgagagtggatacaggtagacttgggccttctgcgctttgtcacggctgtcgggacacagggcgccatttcaaaagaaaccaagaagaaatattatgtcaagacttacaagatcgacgttagctccaacggggaagactggatcaccataaaagaaggaaacaaacctgttctctttcagggaaacaccaaccccacagatgttgtggttgcagtattccccaaaccactgataactcgatttgtccgaatcaagcctgcaacttgggaaactggcatatctatgagatttgaagtatacggttgcaagataacagattatccttgctctggaatgttgggtatggtgtctggacttatttctgactcccagatcacatcatccaaccaaggggacagaaactggatgcctgaaaacatccgcctggtaaccagtcgctctggctgggcacttccacccgcacctcattcctacatcaatgagtggctccaaatagacctgggggaggagaagatcgtgaggggcatcatcattcagggtgggaagcaccgagagaacaaggtgttcatgaggaagttcaagatcgggtacagcaacaacggctcggactggaagatgatcatggatgacagcaaacgcaaggcgaagtcttttgagggcaacaacaactatgatacacctgagctgcggacttttccagctctctccacgcgattcatcaggatctaccccgagagagccactcatggcggactggggctcagaatggagctgctgggctgtgaagtggaagcccctacagctggaccgaccactcccaacgggaacttggtggatgaatgtgatgacgaccaggccaactgccacagtggaacaggtgatgacttccagctcacaggtggcaccactgtgctggccacagaaaagcccacggtcatagacagcaccatacaatcagagtttccaacatatggttttaactgtgaatttggctggggctctcacaagaccttctgccactgggaacatgacaatcacgtgcagctcaagtggagtgtgttgaccagcaagacgggacccattcaggatcacacaggagatggcaacttcatctattcccaagctgacgaaaatcagaagggcaaagtggctcgcctggtgagccctgtggtttattcccagaactctgcccactgcatgaccttctggtatcacatgtctgggtcccacgtcggcacactcagggtcaaactgcgctaccagaagccagaggagtacgatcagctggtctggatggccattggacaccaaggtgaccactggaaggaagggcgtgtcttgctccacaagtctctgaaactttatcaggtgattttcgagggcgaaatcggaaaaggaaaccttggtgggattgctgtggatgacattagtattaataaccacatttcacaagaagattgtgcaaaaccagcagacctggataaaaagaacccagaaattaaaattgatgaaacagggagcacgccaggatacgaaggtgaaggagaaggtgacaagaacatctccaggaagccaggcaatgtgttgaagaccttagaccccatcctcatcaccatcatagccatgagtgccctgggggtcctcctgggggctgtctgtggggtcgtgctgtactgtgcctgttggcataatgggatgtcagaaagaaacttgtctgccctggagaactataactttgaacttgtggatggtgtgaagttgaaaaaagacaaactgaatacacagagtacttattcggaggcatgaaggcagacagagatgaaaagacagtcaaaggacggaagtggaaggacgggagtgagctggggagctgttgatctttcactatacaggctgggaagtgtgttgatgaccactgagccaggcttttctcaggagcttcaatgagtatggccgacagacatggacaaggagctgtgttcaccatcggactcatgtgcagtcagcttttttcctgttggtttcatttgaataatcagatgctggtgttgagaccaagtatgattgacataatcattcatttcgacccctcctgcccctctctctctctctcctctcccctttgtggattctttttggaaactgagcgaaatccaagatgctggcaccaagcgtattccgtgtggccctttggatggacatgctacctgaaacccagtgcccagaatatactagaatcaccgcatttcagtggactcctgaagttgtacttgtgtataattgcccgcgtcgtgcataggcaaagaaggattaggctgttttctttttaaagtactgtagcctcagtactggtgtagtgtgtcagctctgtttacgaagcaatactgtccagttttcttgctgtttttccggtgttgtactaaacctcgtgcttgtgaactccatacagaaaacggtgccatccctgaacacggctggccactgggtatactgctgacaaccgcaacaacaaaaacacaaatccttggcactggctagtctatgtcctctcaagtgcctttttgtttgtactggttcattgtgttacattaacgacccactctgcttcttgctggtgaaagccctgctctttaatcaaactctggtggcccactgactaagaagaaagtttattttcgtgtgagatgccagcccctccgggcaggcaagggctctgaagatttggcaacgtggcttaattgttctgctttttctgtagttcaatttcatgtttcttgacccttttgtataaagctacaatattctctcttattgttctttcatatggaatgtattttcaaatgtaaactctcttctctttctctctcctatctctctgtcttttttctctcttagaattggaggatttgccattgtccaggaaagaaacttgcagctttaacctgctgggaatggcaaacgattttactagactttatgtttaaaaataaataaataagggaaattcctaactttgccctccaaagtctaactttggttttcttgttaactggttaaagtgacagtatcttttttccttatctattctattcaaaatgacctttgatagaaatgttggcatttagtagaaatagtgataagttgaggaaagaaataatacaaattggctttcaagtgagacccaaaggaagaactggataaaatcttccaaatccaaaagcatgagatttttctatccaaatatgcaaaaatgacccaagagaactttcttattttgctactgagtcacacaagggaagtggaaggaagaacagttaatttaagaatgaaactataaatcctgatgcctgggggtcaagtattttaagataagagggggaaaaacacataaagtcaaacaaatgttttaaaaattcataacagcaaccttgaaaaaatagacttaaatgaatgcttctagaaacttccagcggctcacaaagaataagcctgccttagggctggcaacatctaagcctctaacagcacagggaagcaaatatcttaccaggcagcctatgaattaacccaaagaagctttggttggttttggtggatttttatcatgccatgttggacatgagattttttagatcttccttcccacattgctagacgtctcactcaaagacatttgttgggagtcacatttgcatcatagacgagacagtccattcatcttagttaaattggattgagaatgccttttgtttccaggaaaatattgatcaccatgaaagaagaatagttttttgtccccagagacattcatttagttgatataatcctaccagaaggaaagcactaagaaacactcgtttgttgtttttaaaggcaacagacttaaagttgtcctcagccaaggaaaaatgatactgcaactttaaaatttaaagtatcttgcactgataaatatatttaaaaattatatgtttataaagttattaatttgtaaaggcagtgttacaaaatgttcagtttatattgttttagattgttttgtaatttttaaaggtgtaaaataacatattttttctttatggaaatctataaaactttctgtagtaaaatgttttcattttactggtatattattgcttcatgttttgtaccatcataagattttgtgcagattttttttacagaaattattattttctatgacaatatgacacttgtaaattgttgtttcaaaatgaacagcgaagccttaactttaaatgacatttgtattctcagacactgagtagcataaaaaccacatagaactgaactgtaacttaaattccaaactatgactactacattccaaagaaacagttgaattaaacattttcataaaatatccc

SEQ ID NO: 141612 - DNA, 2772 bp, Artificial Sequence
  derived and/or modified sequence
atggagcgaggactgcccctactctgcgccgtgctcgctcttgtcctagcccctgccggagcctttcgcaatgacaaatgcggggacaccataaagattgagtctcccggatatttaaccagccctgggtacccacattcttaccacccaagcgaaaaatgtgaatggcttatccaggccccagatccatatcaacgcatcatgattaactttaatccacactttgacctagaagaccgggattgtaagtatgattatgtggaagtgttcgacggtgagaacgagaacggccatttcagagggaagttctgcgggaagattgccccacctcccgttgtgtcgtcgggcccattcttatttatcaagtttgttagtgattacgaaactcacggcgctggtttctcaattcgctacgaaatcttcaaacgcggaccagagtgttctcaaaattatacaacacctagcggtgtaatcaagagtcctggcttcccagagaagtatccaaactctctcgaatgcacatatatcgtgttcgtgccaaaaatgtctgaaatcatcttggaatttgagtcattcgatctggagcccgacagtaatccgcctgggggtatgttttgtaggtacgataggctagagatatgggacgggtttccggacgtcgggccacatatcggacgctattgcggtcagaaaacgccaggaaggatcaggtcatctagcggtattctgtccatggtattttatacagatagtgcaattgcgaaagaggggttctccgccaactactcggtgttgcagtcgagcgtctccgaagactttaagtgcatggaggctttagggatggaatccggagaaatccactctgatcagatcacagcctcatctcagtattccaccaattggtcagcagagcgcagtaggctaaattatcccgagaatggttggacgcccggtgaagactcatatagggaatggatccaagtggatctgggcctgctgcgattcgtaacagcagtcggcacccagggagctatttctaaagaaactaaaaagaagtattacgtgaagacctataagatcgacgtaagttctaacggggaggactggataacgattaaagaggggaataaacctgttttgttccaagggaacaccaacccgactgatgtggtagtcgcagtttttcctaaacccctgatcactagatttgtgcggatcaagcccgctacatgggagaccgggatctcaatgaggtttgaggtctatggctgcaagatcaccgattacccatgtagcggaatgcttggcatggtttccgggcttatttcagactcgcaaataacaagcagtaaccagggagacaggaactggatgcccgaaaatatccggttggtaaccagccggagcggatgggcactgccccctgcaccccactcctacattaatgagtggctgcagatcgatcttggcgaggaaaagatcgtaagaggtattataattcagggaggcaagcatcgagaaaataaggtgtttatgagaaagtttaagattggctactccaacaacgggagcgattggaagatgattatggacgactcaaagaggaaggccaaatccttcgagggcaacaacaactatgacacaccagaactgcggacttttccagccctgtctactcgattcattagaatatatcccgagagggccacccacgggggtctcggcctgcggatggaattgctcggatgtgaagtcgaagcacctactgctggcccaacaactcctaatgggaatcttgttgatgaatgtgatgacgatcaggccaattgtcattcgggcaccggcgatgatttccagctgaccggaggaacaaccgtccttgcaactgagaagcccaccgtgatcgactccactattcagagcgagttccccacctatggatttaactgcgaattcggatggggtagtcacaaaacattctgccactgggagcatgataatcatgttcaattgaaatggagcgtgcttaccagcaagacgggtcctatccaggaccatactggcgacggcaatttcatttattcacaagctgatgagaaccaaaaaggcaaagtggctagactcgtgtccccggtggtgtactctcagaatagtgctcattgcatgacattttggtatcacatgtctggtagtcacgtggggactctgagggtcaagctgagatatcagaagccagaggagtacgatcaattagtatggatggccattggccaccaaggcgaccattggaaggaaggaagagtgcttttgcataagtcactcaaactctaccaggtgatttttgagggtgagatcggcaagggaaacctggggggtattgctgtggatgatattagcatcaataaccacatttcacaggaagattgcgcaaaacctgcagaccttgacaaaaagaatccagagatcaaaatcgacgagacgggcagtacgcccggatacgagggagagggagagggggataaaaatatcagtcgcaagccaggaaacgtcctaaagactctcgatccaattctgattacgatcattgcaatgtcggccttgggcgtactcctcggggctgtctgcggtgtagtgctgtattgcgcctgttggcataatgggatgagcgaacgcaaccttagtgctctcgaaaactataacttcgagcttgtggacggtgtgaagctgaagaaggacaaacttaacacccagtccacctacagcgaagcctag

SEQ ID NO: 141613 - DNA, 2772 bp, Artificial Sequence
  derived and/or modified sequence
atggaacgcggattgccacttctctgcgcagtcctggctctggtgttggcccctgctggggctttcagaaacgacaaatgtggggacacaattaaaatcgaatcccctggctacctcaccagcccgggataccctcactcctaccaccccagcgagaaatgcgagtggctgattcaggccccagacccttaccagaggatcatgattaatttcaacccccactttgatctggaggatcgcgattgcaagtacgactacgttgaagtttttgatggcgaaaacgaaaacggccacttcaggggcaagttctgtggcaagattgcacctccccctgtcgttagctcaggcccttttttgtttattaagttcgtctcagactacgagactcatggggctggttttagcattaggtacgagatcttcaaaagggggcctgagtgctctcagaactacaccacaccctccggagtcatcaaatccccaggttttcctgaaaagtatcccaattcgttagagtgtacatatatcgtgtttgtgccgaagatgagtgaaatcatcctggaattcgagtccttcgacctggagccagacagcaatcccccaggtggaatgttctgtcggtatgacagactggagatatgggacggattccccgacgttggaccgcatataggccgatactgtggccagaaaacaccgggtcggatccgatcttccagcggcattcttagtatggtgttctacaccgacagtgcgattgctaaagaggggttctctgctaactactccgtgcttcagagttccgtcagtgaggactttaagtgcatggaggccttaggaatggagagcggagagattcacagtgatcagatcaccgcttcgtcccagtacagcacaaattggagtgcggaaaggtctaggttaaattatccagagaacggatggacccccggagaagatagttatagggaatggatccaggtcgacctggggctgttgaggttcgtcacggctgtgggtactcagggggctatctcaaaggagacgaagaagaagtactatgttaaaacttataagatcgatgtctcctcaaatggtgaggattggatcacgattaaagagggcaataaaccagtgctttttcagggcaacacaaatccaaccgatgtcgtggtagccgtgttccctaagcccttgatcaccaggttcgtgcgcatcaaaccagcgacctgggagacaggcataagcatgcgatttgaagtgtacgggtgcaaaattaccgactacccctgttccgggatgctagggatggtgagcgggttgattagcgactcccagatcaccagcagtaaccagggtgatcgtaattggatgcctgaaaatataagattggtgacctccaggagcgggtgggcactgccacccgctccccattcgtacatcaacgaatggctacagattgacctgggcgaagaaaaaatcgtgcgcggaatcatcatccaggggggtaagcaccgggaaaataaggtattcatgcgcaaattcaaaatcgggtacagcaacaacgggagcgactggaagatgataatggatgacagcaagagaaaggccaagtcctttgaaggcaacaacaactatgatacccctgaattacggacattccctgctctatccacccgcttcattcgcatatacccagaaagggcgacacacggcggacttgggttgcgcatggaactgctcggatgtgaggtggaagctcctaccgctggcccaaccacaccgaatgggaacctggtcgacgaatgcgatgacgaccaagccaactgtcactccggcaccggcgacgactttcagttgaccgggggaaccacagtgctggctactgagaagccgaccgtgattgactccacaatacagagcgaattccccacgtatggttttaactgcgaatttggctggggcagccacaagacgttttgtcattgggaacatgacaaccatgtgcaacttaagtggtctgtgctcaccagcaagaccggcccaatccaggatcacaccggcgatggcaactttatatactcacaggccgacgaaaaccagaagggcaaagtggctagactggtgagccctgttgtgtactcacaaaatagcgcccactgcatgacattttggtatcacatgtccggtagtcacgtagggacactgagagtgaaactacgataccagaagcctgaggaatacgatcagctagtgtggatggcgattgggcaccagggggaccactggaaggagggcagggtgctgctgcataagtctctgaagctgtaccaagtgattttcgaaggtgaaataggcaaggggaaccttgggggaattgccgtggatgacatatcaattaacaaccatatatctcaggaagattgcgcaaaacctgctgacctcgataagaagaatcccgaaattaagatcgatgaaacagggtcaacccccggatatgagggggagggcgagggagataagaatatctctaggaagcccggtaacgttttgaagaccctggatccaattctgattaccattatcgccatgtcggcattgggggttctgctgggagctgtgtgcggggtggttctgtattgcgcctgctggcacaatgggatgtccgaacgaaacctttctgctctggagaattacaattttgaacttgttgacggtgtgaagctgaagaaagataaactgaatacccagagcacctacagcgaggcttag

SEQ ID NO: 141614 - protein, 241 aa, Artificial Sequence
  derived and/or modified sequence
MAQHHLWILLLCLQTWPEAAGKDSEIFTVNGILGESVTFPVNIQEPRQVKIIAWTSKTSVAYVTPGDSETAPVVTVTHRNYYERIHALGPNYNLVISDLRMEDAGDYKADINTQADPYTTTKRYNLQIYRRLGKPKITQSLMASVNSTCNVTLTCSVEKEEKNVTYNWSPLGEEGNVLQIFQTPEDQELTYTCTAQNPVSNNSDSISARQLCAGNQLCPSLLVSLRDHSEELQGLNVGHIL

SEQ ID NO: 141615 - protein, 328 aa, Artificial Sequence
  derived and/or modified sequence
MAQHHLWILLLCLQTWPEAAGKDSEIFTVNGILGESVTFPVNIQEPRQVKIIAWTSKTSVAYVTPGDSETAPVVTVTHRNYYERIHALGPNYNLVISDLRMEDAGDYKADINTQADPYTTTKRYNLQIYRRLGKPKITQSLMASVNSTCNVTLTCSVEKEEKNVTYNWSPLGEEGNVLQIFQTPEDQELTYTCTAQNPVSNNSDSISARQLCADIAMGFRTHHTGLLSVLAMFFLLVLILSSVFLFRLFKRRQDAASKKTIYTYIMASRNTQPAESRIYDEILQSKVLPSKEEPVNTVYSEVQFADKMGKASTQDSKPPGTSSYEIVI

SEQ ID NO: 141616 - DNA, 987 bp, Artificial Sequence
  derived and/or modified sequence
atggcccagcaccacctgtggatcctgctgctgtgcctgcagacctggcccgaggccgccggcaaggacagcgagatcttcaccgtgaacggcatcctgggcgagagcgtgaccttccccgtgaacatccaggagcccagacaggtgaagatcatcgcctggaccagcaagaccagcgtggcctacgtgacccccggcgacagcgagaccgcccccgtggtgaccgtgacccacagaaactactacgagagaatccacgccctgggccccaactacaacctggtgatcagcgacctgagaatggaggacgccggcgactacaaggccgacatcaacacccaggccgacccctacaccaccaccaagagatacaacctgcagatctacagaagactgggcaagcccaagatcacccagagcctgatggccagcgtgaacagcacctgcaacgtgaccctgacctgcagcgtggagaaggaggagaagaacgtgacctacaactggagccccctgggcgaggagggcaacgtgctgcagatcttccagacccccgaggaccaggagctgacctacacctgcaccgcccagaaccccgtgagcaacaacagcgacagcatcagcgccagacagctgtgcgccgacatcgccatgggcttcagaacccaccacaccggcctgctgagcgtgctggccatgttcttcctgctggtgctgatcctgagcagcgtgttcctgttcagactgttcaagagaagacaggacgccgccagcaagaagaccatctacacctacatcatggccagcagaaacacccagcccgccgagagcagaatctacgacgagatcctgcagagcaaggtgctgcccagcaaggaggagcccgtgaacaccgtgtacagcgaggtgcagttcgccgacaagatgggcaaggccagcacccaggacagcaagccccccggcaccagcagctacgagatcgtgatctag

SEQ ID NO: 141617 - DNA, 987 bp, Artificial Sequence
  derived and/or modified sequence
atggcacagcaccacttatggattctgcttctttgccttcaaacctggccagaagcagctgggaaggactcagagatttttactgtgaatgggatcttaggggaaagcgttacctttcctgttaacatacaagagccacggcaggtgaagatcatcgcttggacttctaagacctcagttgcatacgtgactcccggtgacagcgagaccgcccctgtcgtgactgtaacgcaccgcaattattacgagagaatacacgccctcggtcccaattacaacctggttatttccgacttgcgaatggaagatgccggtgattacaaggctgacatcaatacccaggccgacccatataccaccaccaagaggtataacctacagatttaccgacggctcgggaaaccaaaaatcacgcagtctttaatggcgagcgtcaattccacttgtaacgtgaccctaacttgctccgtggaaaaggaggagaagaatgtgacctacaactggtcccccttgggagaggagggcaatgtcctgcagatatttcagacacccgaagatcaggaactgacctacacatgcaccgcccagaatcccgtgagtaacaattccgatagtattagcgccaggcagctctgcgccgacatagctatgggatttcgcacccaccacaccgggctcctgtccgtgctagccatgttctttctgctcgtgttgatcctatcaagcgtgtttctttttagattgttcaaacgacgacaagacgcggccagcaaaaaaaccatctacacttacataatggcaagtcgaaatacccagcccgccgaatcacgaatctacgacgaaattctccagtctaaagtcctgccaagcaaagaagagcccgtcaatactgtgtattctgaagtgcaatttgctgataagatgggcaaagctagcacgcaggactctaagcctcctggcacaagctcttacgagatcgtgatttag

SEQ ID NO: 141618 - DNA, 987 bp, Artificial Sequence
  derived and/or modified sequence
atggcccagcaccacctgtggatcctgctgctgtgcctgcagacctggccagaggccgccggcaaggacagcgagatcttcaccgtgaatggcatcctgggggagagcgtgaccttccctgtgaacatccaggagccccggcaggtgaagatcatcgcctggaccagcaagacctctgtggcctacgtgacccctggggacagcgagacagcccctgtggtgacagtgacccacaggaactactatgaaagaatccacgccctgggccccaactacaacctggtgatcagtgacctgaggatggaggatgctggggactacaaggctgacatcaacacccaggccgacccctacaccaccaccaagcgctacaacctgcagatctaccgccgcctgggcaagcccaagatcacccagagcctgatggcctctgtgaacagcacctgcaatgtgaccctgacctgcagcgtggagaaggaggagaagaatgtgacctacaactggagccccctgggggaggagggcaatgtgctgcagatcttccagaccccagaggaccaggagctgacctacacctgcacagcccagaaccctgtgagcaacaacagcgacagcatcagcgcccggcagctgtgtgccgacatcgccatgggcttccgcacccaccacacaggcctgctgtctgtgctggccatgttcttcctgctggtgctgatcctgagcagcgtcttcctgttccgcctcttcaagaggcggcaggatgctgccagcaagaagaccatctacacctacatcatggccagcaggaacacccagcctgctgagagccgcatctatgatgagatcctgcagagcaaggtgctgcccagcaaggaggagcctgtgaacacagtgtacagcgaggtgcagtttgctgacaagatgggcaaggccagcacccaggacagcaagcccccaggcaccagcagctatgagatcgtcatctag

SEQ ID NO: 141619 - DNA, 987 bp, Artificial Sequence
  derived and/or modified sequence
atggcccagcaccacctgtggatcctgctgctgtgcctgcagacctggcctgaggctgcgggtaaggactccgaaatattcacagtgaatggaatacttggggaatccgtcaccttccccgtgaatatccaagagccacgacaggtcaaaataattgcttggacgtccaaaactagcgttgcctacgtgactcccggcgattccgaaaccgcaccagtcgttactgtaactcatcggaactactacgagaggatccacgccttgggcccaaactataacctggtgatctctgacctccgaatggaggatgcgggtgattacaaagctgatataaatacgcaggctgatccttacacaactaccaagagatataatctgcaaatataccggagattaggcaaacccaagataacacagagcctcatggcgagcgtgaattccacatgtaatgtgacactgacttgctctgttgagaaagaggaaaaaaacgttacttataattggtcccccttgggcgaagaggggaacgtcctgcaaatcttccagacacctgaggaccaggaactgacatacacttgcacagctcaaaatcccgtgtctaataacagcgacagcatatctgcacggcagttgtgcgccgacattgccatgggcttccggacccaccacaccggattgctctccgtgctagcaatgtttttcctgctcgtgctgatcctgtcatcagtctttctatttcggttgtttaaacgacggcaagacgccgcctccaaaaaaaccatctacacttatatcatggcctctcgcaatacgcagcctgcagagtcacgcatttatgacgagattcttcagtccaaggtccttcccagcaaagaagagcccgttaataccgtgtacagcgaagtgcagtttgctgataaaatgggtaaggcttccacacaggatagcaaaccccctggcacatcgagttacgaaattgtcatatag

SEQ ID NO: 141620 - DNA, 987 bp, Artificial Sequence
  derived and/or modified sequence
atggcacagcaccacctctggatattgctcctttgcttacaaacatggcctgaagctgccggaaaagactcagaaattttcactgtgaatggcatactgggcgaaagtgttacttttccggtaaatatacaggaacctcggcaagtgaagatcatcgcctggacttctaagaccagcgtcgcatacgtgacacctggcgactccgaaacggcccctgtggtgaccgtgacacaccgtaattattatgagcgaatccacgccctggggccaaattacaacctcgttatctcagacctgcgcatggaagacgccggtgattacaaagcggacataaacactcaagcagatccttacactactaccaagagatacaacctgcagatatatcggaggctcggaaaaccaaagatcactcagtccttgatggccagtgtgaattccacttgtaacgttaccttgacctgttccgtggagaaggaagagaaaaatgtaacatataattggagtcctttaggtgaagaaggaaatgtgttacaaatttttcagacgccagaggaccaggagctgacatatacatgtacagcgcaaaacccagtctccaataacagcgacagcatctctgccaggcagctatgcgctgatatcgctatgggtttcaggacgcaccatactggtctgctgagcgtgttggcaatgttcttcctcttggtgctgatattgtccagcgtttttcttttccgtctcttcaaaagaagacaggatgccgcttccaaaaaaacgatatatacctacatcatggctagcagaaatactcagccagcagaatcgcggatctacgacgagatcctgcagagcaaagtgctgcccagtaaggaggaaccagtaaataccgtctatagtgaagtgcagtttgctgataaaatgggaaaagcctccactcaggacagcaagccgccaggaacttcctcctacgaaatagtcatttag

SEQ ID NO: 141621 - DNA, 8181 bp, Artificial Sequence
  derived and/or modified sequence
ccgtgcttttccacagaaggttagaccctgaaagagatggctcagcaccacctatggatcttgctcctttgcctgcaaacctggccggaagcagctggaaaagactcagaaatcttcacagtgaatgggattctgggagagtcagtcactttccctgtaaatatccaagaaccacggcaagttaaaatcattgcttggacttctaaaacatctgttgcttatgtaacaccaggagactcagaaacagcacccgtagttactgtgacccacagaaattattatgaacggatacatgccttaggtccgaactacaatctggtcattagcgatctgaggatggaagacgcaggagactacaaagcagacataaatacacaggctgatccctacaccaccaccaagcgctacaacctgcaaatctatcgtcggcttgggaaaccaaaaattacacagagtttaatggcatctgtgaacagcacctgtaatgtcacactgacatgctctgtagagaaagaagaaaagaatgtgacatacaattggagtcccctgggagaagagggtaatgtccttcaaatcttccagactcctgaggaccaagagctgacttacacgtgtacagcccagaaccctgtcagcaacaattctgactccatctctgcccggcagctctgtgcagacatcgcaatgggcttccgtactcaccacaccgggttgctgagcgtgctggctatgttctttctgcttgttctcattctgtcttcagtgtttttgttccgtttgttcaagagaagacaagatgctgcctcaaagaaaaccatatacacatatatcatggcttcaaggaacacccagccagcagagtccagaatctatgatgaaatcctgcagtccaaggtgcttccctccaaggaagagccagtgaacacagtttattccgaagtgcagtttgctgataagatggggaaagccagcacacaggacagtaaacctcctgggacttcaagctatgaaattgtgatctaggctgctgggctgaattctccctctggaaactgagttacaaccaccaatactggcaggttccctggatccagatcttctctgcccaactcttactgggagattgcaaactgccacatctcagcctgtaagcaaagcaggaaaccttctgctgggcatagcttgtgcctaaatggacaaatggatgcatacccttcctgaaatgactcccttctgaatgaatgacaaagcaggttacctagtatagttttcccaaacttcttcccatcatagcacatgtagaaaataatatttttatggcacactgggataaacaagcaagattgctcacttctggaagctgcatatgactagaggcctcttgtgactggaggtaacaaccctgcccagtaactgtgggagaaggggatcaatattttgcacacctgtaataggccatggcacaccagccaagatgctctgctcacagtcagtatgtgtgaagatccctggtgcgtggccttcaccacgcatcttgagcaaattaggaaaatgtacccttcgcttgaggcagatgcagcccttcccccgagtgcatggcttggagagcagaatgtgggctgcatataagcacactcatccctttgtctgggaatctttgtgcagggcataacaggcttagtaagtccaaacacagatgacagtgctgtgtgggtctctgtcagagttgtggctctcagccatgtagacacactctccaaatggagtgttggaaaatgttctttctgcagggtctagagactgctgggacacttttcttggagtgctacttcagaagccttataggattttctttctggccaagatttccttctgtatcactccaagcagcctcagcagaagaagcagccatgcccagtattcccactctccaaaaggaactgaccagcttatatttctcacacttctggggaactgggtataatccaaccatcaaaatagaagaccttgcaagaagcagagtcattctccagaaggaacttgggagatgatggtgcagatgatgaaactgggttcatcccagttccaaagactcagagaactagagtttaagctgaggcagagtgccgccaccctggcatgccccacaaacagatcaccagccagcttacacaggcattaactctcctcaatgaggaagaatcattcacaactgagcaagacattcatatgatcatttaaggaagtgtttcccttatgtgttagcaagtataatcggctaactcctaaatcccaatgaatagtcctaggctggacagcaatgggctgcaattaggcagataaagacatcagtcccagtaaatgaatccatagactcatctagcaccaactaccattagcactatgttaggagctgcaaggccccaaagtagaagatgtgcataatgtctgctcttgtgtagctcaggagacaattccagcacagacactacagttaacgctgaactgcagctgcaagtaatagcatgaacagtcagaaaaataccttatgagggggcagggctgaagctgggccttgaaggatggatgaaatttggatagagaatgaggaagacagagggcctccaagtgagagaagcatgaaaaatgagcaggggcctggatcagtggggtgtattcagagcacctctccagatgcaccatgcatgctcacagtcccttgcctatgtgtggcagagtgtcccagccagatgtgtgccctcaccccatgtccatttacatgtccttcaatgcccacctcaaaaggtacctcttctgtaaagctttccctggtatcaggaatcaaaattaatcagggatcttttcacactgctgttttttcctctttggtccttctatcactaaaactcatctcattcagccttacagcataactaattatttgttttcctcactacattgtacatgtgggaattacagataaacggaagccggctggggtggtggctcacgcctgtaatcccaacactttgggaggccaaggcaggcggatcacctgaggtcaggagttcgagattagtctggccaacatggtgaaaccccatctctactaaaaatacgaaattagccaggtgtggtggcacacatctgtagtcccagctactctggaggctgagacaggagaatcgcttgaacccaggaagtggaggttgcagtgagctgagatcacaccactgcactccagcctgggagagacagagtgagactccatctcgaaaaaaaaaaaaagatagaagccaataagcatggtgcaatcaaattctggcaagcattaaatatcaggatgcagctgggcacggtggctcacgcctgtaatcccagcactttgggaggccaaggtgggcggatcacttgaggtcaggaatttgagaggatcctggccagcatggcaaaaccccatctgtacttaaaatacaaaaaaattagctgggcgtggtggtgcacacctgtaatcccagctacttgggaggctgaggtgggagaattgcttgaacctgggaggtggaggttgcagtgagctgagatcctgccactgcactccaggctgggcaacagagtgagaccatgtctcaaaaaataaaaataaaataaaataatatcaggatgcatacatcagaggctgttcctagtgtaaaggcactttggagggagaagactttcagagttaggcagaccaactaagaggtcagctgaagcacctaaccagttgtaaggaggtgaaagacagcaccccaagaagagacgtgcaggaaggaggaaagaggcttggtcataaaggatggaggaattccaaagtgacactgaacaggctgcgtttatcctaaaataaaaccactcctcactctgtggatgcgttgaagactcattcccaaacatctttattctctaacttgccctcttcctcttcctaatatgctcactcaagtaaaattactagtgtcctaatgcccctatgcatattgtcaaaaataaaaatcagaagcaggttagatctgttaggtcttccagaagagcaaacctgggatgaagccagagcccaggaattctgaaggtagcctttggactcaggacaccctactcttgtctctcctctcagtttctctgctatgaatctcctgattcatgaacacgttatctgttcacccttctctctaggtcttagttcttagattttccttctgtaaaatgcatgtgatcttattttcccctccacaactttccagatgaactagactgtgaccaagaggtctataaaatcaaagcatcatggaacaggatcttgtatcagaccaaagtgtgccagtttttaaaaatgtgcatcaaaatggaagtctcagagacagagccctctggtggaaagttctagtaggttaggacagtcctgcctgcagacaccttgggctttactgagggactcaactgagaaaatgaggaatgttgcagctcatgattcttagaagaagaaagtgaagcttgtttaaaatatgatttaaaaaatctgtagaacactgtaaactacacaggctatgagggaatagcctggttgggccagcttggaaatcgggcacaggcaggaaggggcctgtctggtttgggccgtgtccacagagagcacttcttaggtcctgcctggagagaaggaatggctgggctatattttcttccagactcattatttttcttctgtttgacttttctctgaatttcccttgatttgtataaattttctcaataattagtgacagtgtctactgattgtaaaatgaagcttgaaggccaggcgcagtggctcatgcctgtaatcctagaattttgggaggccaaggtgggtggatcacaaggagttcgagaccagcctggccaaggttgtgaaaccgcgtctctactaaaaatacaaaaaaattagccgggcatggtggcacgtgcctgtagtcccagctactcaggaagctgaggcaacagaatcacttgaacctgggaggtggaggttgcagtgagccgagatcacgccactgcactccagcctgggcgagagagtgagactccgtctcaaaaaaaaaaaaaaaaaaaaaagtttgaagaacaaagacaataagaggaaatataatgagtggtcataaatgtgggctctgacagtagagtgcctgggtctgcatcctggtttcttagtcatgtgaccttaggcaagttactttaacctcgctgtacctcaggttgtccatctgtaaaatggggataataatagtgcctaccttttaaggttgatgtggggattaaatgaggtgttgctcatacaggaatgtgcctgtgcatggcaaagttcgggaaattttttataagctgttctaggcctgaaatcttcagaagatgctaatctaaattcatgaaataagcttcttacaacagaaatgctgctagtattatgcaaaattaatgttgtatatcaaacttttaactctcatccctccttattcagatatattttgttataagcaatgtttgttcccctcgttattataccacagtctacttacctgatgctatatctgcctccccagttagactgagagaacaggggatatacctaaataataataataataataataataataaataataatggagagctccttgaagatagggagcctgtaagaatcattgagggcttattttgtataccaactgctaaactagatgcttcatacattgttgtcaatactcatgacagccttgtaaagtagaaattaattcttccagttaacactaaggctgacatatgaataccttggcaaatctggaaagctgggaagacagtatttgaattcaagacttcttgtcaccaagggccatgcacttgtactctgccatgtggcccttttttacctcctgtggattctccctacctggtacttggccttaggtgtacacacacctggcactttgcttgacacataataggtggaccacaaatatctactaaatgaatatttgcatatagtaatattttaaggtactaaaagcagctcaaagtaaatatattaatatattaattccattgctatctggataaccactcaactttcctgctgaaaatgcccatttaattaaagaaggttggatagagctctctatatgcattttggacaggcaggggtttcaggtcataaacattctgatgagttaatataaaataagagaaactgtaaatttccactactaaaaatcacaaaaataacagaaacaaaagaagagataagaatttggggaattgtgctgaacaatttagtggttaaaaaaaacaactgtgcatgtttagacttaaataagcccccatccaagtgtgaggggtccagtaatttttcaaaacatatgaaagtgttaatacatttcgacaaaggaccattaaaaaagtcctgaattctgacttgagggaggaaagtaatgactaatacattctctagagacttgcagactttgggaattcataaaggaatggatgataattattaactgttgctggctgattgcccagacagttctcaacagccctgtacaagtctctgggtttgggatggatcaattctgagactggaaaatggccaaatctttgcaaatgagaaatatttttcttataagttcttattgtaggcaaataattacatagattattcatcagagaatttttaaatgctcataatctcaactctttcatttacaacttgtatttccaatagtttatgggtcatctctgcatagatgtcagaagtcacctcaagtttagcgtgtccaaaatctaactcacaggtctgtttctgacctcccaacttgctttccttgtgtttttcctatgctaatgatccaccataatcaaaataattaacatttatccagtgcctactatgtactattccctgtcctgttttacatttactcatttaaagtccataagaaacattaaatctcatctgccttctgaagaagatacaaccatgctctcttttacaaagtaggaaactgggtcacagaaaggtgaagtctttaaggctgaatcacagtagctcatcctagtaaatagaaaagccaggattcaactccaggggctgggtgcagaactgctattcttcactgcttcaccaatcagcagctacccaaggcagaaaactttttcatccttggctccttcattctccctgtcaccccagatcccctctacatctagtcagagaataggtcctgtcaattccaacttctctatatggctcctctcaggcatgtgcccttaattggcctaattctctaatacaccttccctctacatgctcactccctcagatcattgctttatcacgtgttacctgggttgctattacataaagagcaatctttctaaaatgaggatcttatcacttcacttccacactaaaatgtttttcctggggaaccacactccttagcaatctgacccatcagaccttccaggctgtctcctgcctgctccctaaggctccagccacacagaattatcatgggcccacacacccaccaaatcctcccatgcctttgcccatgttgtctgggatgcccttctctcccttctgtctacatcaagcatcagactgaatatccctcttgtgcggccttctaaaacctcccgtccaaagcgaaatatattgccctctatttatacttttacagcatttggcacacaagtacagagtagtagctttttatcacattctctgataattatatagatatggtatttcttagctctctctccaactggctaataagttgctttttgtctgagtgcctaattttgtgttttgtgtctgagtgcctcagttcctcaaaaaaaggttttttgattagttcattattcatttgaacatggaaattatgctcactagtggcaaatgccactaaccgtattccagaagctaggtgtcatgtttgcaataagatatattatcccttctacaagtcaccttttatttcaggcatttgtaaatgcccattaataaagtatggttcataaattttaccttgtaagtgcctaagaaatgagactacaagctccatttcagcaggacacaataaatattattttataatgca

SEQ ID NO: 141622 - protein, 693 aa, Artificial Sequence
  derived and/or modified sequence
MALCNGDSKLENAGGDLKDGHHHYEGAVVILDAGAQYGKVIDRRVRELFVQSEIFPLETPAFAIKEQGFRAIIISGGPNSVYAEDAPWFDPAIFTIGKPVLGICYGMQMMNKVFGGTVHKKSVREDGVFNISVDNTCSLFRGLQKEEVVLLTHGDSVDKVADGFKVVARSGNIVAGIANESKKLYGAQFHPEVGLTENGKVILKNFLYDIAGCSGTFTVQNRELECIREIKERVGTSKVLVLLSGGVDSTVCTALLNRALNQEQVIAVHIDNGFMRKRESQSVEEALKKLGIQVKVINAAHSFYNGTTTLPISDEDRTPRKRISKTLNMTTSPEEKRKIIGDTFVKIANEVIGEMNLKPEEVFLAQGTLRPDLIESASLVASGKAELIKTHHNDTELIRKLREEGKVIEPLKDFHKDEVRILGRELGLPEELVSRHPFPGPGLAIRVICAEEPYICKDFPETNNILKIVADFSASVKKPHTLLQRVKACTTEEDQEKLMQITSLHSLNAFLLPIKTVGVQGDCRSYSYVCGISSKDEPDWESLIFLARLIPRMCHNVNRVVYIFGPPVKEPPTDVTPTFLTTGVLSTLRQADFEAHNILRESGYAGKISQMPVILTPLHFDRDPLQKQPSCQRSVVIRTFITSDFMTGIPATPGNEIPVEVVLKMVTEIKKIPGISRIMYDLTSKPPGTTEWE

SEQ ID NO: 141623 - DNA, 2082 bp, Artificial Sequence
  derived and/or modified sequence
atggccctgtgcaacggagattcgaaactagaaaacgccgggggcgacctgaaagatggtcaccaccactacgaaggagcggtggtgatcctggatgccggtgcccagtatgggaaggtgatcgacaggcgcgtgcgcgagctcttcgtgcagtcagaaatctttcccctggaaacaccagcctttgccatcaaggaacaaggattccgggctatcatcatcagtggcgggcccaactccgtgtatgccgaagacgcgccctggtttgatccagccatatttacaattggcaagcccgtcctagggatctgttacgggatgcagatgatgaacaaggtctttggaggtaccgtgcacaagaagagcgtcagagaagacggggtttttaacatttctgtggacaacacctgcagtctattccgcggccttcagaaggaagaagtcgtgttgctgacccacggtgacagcgtggacaaagttgcagacggatttaaagtggttgctcgctccgggaacatagttgccggaatcgctaatgaaagcaaaaaactgtacggggctcagttccatccagaggtggggttaaccgaaaacggaaaggtcatcttgaagaatttcctatatgatatcgcgggctgtagtgggacttttacagttcagaatagggagctggaatgtatccgcgagatcaaggaacgggtcggaacatctaaggtgttggtgttgctctcagggggggtggactccaccgtctgtacggctctgctcaatcgcgcacttaaccaggaacaggtgatcgctgttcacattgataatgggttcatgcgcaagagggagagtcaatctgttgaggaagccctgaagaagctgggcattcaggtgaaggtgattaatgcagcacatagcttctataatggtactaccaccttgcccatttcagatgaggacagaaccccccgtaaacgaatttccaagacactcaacatgactaccagcccagaagagaagcggaagataattggggacacatttgtgaagatcgcgaacgaggtgatcggagagatgaatttaaagccggaagaggtgttcctagctcagggaaccctacgcccggacctcatcgaaagtgcctcactggtcgcttccggcaaagccgagctgataaagacacaccacaatgacactgagctgattcgtaagctccgagaagaaggaaaagtcatcgaacccttaaaagactttcacaaagatgaagttaggatcctagggcgggagctcggactgccagaggagttggtttcaaggcacccgtttcccgggcctggcctggccattagggtgatctgcgctgaggagccatacatatgcaaggacttcccggaaacaaacaacatcttgaaaattgtagcagatttttccgcgtccgtgaaaaagcctcacactttgctgcaacgcgttaaggcctgtacgacagaggaggaccaagagaagttaatgcagattacaagcctccactccctgaacgcttttctattgccaattaaaactgtgggagtgcaaggtgattgtagatcctactcctacgtttgcggcatttccagtaaagatgaacctgactgggaatctttaatattcttggccaggttaatcccaagaatgtgtcacaatgtgaatcgggtcgtgtatatctttggcccgcctgtgaaagaaccccccacagacgtgaccccaacatttttgacaacaggcgtactgagcactctgcgacaggccgattttgaggcccacaatatcctcagagagtccggctatgcaggtaagatttcacagatgccggtaattttaaccccactgcacttcgacagagatcccctgcagaagcagccatcctgccagcggtccgtagtgatcagaacttttattacatcagattttatgaccggaatacctgccacccccgggaacgagatcccagtggaggtagtactgaagatggtgactgagatcaaaaaaattcctggtatctccaggattatgtacgatctcactagcaagccgcccggcactactgaatgggagtag

SEQ ID NO: 141624 - DNA, 1929 bp, Artificial Sequence
  derived and/or modified sequence
atgctcgaagagacgctacgcatggccactaccacaattaaggaacaaggcttccgcgctatcattattagcggcggccctaatagcgtctatgctgaggacgccccttggttcgatcccgctattttcacaatcggtaagcctgtcctgggcatttgctatggaatgcaaatgatgaataaggtgttcgggggaacagtgcacaaaaagtctgtccgagaagacggtgtcttcaacatctcagtcgacaatacttgtagcctgttccgggggctccagaaggaagaagtggtactgctgactcacggagattctgtggacaaagtagcagatggctttaaggtcgtggctcggagcgggaacattgtagctggcatcgccaatgagagcaagaaactttatggtgctcagtttcacccagaggtggggttgacagagaacgggaaggtcattctgaagaacttcctctacgacattgctggctgctctggcaccttcaccgtccagaatcgcgagctggagtgcatcagggaaatcaaagagagggtgggaacctcaaaggtgctggtgctcctgagtggtggcgtggattctaccgtatgtacagccctgctgaacagagccctgaatcaggagcaggttatagctgtccatattgataacggcttcatgcgaaagagagagagtcagagcgttgaggaagccctgaagaaactcgggatccaggtgaaagtgataaatgctgcccatagtttctacaatggaacaacaacactgcccatcagcgatgaagaccgaaccccccggaagcgcatcagcaaaaccctgaacatgactacatctcccgaagagaagcggaagattatcggcgatacattcgtgaagattgcgaacgaggtcatcggcgagatgaatctcaagcccgaagaggtctttttggcccagggcaccttacgtcctgatctcatagagagcgcatctctcgtcgccagcgggaaagcagaactgatcaaaactcatcacaacgatactgaattgattaggaagttaagagaagagggaaaagtgatcgagcccctgaaggattttcacaaagacgaggttcgaattctcggcagagagctcggacttcccgaggaactcgtcagccgtcaccccttccctgggcccgggctagccattcgggtgatctgtgctgaagaaccgtacatctgtaaggacttccccgaaaccaataacatccttaagattgtggccgacttctcagcctcggtgaaaaagccacataccttgcttcagagagtcaaggcttgcactacggaggaagatcaggagaaactgatgcaaataactagccttcactcgctgaatgcttttctactccctattaagacagtgggtgttcaaggcgactgccgatcgtactcttacgtgtgcggtattagctcgaaggatgaaccagattgggagtcactcatctttttggcaagactgatcccccgcatgtgccataatgtgaatcgggtagtttatatatttggaccacctgtgaaggaaccacctaccgatgttacaccaacattcctgaccacaggtgtgctgtccacgttaaggcaggctgatttcgaagcccacaacatactgagggaaagcgggtacgcaggaaagatttcccagatgccagtgattttgacccccctacacttcgatcgcgaccctctccaaaaacagcctagttgtcagagatcagtcgtgataagaactttcatcacgagcgactttatgacaggtatcccggccaccccaggcaatgaaatccctgtggaggtcgtgttaaagatggtgactgaaatcaagaaaatccccggaatctcccggattatgtatgacctaacgagcaaacccccaggaaccaccgagtgggagtag

SEQ ID NO: 141625 - DNA, 2082 bp, Artificial Sequence
  derived and/or modified sequence
atggcgttgtgcaacggggactccaagcttgagaacgctggcggagaccttaaggacgggcaccatcactacgaaggcgcggtggtcatcctggatgccggcgcacagtacggcaaggtgatcgatagacgggtccgggagcttttcgtccagtctgagatcttcccgctagaaacaccagctttcgctatcaaggaacagggctttcgggccatcatcatctcaggtgggccaaacagtgtttatgcggaggacgccccatggttcgaccccgcaatttttaccataggaaagcctgttctgggcatctgctacgggatgcaaatgatgaataaggtcttcggtggcaccgtacataaaaaaagcgttcgtgaagatggagttttcaacatctctgtagacaacacctgttccctcttcaggggactgcagaaggaggaggtggtgctccttacacacggcgattcagtggacaaggttgccgacggcttcaaagttgtggccagatctggtaacatagtggcgggcatcgcaaatgaaagcaagaagctgtatggcgcacaattccatcccgaggttggtctcactgaaaacggaaaggtcattttgaaaaattttttatacgacatcgctggatgcagcggaaccttcacagtccagaatagagagcttgagtgcatcagggagatcaaggaacgggtggggacgagtaaggtgctggtgctgctttctggcggcgtcgattctaccgtctgcaccgcgctgctgaatcgggctctcaatcaggaacaggtgatagcagtccacatcgacaacgggttcatgcgcaagcgtgagagccagagcgtagaagaggccctgaaaaaactcggtatccaggtaaaggtcatcaacgccgcccacagcttttacaatggaacaacaacccttcctatttccgacgaagatcgaaccccccgaaaacggatatctaaaaccctgaacatgaccacctcgccggaagaaaagcgcaaaattattggagacacgttcgtcaaaatagccaacgaagtgattggcgaaatgaacctcaaaccagaagaggtgtttctagctcagggcacgctgcgccccgacctgatagagagtgctagcctggtcgcctctgggaaagccgagttgatcaaaacacaccataacgatacagagcttatccgcaagctgagggaggaggggaaggtaatagagccactcaaagacttccataaggacgaagtgcgtatcttgggacgggaattaggccttcccgaggagctggtgtcacgtcacccctttccaggtcccggcttggctatcagggtgatctgcgcagaggagccatacatctgcaaagatttccctgaaacaaataacatcctgaaaatagttgccgacttttccgccagtgtcaagaaaccgcacaccctgctgcagagagtgaaagcatgcacgactgaggaggatcaggagaaattgatgcagataacctccctgcactctctgaatgcctttcttttgccgattaagaccgttggtgtgcagggcgactgccgaagctatagctacgtatgtggtatttcctcaaaagacgagccagattgggagagcctcatcttcttagcaagactcatccctaggatgtgccacaatgtgaacagagtggtttatatctttgggcctcccgtaaaggaaccccctactgacgtcaccccaacttttctgaccactggtgtgctcagtaccctacggcaggctgactttgaggcgcacaacattttgcgagaaagcggctacgccggaaagatttctcagatgcccgtaatactgactccccttcacttcgaccgggaccctttgcaaaagcagccatcctgccagagaagcgtcgtcattcgcacgttcattacatctgacttcatgaccggtattcccgccactcccggaaacgaaatacctgtcgaagtggtgctgaaaatggtcaccgaaattaaaaaaatcccagggatttccagaataatgtacgatctgacttccaagcctcccggaactacagaatgggagtag

SEQ ID NO: 141626 - DNA, 5393 bp, Artificial Sequence
  derived and/or modified sequence
gagggccggccggtttggcggcggctgcggagggtatctgaggctcggctgccaagccgaacgggctctggctcctcccagtggccggccggggcggaagcaggaggcgggggcagcgtgcgcgctgctggtcttctctcccgcggcgctggggcccgcgctccgctgctgttgctccattcggcgcttttctggcggctggctcctctccgctgccggctgctcctcgaccaggcctccttctcaacctcagcccgcggcgccgacccttccggcaccctcccgccccgtctcgtactgtcgccgtcaccgccgcggctccggccctggccccgatggctctgtgcaacggagactccaagctggagaatgctggaggagaccttaaggatggccaccaccactatgaaggagctgttgtcattctggatgctggtgctcagtacgggaaagtcatagaccgaagagtgagggaactgttcgtgcagtctgaaattttccccttggaaacaccagcatttgctataaaggaacaaggattccgtgctattatcatctctggaggacctaattctgtgtatgctgaagatgctccctggtttgatccagcaatattcactattggcaagcctgttcttggaatttgctatggtatgcagatgatgaataaggtatttggaggtactgtgcacaaaaaaagtgtcagagaagatggagttttcaacattagtgtggataatacatgttcattattcaggggccttcagaaggaagaagttgttttgcttacacatggagatagtgtagacaaagtagctgatggattcaaggttgtggcacgttctggaaacatagtagcaggcatagcaaatgaatctaaaaagttatatggagcacagttccaccctgaagttggccttacagaaaatggaaaagtaatactgaagaatttcctttatgatatagctggatgcagtggaaccttcaccgtgcagaacagagaacttgagtgtattcgagagatcaaagagagagtaggcacgtcaaaagttttggttttactcagtggtggagtagactcaacagtttgtacagctttgctaaatcgtgctttgaaccaagaacaagtcattgctgtgcacattgataatggctttatgagaaaacgagaaagccagtctgttgaagaggccctcaaaaagcttggaattcaggtcaaagtgataaatgctgctcattctttctacaatggaacaacaaccctaccaatatcagatgaagatagaaccccacggaaaagaattagcaaaacgttaaatatgaccacaagtcctgaagagaaaagaaaaatcattggggatacttttgttaagattgccaatgaagtaattggagaaatgaacttgaaaccagaggaggttttccttgcccaaggtactttacggcctgatctaattgaaagtgcatcccttgttgcaagtggcaaagctgaactcatcaaaacccatcacaatgacacagagctcatcagaaagttgagagaggagggaaaagtaatagaacctctgaaagattttcataaagatgaagtgagaattttgggcagagaacttggacttccagaagagttagtttccaggcatccatttccaggtcctggcctggcaatcagagtaatatgtgctgaagaaccttatatttgtaaggactttcctgaaaccaacaatattttgaaaatagtagctgatttttctgcaagtgttaaaaagccacataccctattacagagagtcaaagcctgcacaacagaagaggatcaggagaagctgatgcaaattaccagtctgcattcactgaatgccttcttgctgccaattaaaactgtaggtgtgcagggtgactgtcgttcctacagttacgtgtgtggaatctccagtaaagatgaacctgactgggaatcacttatttttctggctaggcttatacctcgcatgtgtcacaacgttaacagagttgtttatatatttggcccaccagttaaagaacctcctacagatgttactcccactttcttgacaacaggggtgctcagtactttacgccaagctgattttgaggcccataacattctcagggagtctgggtatgctgggaaaatcagccagatgccggtgattttgacaccattacattttgatcgggacccacttcaaaagcagccttcatgccagagatctgtggttattcgaacctttattactagtgacttcatgactggtatacctgcaacacctggcaatgagatccctgtagaggtggtattaaagatggtcactgagattaagaagattcctggtatttctcgaattatgtatgacttaacatcaaagcccccaggaactactgagtgggagtaataaacttcttgttctattaaagtaccgtgtgcagtttaaattgattagaaatcattcccattattgacatgcagtactgtgaaaagagttactggagcagctacatcacatctgagttctccacagcaaaaatctacggcttaagagctgagttggggataaccaaaagggactgaagagtttgtacgggtaaataatcaaagcaccattgcctacactcagacagattgatactgcttttgcctttgcctcacttattctttatgtataaattcactgttgatgtctctgtgaatatgtatgaaggtgggtgaatttgggggtaattatgggcttctgtctccttaccagtttctaagaactgttagaaacgcccattatttaccagtgttacttactacttatatatactttttggagaatcagttttcttataagtaatcttatttctccaaagggtgaaaaagagatgaacatatcagataaaggtataggtgggctattccagccacttttgaaggacactgagggtataaaatgtaagctaccataagatggaaaagcaccaggaatttgttgatgtacttttgaattttatttcacagccttgggaggaagaaactatgagtggtctcagatgtctatgaatggtcttaaaatgttttcaaaccatgttccacatagatgccatgttattcaatgtcagcttgtttattagtaaggagctttatcctcctagccttatattaccagccccccacagccttgcatagaaagtttctgttatctccttagaagaaactggctcaatgacgtttctggtgtagtgcagatagaggtcaagaggagcattttcatctcttcttttgctggtcagagaaacggttctgagatcacagaagctatgatgcatacctacagcttacaaaagggagaggaaaaatgtttatatcatctagtaaacagttgtaaaatgagcttttaaatctaatctatagacatattattcattgctcagacacctgtgaacagtcttgatacatgcaagatgtttgccaaactttgtaatcctttctactagctataagagaggatttaagaactggtgtaggacttgttgccatcaccaccagtttctaacagatcttttataacattcacataagtactgtagacagtagtagacttaaactctccgtttctctcagtattttagctaagaatgttaccatatttttctcttaacaattccatctcaggttgctgctgcttgtctagtttaaaaggtcagatctattaatcaggaatgaaattttatttgggattcagtgttagacaaacaacaaaatgatgcgtggcagaagtcatctttttattctggctggtccagggaacaagaaaactgctgctggaccagcaagggaagagtttctgtctgtcttaacagaaatctgtccccaagacaaaggggtacttgactcctacaaaacttaaagggtacattctctatctgatgaggaggtactcattatggccttctggaaagaggctatgttagtgatctggtctttacagatttagagtcatgttatttgaaagctagaatagacaacctataaaatgcttaccaacatgtgtcagtacacgtttatgtttatatgaaaaaaaatttctagccacagtgtcttatgattttgtattgaagcaaacagtaggaattttggaaaaatagagagtaagaatgtgtgttctatggaacactgctccactgagaaggtccatgtaaaaaggattaggtggtcatataagtttggggaacataagctcacttgtcctttcctggagattcatggtatataatattcaaagctctgagaaattctgaagttaaaaacaattgttaaattctgcttaaattagtgttttcctgatatttgttttttgaacaccttttatataatcccttctaatatatacttagtatatacttaatataatattgggaaaattgttactccaaagcacatcttgacatgacatagtttcttaaaaatccaaattttctggaactcagaaatttcctaatatttagcacactgtcttcttttgcacagcactttttgctttgtgccatatagcattactctgtaccttcacagtatttcatctgagccactgaggaaagttaaaggttgcacttccattttacagttaagaaaacaagctcaccttaggcatggttacttaattaatttcagaattaaatttcaggtttccttagtccagattgtcctgatgtgtattctgacacctaaaattatataaacatttatgggatgcttattttactaagactagaatggtggctacctggctaataacattcatcattggttattctgggcatatcatgactttattcccgttgcttaccatctacctgggacacatctctctttgattaaatatattctttttctttgtactttttaggtagacagagaatgtagatcattgaaagcattatttattcctaagattggcaggcacagaatcatttttaagaaccaaatacccagtcctgccttaaaggccacatctatgatcatcagctctgttagaaataacagcctggcataattcctaaatacaagtctgtagatatatccaggagatagggttacactgttttctaaccttttttaaatcccttaatcttgaggtaaactgcatgcatttagtcaaacaagcatcataaaatttgtttcctcactgtttgggcttaacctcctgatagcctgttttactgaataacttgaccctaacctgtagagaataagagcattcaaattaggaaggcaggactatccatctttagtgcttttcctgccgttaaacaacaatgtgaacttggtcaagtcatttctgttctttatctgtgacatgaggtaactgtattaaattttcagcatcaaa

SEQ ID NO: 141627 - DNA, 2199 bp, Artificial Sequence
  derived and/or modified sequence
gtgcgcgctgctggtcttctctcccgcggcgctggggcccgcgctccgctgctgttgctccattcggcgcttttctggcggctggctcctctccgctgccggctgctcctcgaccaggcctccttctcaacctcagcccgcggcgccgacccttccggcaccctcccgccccgtctcgtactgtcgccgtcaccgccgcggctccggccctggccccgatggctctgtgcaacggagactccaagctggagaatgctggaggagaccttaaggatggccaccaccactataaaggaacaaggattccgtgctattatcatctctggaggacctaattctgtgtatgctgaagatgctccctggtttgatccagcaatattcactattggcaagcctgttcttggaatttgctatggtatgcagatgatgaataaggtatttggaggtactgtgcacaaaaaaagtgtcagagaagatggagttttcaacattagtgtggataatacatgttcattattcaggggccttcagaaggaagaagttgttttgcttacacatggagatagtgtagacaaagtagctgatggattcaaggttgtggcacgttctggaaacatagtagcaggcatagcaaatgaatctaaaaagttatatggagcacagttccaccctgaagttggccttacagaaaatggaaaagtaatactgaagaatttcctttatgatatagctggatgcagtggaaccttcaccgtgcagaacagagaacttgagtgtattcgagagatcaaagagagagtaggcacgtcaaaagttttggttttactcagtggtggagtagactcaacagtttgtacagctttgctaaatcgtgctttgaaccaagaacaagtcattgctgtgcacattgataatggctttatgagaaaacgagaaagccagtctgttgaagaggccctcaaaaagcttggaattcaggtcaaagtgataaatgctgctcattctttctacaatggaacaacaaccctaccaatatcagatgaagatagaaccccacggaaaagaattagcaaaacgttaaatatgaccacaagtcctgaagagaaaagaaaaatcattggggatacttttgttaagattgccaatgaagtaattggagaaatgaacttgaaaccagaggaggttttccttgcccaaggtactttacggcctgatctaattgaaagtgcatcccttgttgcaagtggcaaagctgaactcatcaaaacccatcacaatgacacagagctcatcagaaagttgagagaggagggaaaagtaatagaacctctgaaagattttcataaagatgaagtgagaattttgggcagagaacttggacttccagaagagttagtttccaggcatccatttccaggtcctggcctggcaatcagagtaatatgtgctgaagaaccttatatttgtaaggactttcctgaaaccaacaatattttgaaaatagtagctgatttttctgcaagtgttaaaaagccacataccctattacagagagtcaaagcctgcacaacagaagaggatcaggagaagctgatgcaaattaccagtctgcattcactgaatgccttcttgctgccaattaaaactgtaggtgtgcagggtgactgtcgttcctacagttacgtgtgtggaatctccagtaaagatgaacctgactgggaatcacttatttttctggctaggcttatacctcgcatgtgtcacaacgttaacagagttgtttatatatttggcccaccagttaaagaacctcctacagatgttactcccactttcttgacaacaggggtgctcagtactttacgccaagctgattttgaggcccataacattctcagggagtctgggtatgctgggaaaatcagccagatgccggtgattttgacaccattacattttgatcgggacccacttcaaaagcagccttcatgccagagatctgtggttattcgaacctttattactagtgacttcatgactggtatacctgcaacacctggcaatgagatccctgtagaggtggtattaaagatggtcactgagattaagaagattcctggtatttctcgaattatgtatgacttaacatcaaagcccccaggaactactgagtgggagtaataaacttcttgttctatt

SEQ ID NO: 141628 - DNA, 2229 bp, Artificial Sequence
  derived and/or modified sequence
tccattcggcgcttttctggcggctggctcctctccgctgccggctgctcctcgaccaggcctccttctcaacctcagcccgcggcgccgacccttccggcaccctcccgatggctctgtgcaacggagactccaagctggagaatgctggaggagaccttaaggatggccaccaccactatgaaggagctgttgtcattctggatgctggtgctcagtacgggaaagtcatagaccgaagagtgagggaactgttcgtgcagtctgaaattttccccttggaaacaccagcatttgctataaaggaacaaggattccgtgctattatcatctctggaggacctaattctgtgtatgctgaagatgctccctggtttgatccagcaatattcactattggcaagcctgttcttggaatttgctatggtatgcagatgatgaataaggtatttggaggtactgtgcacaaaaaaagtgtcagagaagatggagttttcaacattagtgtggataatacatgttcattattcaggggccttcagaaggaagaagttgttttgcttacacatggagatagtgtagacaaagtagctgatggattcaaggttgtggcacgttctggaaacatagtagcaggcatagcaaatgaatctaaaaagttatatggagcacagttccaccctgaagttggccttacagaaaatggaaaagtaatactgaagaatttcctttatgatatagctggatgcagtggaaccttcaccgtgcagaacagagaacttgagtgtattcgagagatcaaagagagagtaggcacgtcaaaagttttggttttactcagtggtggagtagactcaacagtttgtacagctttgctaaatcgtgctttgaaccaagaacaagtcattgctgtgcacattgataatggctttatgagaaaacgagaaagccagtctgttgaagaggccctcaaaaagcttggaattcaggtcaaagtgataaatgctgctcattctttctacaatggaacaacaaccctaccaatatcagatgaagatagaaccccacggaaaagaattagcaaaacgttaaatatgaccacaagtcctgaagagaaaagaaaaatcattggggatacttttgttaagattgccaatgaagtaattggagaaatgaacttgaaaccagaggaggttttccttgcccaaggtactttacggcctgatctaattgaaagtgcatcccttgttgcaagtggcaaagctgaactcatcaaaacccatcacaatgacacagagctcatcagaaagttgagagaggagggaaaagtaatagaacctctgaaagattttcataaagatgaagtgagaattttgggcagagaacttggacttccagaagagttagtttccaggcatccatttccaggtcctggcctggcaatcagagtaatatgtgctgaagaaccttatatttgtaaggactttcctgaaaccaacaatattttgaaaatagtagctgatttttctgcaagtgttaaaaagccacataccctattacagagagtcaaagcctgcacaacagaagaggatcaggagaagctgatgcaaattaccagtctgcattcactgaatgccttcttgctgccaattaaaactgtaggtgtgcagggtgactgtcgttcctacagttacgtgtgtggaatctccagtaaagatgaacctgactgggaatcacttatttttctggctaggcttatacctcgcatgtgtcacaacgttaacagagttgtttatatatttggcccaccagttaaagaacctcctacagatgttactcccactttcttgacaacaggggtgctcagtactttacgccaagctgattttgaggcccataacattctcagggagtctgggtatgctgggaaaatcagccagatgccggtgattttgacaccattacattttgatcgggacccacttcaaaagcagccttcatgccagagatctgtggttattcgaacctttattactagtgacttcatgactggtatacctgcaacacctggcaatgagatccctgtagaggtggtattaaagatggtcactgagattaagaagattcctggtatttctcgaattatgtatgacttaacatcaaagcccccaggaactactgagtgggagtaataaacttcttgttctattaaagtaccgtgtgcagttt

SEQ ID NO: 141629 - DNA, 2082 bp, Artificial Sequence
  derived and/or modified sequence
atggccctgtgcaatggagacagcaagctggagaatgccggcggggacctgaaggatggccaccaccactatgagggcgctgtggtgatcctggatgctggggcccagtatggcaaggtgattgacagaagagtgcgggagctgtttgtgcagagcgagatcttccccctggagaccccagcctttgccatcaaggagcagggcttccgggccatcatcatcagcggcggccccaacagcgtgtatgcagaagatgccccctggtttgatcctgccatcttcaccatcggcaagcctgtgctgggcatctgctacggcatgcagatgatgaacaaggtgtttggaggcaccgtgcacaagaagtctgtgagagaagatggagtcttcaacatctctgtggacaacacctgcagcctcttccggggcctgcagaaggaggaggtggtgctgctgacccatggagacagcgtggacaaggtggctgatggcttcaaggtggtggcccggagcggcaacatcgtggccggcatcgccaatgaaagcaagaagctgtatggagcccagttccaccctgaggtgggcctgacagaaaatggcaaggtgatcctgaagaacttcctgtatgacattgctggctgcagcggcaccttcaccgtgcagaaccgggagctggagtgcatccgggagatcaaggagcgggtgggcaccagcaaggtgctggtgctgctgagcggcggcgtggacagcacagtgtgcacagccctgctgaacagagccctgaaccaggagcaggtgattgctgtgcacatcgacaatggcttcatgaggaagcgggagagccagagcgtggaggaggccctgaagaagctgggcatccaggtgaaggtgatcaatgctgcccacagcttctacaacggcaccaccaccctgcccatcagtgatgaggacaggacccccaggaagaggatcagcaagaccctgaacatgaccaccagccctgaggagaagaggaagatcatcggggacacctttgtgaagatcgccaatgaagtcatcggggagatgaacctgaagccagaggaggtgttcctggcccagggcaccctgcggccagacctgattgagagcgccagcctggtggccagcggcaaggccgagctgatcaagacccaccacaatgacacagagctgatcaggaagctgcgggaggagggcaaggtgattgagcccctgaaggacttccacaaggatgaggtgcgcatcctgggccgggagctgggcctgcctgaggagctggtgagccgccaccccttccctggccctggcctggccatccgggtcatctgtgccgaggagccctacatctgcaaggacttccctgagaccaacaacatcctgaagatcgtggccgacttcagcgcctctgtgaagaagccccacaccctgctgcagagggtgaaggcctgcaccacagaggaggaccaggagaagctgatgcagatcaccagcctgcacagcctgaatgccttcctgctgcccatcaagacagtgggcgtgcagggcgactgccgcagctacagctatgtgtgtggcatcagcagcaaggatgagccagactgggagagcctcatcttcctggcccggctcatccccaggatgtgccacaacgtgaacagagtggtgtacatcttcggcccccctgtgaaggagcccccaacagatgtgacccccaccttcctgaccaccggggtgctgagcaccctgcggcaggccgactttgaggcccacaacatcctgcgggagagcggctacgccggcaagatcagccagatgcctgtgatcctgacccccctgcactttgaccgggaccccctgcagaagcagcccagctgccagaggtctgtggtgatccgcaccttcatcaccagtgacttcatgacaggcatcccagccaccccaggaaatgagatccctgtggaggtggtgctgaagatggtgacagagatcaagaagatccctggcatcagccgcatcatgtatgacctgaccagcaagcccccaggcaccacagagtgggagtag

SEQ ID NO: 141630 - DNA, 1929 bp, Artificial Sequence
  derived and/or modified sequence
atgctggaggagaccctgaggatggccaccaccaccatcaaggagcagggcttccgggccatcatcatcagcggcggccccaacagcgtgtatgcagaagatgccccctggtttgatcctgccatcttcaccatcggcaagcctgtgctgggcatctgctacggcatgcagatgatgaacaaggtgtttggaggcaccgtgcacaagaagtctgtgcgggaggatggagtcttcaacatctctgtggacaacacctgcagcctcttccggggcctgcagaaggaggaggtggtgctgctgacccacggggacagcgtggacaaggtggctgatggcttcaaggtggtggcccggagcggcaacatcgtggccggcatcgccaatgaaagcaagaagctgtatggagcccagttccaccctgaggtgggcctgacagaaaatggcaaggtgatcctgaagaacttcctgtatgacattgctggctgcagcggcaccttcaccgtgcagaaccgggagctggagtgcatccgggagatcaaggagcgggtgggcaccagcaaggtgctggtgctgctgtctggaggagtggacagcacagtgtgcacagccctgctgaacagagccctgaaccaggagcaggtgattgctgtgcacatcgacaatggcttcatgaggaagcgggagagccagagcgtggaggaggccctgaagaagctgggcatccaggtgaaggtgatcaatgctgcccacagcttctacaacggcaccaccaccctgcccatcagtgatgaggacaggacccccaggaagaggatcagcaagaccctgaacatgaccaccagccctgaggagaagaggaagatcattggagacacctttgtgaagatcgccaatgaggtgattggagagatgaacctgaagccagaggaggtgttcctggcccagggcaccctgcggccagacctgattgaaagtgccagcctggtggccagcggcaaggccgagctgatcaagacccaccacaatgacacagagctgatcaggaagctgcgggaggagggcaaggtgattgagcccctgaaggacttccacaaggatgaggtgcgcatcctgggccgggagctgggcctgcctgaggagctggtgagccgccaccccttccctggccctggcctggccatccgggtcatctgtgccgaggagccctacatctgcaaggacttccctgagaccaacaacatcctgaagatcgtggccgacttcagcgcctctgtgaagaagccccacaccctgctgcagagggtgaaggcctgcaccacagaggaggaccaggagaagctgatgcagatcaccagcctgcacagcctgaatgccttcctgctgcccatcaagacagtgggcgtgcagggcgactgccgcagctacagctatgtgtgtggcatcagcagcaaggatgagccagactgggagagcctcatcttcctggcccggctcatccccaggatgtgccacaacgtgaacagagtggtgtacatctttggacctcctgtgaaggagcccccaacagatgtgacccccaccttcctgaccactggagtgctgagcaccctgcggcaggccgactttgaggcccacaacatcctgcgggagagcggctacgccggcaagatcagccagatgcctgtgatcctgacccccctgcactttgaccgggaccccctgcagaagcagcccagctgccagaggtctgtggtgatccgcaccttcatcaccagtgacttcatgacaggcatcccagccaccccaggaaatgagatccctgtggaggtggtgctgaagatggtgacagagatcaagaagatccctggcatcagccgcatcatgtatgacctgaccagcaagcccccaggcaccacagagtgggagtag

SEQ ID NO: 141631 - DNA, 2082 bp, Artificial Sequence
  derived and/or modified sequence
atggccctgtgcaacggcgacagcaagctggagaacgccggcggcgatctgaaagatggccaccaccactacgaaggcgctgttgttatcctggacgccggcgctcagtacggtaaagtgatcgataggcgggtgagagaactgtttgtgcaaagcgaaatttttccgttggagaccccagcctttgccatcaaggagcagggcttccgtgccatcatcatttccggcggtcctaactccgtctatgcagaggacgcgccctggttcgacccggccatttttactattggtaagcccgtgttgggcatctgttacggaatgcagatgatgaataaggtttttggaggcacagtccataagaagtctgtccgagaagatggcgtgtttaatatcagcgtcgacaacacttgctcactcttcagagggctgcaaaaagaagaggtggtgctgctgacgcatggcgatagtgtggacaaggtagcagacggatttaaggtggtcgcacgctctgggaacatagtggctggtatagcaaatgagtcaaaaaaattatacggagctcagtttcacccagaagtgggtctcaccgaaaacggtaaagtgatattaaagaactttctctacgatattgccgggtgctctggaaccttcaccgtgcagaaccgagagctcgagtgtattcgcgaaattaaggagagggtgggaactagcaaggtgctagtgctcttgtctgggggggtggattctactgtctgtacagccctactgaaccgggcccttaatcaagaacaggttattgctgttcacattgacaatggctttatgcgtaaacgggagtcccagagcgtggaggaggctctaaagaaactgggcattcaggtgaaggtcattaatgccgcacacagcttctataacggcaccacaactctgcctatctccgacgaggaccgtacccccagaaagcggatctctaagactctgaatatgaccacttctcctgaggaaaagagaaagatcatcggagatacctttgtgaaaattgccaatgaagtgattggcgaaatgaatttaaagcctgaggaggtctttctggctcagggaacattgcggcctgacctgattgagagcgccagcttagtcgcctccggaaaagcagagctaattaagacacaccataacgatacagaactgatacgaaaactccgagaagagggtaaggttatcgagcccctcaaggactttcataaagatgaggttaggattctcggaagggagctgggcctcccagaagagttggtatcccggcatcccttccccggcccaggactcgctataagagttatttgtgctgaagaaccttacatatgcaaggacttccccgagaccaataatatcctaaagattgtcgcagattttagcgcctccgtgaagaagcctcatactttattacaacgcgttaaggcttgcactaccgaggaagatcaggaaaaacttatgcagatcactagcttgcattccctgaacgctttcctcctgccaataaaaactgtgggcgtgcagggagactgcagatcctacagctacgtatgcggaatctctagcaaagatgagcccgattgggagagcctcatctttctcgctcggctgataccacgtatgtgccacaatgtgaacagggtggtgtatattttcggtccccccgtgaaagaaccccctaccgatgttaccccgacttttctgaccacaggtgtgttatcgacactgcggcaggcagactttgaagcccacaatattctgcgtgaaagcggttacgccggtaagatctcccagatgcccgtgatattaaccccactgcacttcgaccgggatccattgcagaagcagccgagctgccaacgctctgtggtaatacggaccttcatcacttccgactttatgaccggtattccagctaccccgggaaatgaaattcctgtagaggtcgtacttaaaatggtgaccgaaatcaagaagatcccaggcatcagccgcataatgtatgacctcacctctaaacctcccggcactactgagtgggaatag

SEQ ID NO: 141632 - DNA, 1929 bp, Artificial Sequence
  derived and/or modified sequence
atgctggaggagaccctgcggatggccaccaccaccatcaaggagcagggattccgtgccatcataatttctggaggcccaaatagcgtgtatgcggaggacgccccttggtttgaccctgctatcttcaccatagggaaaccagtgctgggcatctgctacggcatgcagatgatgaacaaggtgttcggtggtacagtacataagaagagcgttcgcgaggatggagttttcaacattagcgtggacaatacatgcagtctgtttaggggactacagaaagaggaagtggtcctgctgacacatggtgacagcgtcgacaaggtggctgacggtttcaaagttgtcgcccgtagtggaaacatcgtcgctggaatcgcaaatgaaagtaagaagctgtacggagcccagtttcacccggaagtgggacttactgagaacggaaaggtaatcctcaaaaattttctctacgacattgccgggtgctccggcacctttaccgtccagaatagagagttggagtgcatcagggagatcaaggaacgggttggcacctctaaggttctggtgctgcttagtggaggcgtggacagcaccgtgtgtacagccttacttaatcgggccctcaatcaggagcaagtcattgcagttcacatagacaatggctttatgagaaaaagggaatcgcagtctgtcgaggaagcactgaaaaaactgggaattcaggttaaagtcatcaatgctgcccatagcttctataacggaactaccactcttcccattagtgacgaggatagaacccctcggaagcggatctctaaaaccctcaatatgaccacttcaccggaggaaaaacgcaagatcatcggcgacacatttgtgaagattgcaaacgaagtcataggcgagatgaatctgaagccagaggaagtcttccttgcacagggtaccctccgacctgacctcatcgaatcagcctccctggttgcgtctggcaaagccgaactgattaaaactcatcacaacgacactgagctgatacgcaaactgcgggaggaaggcaaagttatcgagcctctgaaagattttcataaggatgaagttcggatactgggccgcgaactgggcctgccagaggaactagtatcaagacaccccttcccgggcccaggattggcaatacgtgtgatctgcgctgaggagccttacatctgcaaagacttcccagagacaaataatattctgaaaattgtggcagattttagcgctagtgtgaaaaagccgcacactctgctacagcgggtgaaggcatgcaccaccgaggaagatcaggagaaactgatgcagattacatccctgcactcgctcaacgccttcctactgcccataaaaactgtgggtgtgcagggtgattgtcgaagctactcctacgtgtgcggcatttcatctaaagatgagcccgactgggagagtctaatctttctggccagactgatccctagaatgtgtcataatgtaaaccgcgtcgtgtacatcttcgggccacccgtaaaggagccacctaccgacgttactcctactttcctcactacaggcgttctgagcacgctacggcaggctgactttgaagcccacaacatactcagggagagcggctacgccggcaagatcagtcaaatgcccgtaattctgacgcctcttcacttcgatcgggatcccttacaaaagcaaccatcttgccagcgctcagtggtgatccggacattcataacatccgactttatgaccggaatccctgccacccctggcaacgagatcccggtcgaggtggttctgaagatggtgactgaaattaagaaaattccaggtatctctagaatcatgtatgatctgacatctaagccaccagggaccactgagtgggagtag

SEQ ID NO: 141633 - DNA, 2082 bp, Artificial Sequence
  derived and/or modified sequence
atggccctgtgcaacggcgacagcaagctggagaacgccggcggcgatctcaaggatggacaccatcattacgaaggcgccgtggtcatactagatgcgggggcccagtacggcaaggtgattgaccggcgggttagggagctgttcgtccaatccgagatttttcctctggagacaccagcgtttgcgatcaaggagcagggatttcgcgccatcataatctctggaggacccaatagtgtctacgctgaagatgccccatggttcgacccagctatctttaccatcgggaagcctgtgctaggtatctgttatggtatgcagatgatgaacaaggtgtttggcggcaccgttcataagaagtctgtacgcgaggacggtgtttttaacatcagcgtcgataacacctgcagcttatttaggggcttacagaaagaagaggtagtgttactgacacacggcgattccgttgacaaagttgcagacggctttaaggtggtggcccgttctggtaacattgtggccgggatcgccaatgagagtaaaaaattatacggcgcccaattccatcctgaagtaggtttgaccgagaatggcaaagtcattttgaagaactttttatatgacatcgcaggatgttcaggtaccttcaccgtgcagaatagagagctggagtgcattagggagattaaagaacgagtaggcacttccaaagtattggtgttgctctcaggcggagttgatagcactgtatgtactgccctgttgaatcgggcccttaaccaggaacaggtcatagcggtgcacatcgataacggtttcatgaggaagcgggaaagtcaaagtgtagaggaggccttaaaaaagctgggcatccaggtcaaggtcatcaacgcggcacactctttttataacgggaccacaacgttacctatatctgacgaggacagaactccaagaaagcgtatctccaaaaccctgaacatgactacctccccagaagagaaaaggaagatcatcggcgacaccttcgtgaagatcgccaacgaggtgattggtgagatgaacttaaaacccgaagaggtctttttggcccagggcaccttgagacccgacctcatcgaatccgcttctctggtcgcttccggaaaggcggagctgataaaaacgcaccacaatgatactgaactgatccggaagctgagagaggaaggaaaagtgattgagcccctgaaagatttccacaaggacgaggttcgcattttgggccgggagttaggactgcccgaagagctagtctcgagacacccctttcccggccctgggttggctatccgcgtgatatgtgccgaggaaccttatatctgcaaagacttcccagagaccaataacattctgaaaatcgtggctgacttttccgccagtgtgaaaaaacctcacactctcctccagagggttaaagcctgcacaaccgaggaggaccaggagaagctcatgcagattacctctctgcactccctcaacgccttcctattgcccataaagaccgtgggagttcagggggactgtagaagttattcttatgtctgtggcatatcttccaaggatgagcccgactgggaaagtctcatctttctggcaagactcatacccagaatgtgtcataatgttaaccgcgtggtctatatctttggcccccccgttaaggaaccgcctaccgacgttacacctactttcctgaccactggcgtactgagtactctgcgtcaggcagactttgaagcccataatattctgagagagtcaggatacgctggtaagatatctcaaatgccggttatcctgacgccactgcacttcgatcgagatccgttacagaaacaaccttcctgtcagagatccgtggtgattagaacattcataacaagtgatttcatgacaggcattccagctacccctggaaacgaaatccctgtcgaggtggtgttgaaaatggtgaccgagattaagaagataccaggtatcagtaggataatgtacgatttaacctctaaaccacccggtaccaccgagtgggaatag

SEQ ID NO: 141634 - DNA, 2082 bp, Artificial Sequence
  derived and/or modified sequence
atggcattgtgtaacggtgactccaagctcgaaaatgcaggcggagatctgaaggacggacatcaccactacgaaggggcagtggtgatcttggacgctggtgcacagtacggcaaagtcattgacaggagagtccgcgagctgttcgtccagagcgaaatctttcctctggagactcccgcatttgcaatcaaggaacaggggttccgagctattatcatttccggcggacccaactcggtctacgctgaagatgccccttggttcgaccctgccatcttcaccattggtaaacccgtcctgggtatctgttatggtatgcagatgatgaacaaagtgtttgggggtacagtccacaagaaaagcgtgagggaagacggcgtgtttaatattagcgttgataatacatgttctctctttcgcggactccagaaggaggaggtggtgctgttaactcatggcgactctgtcgacaaagtggctgacggattcaaggtggtggcgagatccggcaatattgtggctggaatcgcaaacgaatctaaaaaactttacggagcccagtttcaccccgaagtaggactgaccgagaacggcaaggtgatcctgaagaattttctttatgacatagcaggttgttccggcacattcacggtgcagaacagggaattagagtgcatccgcgaaatcaaggaaagggttgggacctccaaggtgttagtgttattgtcagggggagtcgattccaccgtttgcacagcccttctgaaccgggctttgaatcaagagcaggtcatcgcagtgcacatcgacaacggcttcatgagaaaaagagaatcccaatcagttgaagaggcgttgaagaaactcggcatccaggtgaaggtgatcaacgccgctcactctttctacaacggcactacaacactccctatttcagacgaggatcgtacaccaagaaaacggatttcaaagaccctgaacatgactactagccccgaggagaaaagaaaaataatcggcgataccttcgtgaagatcgccaatgaagtgattggagagatgaacctaaaaccagaggaagtattcctcgctcagggcaccctgcgcccagaccttattgaaagtgcatctctggtggccagcggcaaggctgaactgatcaagacccaccacaatgatacagagctgatccgtaaactgcgggaggagggaaaagtgatcgaaccactgaaggattttcacaaagacgaggttcgcatactaggaagggagctcggactccctgaagaactggtctctaggcacccgtttcccggaccaggtctggcaatccgagtaatctgcgcggaggagccttatatatgcaaagatttccctgaaactaataacatattgaaaatagttgcggactttagtgcatccgtcaaaaaaccacatacactgctgcagcgggtgaaggcatgcacaacagaagaagatcaggagaagctgatgcagattacatcgctacatagcctaaacgcctttctcctgccaatcaagactgtgggtgtccagggggactgtcgaagctacagttacgtgtgcgggatcagctccaaggatgaacctgactgggagtcattgatttttctggccagactgataccgcgaatgtgtcacaatgtgaacagagtagtatacatcttcggacctccagtgaaagagccacccaccgatgtgaccccgacattcctaacgacaggagtgctgtccacactcaggcaagccgattttgaggcccacaacattctacgggaatccggctatgcagggaagattagccagatgcctgtgattctgaccccactccatttcgatcgagatcccctgcaaaaacagccgtcctgccagcgttctgtagtgatccgcacattcatcacaagcgactttatgactgggatacctgcaacgcctggtaacgagatacctgtggaagtggtgctgaaaatggtaaccgaaataaaaaagattcccggaatcagccggattatgtatgaccttaccagcaagcctcctggcactaccgagtgggaatag

SEQ ID NO: 141635 - DNA, 1929 bp, Artificial Sequence
  derived and/or modified sequence
atgcttgaagaaactctgagaatggccactactaccattaaagagcaagggttcagagctattataatttccgggggacctaactctgtctatgccgaggatgccccttggtttgacccagccatatttaccatcggaaaaccagtgctgggcatctgttacggcatgcaaatgatgaacaaagtgttcggcggtaccgtgcataagaagtccgtacgtgaagatggcgttttcaacatcagtgtcgataatacatgtagcctgtttagaggtctacaaaaggaggaggtggtgcttttaacacacggtgacagtgtcgacaaggtcgcagatggtttcaaggtggtggctcgaagtggaaatattgtcgccggtatagccaacgagagcaaaaagctgtacggagctcagtttcatcctgaagtcggccttaccgagaatgggaaagtgatactaaagaatttcctgtacgatattgcaggctgctccggaactttcacagtgcaaaacagagaactggaatgcataagggagatcaaggagagggtgggtacaagcaaagtgctggttctactgtcagggggtgtcgatagcaccgtgtgtacagccctacttaacagggcgctgaatcaagaacaggtgatcgcagttcacatagacaacggattcatgcggaagcgcgaatcgcagagtgtggaagaagcattgaaaaagctgggcatccaagtgaaggttatcaacgcagcacacagcttctataatgggacaactacactgccaatctccgacgaggacagaacccctcgcaaacgcatcagcaagacccttaatatgaccacttcaccagaagaaaagaggaaaattatcggagacaccttcgtgaagatcgctaatgaggtgatcggcgagatgaacctgaaaccggaagaggtgtttctggctcaaggaactctcaggcccgacctgattgagtctgccagtctggttgcttcagggaaagccgaactcattaaaacccaccataatgataccgagctcatacgcaaactacgggaggaaggtaaggtgattgagcctctgaaggattttcataaggatgaggttaggatcttaggcagggaactcggtttaccggaggagctggtgtcccgccatcccttcccgggtccgggtctagctatccgggtcatctgcgccgaagaaccgtatatctgcaaggatttccccgaaactaacaacatactgaaaatcgtagcagacttctcagctagtgtgaagaagccacacacgcttctccagcgcgtgaaagcctgcacaacagaggaggaccaagaaaagctaatgcagattaccagtcttcactcactgaacgcatttttactccctatcaagacggtgggggttcaaggagattgtaggagctattcatatgtctgcgggatctcatccaaggacgagcctgactgggagtctttaatcttcctggccaggcttattcctcgtatgtgccataacgtaaatagagttgtatatatattcgggcctcccgtgaaagaaccacccacggatgtgacccccacctttctcactacaggcgtcctgagcaccttgcgccaagccgatttcgaggctcacaacattctgcgagagagcggctacgctggtaagatctcccagatgcctgtgatccttacccccctccatttcgaccgcgaccccctccagaagcaaccaagttgtcagagatctgttgtgattcgcactttcatcacaagtgactttatgacgggaattccggctacaccaggaaacgagatccccgtggaagtagttctgaaaatggttacggagatcaagaagattcccggaattagccggatcatgtacgacttaactagcaaaccgcctggaacaacggagtgggaatag

SEQ ID NO: 141636 - DNA, 2082 bp, Artificial Sequence
  derived and/or modified sequence
atggcgctctgtaatggtgatagcaagctggagaacgcaggaggagacttgaaagacggacaccatcactacgagggagctgtcgtgatccttgacgccggagcccagtatggcaaagttattgatagaagggtgcgggagctattcgtgcaaagtgagatcttcccactggagactcccgcttttgcaatcaaagagcagggctttcgagctattatcatttcaggaggccctaattccgtctacgccgaggatgccccttggtttgatccagcaatctttactatcggcaagcccgtcctgggtatctgttacggaatgcaaatgatgaataaggtcttcggagggactgtccacaagaagtcagtgagagaagatggagtcttcaacatctcagttgataatacatgcagcctgttccgcggacttcagaaagaggaggtcgtattgttgacccatggggattctgtcgataaagtggccgatgggtttaaagtggtcgccaggagtggcaatatagttgcaggtattgccaacgagagcaaaaagctgtacggcgctcaattccatccagaggttggtctgactgagaacggcaaggtcattctgaaaaactttttgtatgacatcgctgggtgctccggcacctttacagtacaaaatagagaactcgaatgcatccgcgagatcaaggaacgggtggggacaagcaaagtcctggttctcttatcaggtggggtagacagcacagtctgtactgcactactgaaccgcgctctcaaccaggagcaggtaatcgccgtgcatatcgataacggtttcatgcgaaagagggagtcccagtctgtggaagaggcattgaagaaattaggtatccaggttaaggtcataaatgctgctcacagcttttataacggcaccactacgttgccgataagcgatgaagatcggacaccccgaaagcgaatttccaagacattgaatatgacaacatcacccgaggaaaaaagaaaaatcataggggacactttcgtcaagatcgccaatgaagtcattggagaaatgaacctcaagccagaggaagtcttccttgcccagggtaccctccgcccagacctcatcgaaagcgcgagcctggtggcatcaggcaaggcagagctgattaaaacccaccacaatgacaccgaactgattcggaagctcagagaggagggtaaagttatagagcctctgaaggacttccataaggacgaggtccggattctgggcagagaactcggacttccagaggagctggtgagccgacaccccttccctgggcctggtcttgccatacgcgtcatctgtgcagaagaaccctatatctgtaaggacttccctgagaccaataatattctcaagattgtggccgatttcagtgctagcgtaaagaagccacacactctcttacagcgcgtcaaggcatgcactaccgaagaggatcaagaaaagctgatgcagataacatctttacacagcctcaacgcctttcttctccctataaagaccgtaggcgtccagggcgactgcaggtcttattcttatgtctgcggcattagtagtaaggacgagccggattgggagtcactgatcttcctcgcgaggctaatccccaggatgtgccacaacgtaaacagagtggtgtacatcttcggacctcccgtgaaggagccccctactgacgtgacgcctactttccttactacaggagtcctgtctacccttagacaggcagattttgaggctcataacatcctgcgggagtctgggtacgccggaaagattagccagatgcccgtgattctgacacccttacacttcgatcgtgatccactccagaagcagccgtcatgccaaaggtcagtcgtgatcagaacttttattacaagcgacttcatgacagggatcccagccacacctggcaacgagataccagtagaggtagtgctgaagatggtcacagagatcaagaaaatcccagggatcagcagaattatgtacgatctcacctcgaaaccccctggtacaactgagtgggagtag

SEQ ID NO: 141637 - DNA, 2082 bp, Artificial Sequence
  derived and/or modified sequence
atggccctgtgcaacggcgacagcaagctggagaacgccggcggcgacctgaaggacggccaccaccactacgagggcgccgtggtgatcctggacgccggcgcccagtacggcaaggtgatcgacagaagagtgagagagctgttcgtgcagagcgagatcttccccctggagacccccgccttcgccatcaaggagcagggcttcagagccatcatcatcagcggcggccccaacagcgtgtacgccgaggacgccccctggttcgaccccgccatcttcaccatcggcaagcccgtgctgggcatctgctacggcatgcagatgatgaacaaggtgttcggcggcaccgtgcacaagaagagcgtgagagaggacggcgtgttcaacatcagcgtggacaacacctgcagcctgttcagaggcctgcagaaggaggaggtggtgctgctgacccacggcgacagcgtggacaaggtggccgacggcttcaaggtggtggccagaagcggcaacatcgtggccggcatcgccaacgagagcaagaagctgtacggcgcccagttccaccccgaggtgggcctgaccgagaacggcaaggtgatcctgaagaacttcctgtacgacatcgccggctgcagcggcaccttcaccgtgcagaacagagagctggagtgcatcagagagatcaaggagagagtgggcaccagcaaggtgctggtgctgctgagcggcggcgtggacagcaccgtgtgcaccgccctgctgaacagagccctgaaccaggagcaggtgatcgccgtgcacatcgacaacggcttcatgagaaagagagagagccagagcgtggaggaggccctgaagaagctgggcatccaggtgaaggtgatcaacgccgcccacagcttctacaacggcaccaccaccctgcccatcagcgacgaggacagaacccccagaaagagaatcagcaagaccctgaacatgaccaccagccccgaggagaagagaaagatcatcggcgacaccttcgtgaagatcgccaacgaggtgatcggcgagatgaacctgaagcccgaggaggtgttcctggcccagggcaccctgagacccgacctgatcgagagcgccagcctggtggccagcggcaaggccgagctgatcaagacccaccacaacgacaccgagctgatcagaaagctgagagaggagggcaaggtgatcgagcccctgaaggacttccacaaggacgaggtgagaatcctgggcagagagctgggcctgcccgaggagctggtgagcagacaccccttccccggccccggcctggccatcagagtgatctgcgccgaggagccctacatctgcaaggacttccccgagaccaacaacatcctgaagatcgtggccgacttcagcgccagcgtgaagaagccccacaccctgctgcagagagtgaaggcctgcaccaccgaggaggaccaggagaagctgatgcagatcaccagcctgcacagcctgaacgccttcctgctgcccatcaagaccgtgggcgtgcagggcgactgcagaagctacagctacgtgtgcggcatcagcagcaaggacgagcccgactgggagagcctgatcttcctggccagactgatccccagaatgtgccacaacgtgaacagagtggtgtacatcttcggcccccccgtgaaggagccccccaccgacgtgacccccaccttcctgaccaccggcgtgctgagcaccctgagacaggccgacttcgaggcccacaacatcctgagagagagcggctacgccggcaagatcagccagatgcccgtgatcctgacccccctgcacttcgacagagaccccctgcagaagcagcccagctgccagagaagcgtggtgatcagaaccttcatcaccagcgacttcatgaccggcatccccgccacccccggcaacgagatccccgtggaggtggtgctgaagatggtgaccgagatcaagaagatccccggcatcagcagaatcatgtacgacctgaccagcaagccccccggcaccaccgagtgggagtag

SEQ ID NO: 141638 - DNA, 1929 bp, Artificial Sequence
  derived and/or modified sequence
atgctggaggagaccctgagaatggccaccaccaccatcaaggagcagggcttcagagccatcatcatcagcggcggccccaacagcgtgtacgccgaggacgccccctggttcgaccccgccatcttcaccatcggcaagcccgtgctgggcatctgctacggcatgcagatgatgaacaaggtgttcggcggcaccgtgcacaagaagagcgtgagagaggacggcgtgttcaacatcagcgtggacaacacctgcagcctgttcagaggcctgcagaaggaggaggtggtgctgctgacccacggcgacagcgtggacaaggtggccgacggcttcaaggtggtggccagaagcggcaacatcgtggccggcatcgccaacgagagcaagaagctgtacggcgcccagttccaccccgaggtgggcctgaccgagaacggcaaggtgatcctgaagaacttcctgtacgacatcgccggctgcagcggcaccttcaccgtgcagaacagagagctggagtgcatcagagagatcaaggagagagtgggcaccagcaaggtgctggtgctgctgagcggcggcgtggacagcaccgtgtgcaccgccctgctgaacagagccctgaaccaggagcaggtgatcgccgtgcacatcgacaacggcttcatgagaaagagagagagccagagcgtggaggaggccctgaagaagctgggcatccaggtgaaggtgatcaacgccgcccacagcttctacaacggcaccaccaccctgcccatcagcgacgaggacagaacccccagaaagagaatcagcaagaccctgaacatgaccaccagccccgaggagaagagaaagatcatcggcgacaccttcgtgaagatcgccaacgaggtgatcggcgagatgaacctgaagcccgaggaggtgttcctggcccagggcaccctgagacccgacctgatcgagagcgccagcctggtggccagcggcaaggccgagctgatcaagacccaccacaacgacaccgagctgatcagaaagctgagagaggagggcaaggtgatcgagcccctgaaggacttccacaaggacgaggtgagaatcctgggcagagagctgggcctgcccgaggagctggtgagcagacaccccttccccggccccggcctggccatcagagtgatctgcgccgaggagccctacatctgcaaggacttccccgagaccaacaacatcctgaagatcgtggccgacttcagcgccagcgtgaagaagccccacaccctgctgcagagagtgaaggcctgcaccaccgaggaggaccaggagaagctgatgcagatcaccagcctgcacagcctgaacgccttcctgctgcccatcaagaccgtgggcgtgcagggcgactgcagaagctacagctacgtgtgcggcatcagcagcaaggacgagcccgactgggagagcctgatcttcctggccagactgatccccagaatgtgccacaacgtgaacagagtggtgtacatcttcggcccccccgtgaaggagccccccaccgacgtgacccccaccttcctgaccaccggcgtgctgagcaccctgagacaggccgacttcgaggcccacaacatcctgagagagagcggctacgccggcaagatcagccagatgcccgtgatcctgacccccctgcacttcgacagagaccccctgcagaagcagcccagctgccagagaagcgtggtgatcagaaccttcatcaccagcgacttcatgaccggcatccccgccacccccggcaacgagatccccgtggaggtggtgctgaagatggtgaccgagatcaagaagatccccggcatcagcagaatcatgtacgacctgaccagcaagccccccggcaccaccgagtgggagtag

SEQ ID NO: 141639 - protein, 192 aa, Artificial Sequence
  derived and/or modified sequence
MAAWGRRRLGPGSSGGSARERVSLSATDCYIVHEIYNGENAQDQFEYELEQALEAQYKYIVIEPTRIGDETARWITVGNCLHKTAVLAGTACLFTPLALPLDYSHYISLPAGVLSLACCTLYGISWQFDPCCKYQVEYDAYKLSRLPLHTLTSSTPVVLVRKDDLHRKRLHNTIALAALVYCVKKIYELYAV

SEQ ID NO: 141640 - DNA, 579 bp, Artificial Sequence
  derived and/or modified sequence
atggccgcctggggcagaagaagactgggccccggcagcagcggcggcagcgccagagagagagtgagcctgagcgccaccgactgctacatcgtgcacgagatctacaacggcgagaacgcccaggaccagttcgagtacgagctggagcaggccctggaggcccagtacaagtacatcgtgatcgagcccaccagaatcggcgacgagaccgccagatggatcaccgtgggcaactgcctgcacaagaccgccgtgctggccggcaccgcctgcctgttcacccccctggccctgcccctggactacagccactacatcagcctgcccgccggcgtgctgagcctggcctgctgcaccctgtacggcatcagctggcagttcgacccctgctgcaagtaccaggtggagtacgacgcctacaagctgagcagactgcccctgcacaccctgaccagcagcacccccgtggtgctggtgagaaaggacgacctgcacagaaagagactgcacaacaccatcgccctggccgccctggtgtactgcgtgaagaagatctacgagctgtacgccgtgtag

SEQ ID NO: 141641 - DNA, 579 bp, Artificial Sequence
  derived and/or modified sequence
atggcagcttggggtaggcgaaggctggggcccggtagctcaggcggctccgctcgtgagcgtgtgtccctgtctgcaaccgattgctatatcgtccatgaaatttacaacggggagaacgcacaagaccaattcgagtacgagctggagcaggctctggaagcgcagtacaaatatatcgtgatagagcctacaaggatcggtgacgaaacagccaggtggatcacggtcggtaattgcctgcacaagaccgcagtgctggctggaacagcatgtctcttcacaccactcgcgctacccctcgactactcacactatatttctttgccagctggtgtgctgtccctggcctgctgtacactctacggtataagctggcagtttgatccctgctgtaaatatcaggtggaatacgacgcttataaactgtctcgcctccccttgcacacgctaacctccagcacacctgtcgtgctggtacgaaaggatgacctgcaccgcaaacggttacataatacgatcgctctcgctgcactggtgtactgtgtgaagaagatctacgagctatacgctgtctag

SEQ ID NO: 141642 - DNA, 579 bp, Artificial Sequence
  derived and/or modified sequence
atggccgcctggggcagaagaaggctgggccctggcagcagcggcggcagcgcccgggagcgggtgtccctgagcgccacagactgctacatcgtgcatgagatctacaatggagaaaatgcccaggaccagtttgaatatgagctggagcaggccctggaggcccagtacaagtacatcgtcatcgagcccaccagaattggagatgaaacagcccgctggatcaccgtgggcaactgcctgcacaagacagctgtgctggccggcacagcctgcctcttcacccccctggccctgcccctggactacagccactacatcagcctgcctgctggggtgctgagcctggcctgctgcaccctgtatggcatctcctggcagtttgacccctgctgcaagtaccaggtggagtatgatgcctacaagctgagccggctgcccctgcacaccctgaccagcagcacccctgtggtgctggtgaggaaggatgacctgcacaggaagaggctgcacaacaccatcgccctggccgccctggtgtactgtgtgaagaagatctatgagctgtatgctgtgtag

SEQ ID NO: 141643 - DNA, 579 bp, Artificial Sequence
  derived and/or modified sequence
atggccgcctggggccggcggcggctgggccccggcagcagcggcgggtctgcccgggagagggtgagtctctccgccactgactgctacatcgttcacgagatctataatggtgagaatgcccaggaccaatttgagtatgaactggagcaggcactggaagcccaatataaatatatcgtgatcgagccaacgagaatcggagatgagacagctcggtggatcacagtggggaactgtctgcacaaaaccgccgtgctagctggcaccgcctgcttgtttacaccactagctcttccgcttgactacagtcactacatcagcctgccggctggagtgctgagcttggcatgttgcactctatacggcataagctggcagtttgacccctgctgcaagtatcaggttgagtatgatgcctacaagctctcccgacttcccctacacaccttgacttcctccactcctgtggtcctggtgcgcaaagatgatctgcacaggaaacgtctgcataatactattgcactggccgccctcgtttactgcgtcaaaaaaatatatgagctgtatgcggtgtag

SEQ ID NO: 141644 - DNA, 579 bp, Artificial Sequence
  derived and/or modified sequence
atggcagcttggggtaggcgccgactgggcccaggtagctcaggtgggtccgcgagggagagagtcagtctttccgcaacagactgctatatcgtccacgaaatctacaatggagaaaacgctcaggatcagttcgagtacgaactggagcaagctctagaagcgcagtataagtacattgtaatcgaacctacaaggattggagatgaaacagcgagatggatcactgtgggaaactgtctccacaaaaccgctgtcctcgcagggaccgcatgcttattcacacccctcgccctgccacttgattattctcactatatctcgcttcccgctggggtgctgtcattagcatgctgcacactgtacggaattagttggcagttcgatccttgctgtaagtatcaagtggaatacgatgcgtacaaactttctaggcttccgctgcataccttgaccagcagtacacccgtggtccttgtccgcaaggatgatctgcaccgcaagcgccttcataacactatagctctggccgcactcgtgtattgcgtgaagaagatatacgagctatacgctgtctag

SEQ ID NO: 141645 - DNA, 1396 bp, Artificial Sequence
  derived and/or modified sequence
agacagcgcggcggcccccagcgggagaggcagcctggcggccaggacagcgcggccgggcgcctccgcgcagtgctctgggagttgtaggcacttgcctctcctctctccttcagctactggctctcgaaactcaaggacctaccggtgggtgggcgcctgtgactcccaggctgcgaacgccgggaactcagtttcttcagaaatgctcgaaccaggacggctcctggagtcctcgcgccctcgcagaaggactacgggccccggcgaccccgggggcggggcttccggcgcgctgccttgtgggcacggtagttccgccgggtctggcttccgcctgccgagcggccccggaccgcaggccggactacacttcccgtcggcccgcctgctctcccgatgccgccttggcgcgagacgttggcaagcagagtgtctccaagatggccgcttggggaaggaggcgtcttggcccgggcagcagtggcggcagcgcccgagagagggtgagcttgtcggccacagactgctacattgtgcatgagatctacaatggggagaatgcccaagaccagtttgagtacgagctggagcaggccctggaagcccagtacaagtacattgtgattgagcccactcgcattggcgacgagacagcccgctggatcaccgtgggcaactgcctgcacaagacggccgtgctggcgggcaccgcctgcctcttcaccccgttggcgctgcccttagattattcccactacatttccctgcccgctggtgtgctgagcctggcctgctgcaccctctatgggatctcctggcagtttgacccttgctgcaagtaccaagtggagtacgacgcctataaactgtcgcgcctgcctctgcacacactcacctcctccaccccggtggtgctggtccggaaggacgacctgcacagaaagagactgcacaacacgatagcactggccgccctggtgtactgtgtaaagaagatttacgaactctatgccgtatgatttcagtagaacagggagcgaagcaaaaccacccggcccacaagagacaacagagtattcagatcgccacactctgtgaggcagcagagcctgggcaggtgtttggcttagtatttgttatttttaaaaaataacagatcacgggtgtacccagggtttttcagctcattacactaagatgtggatttccataacccaagaggggggtctgaggctgtggaagtccgactgggcagtggaatgctgatggaggcagacgctgccgagggggtgtggacgtgctttgggggaggtctttaagtctattgtttaactgtaccatccagagcccaccagaagctattgatcattaaaattatgagaatttcaactcc

SEQ ID NO: 141646 - protein, 318 aa, Artificial Sequence
  derived and/or modified sequence
MASPGCLLCVLGLLLCGAASLELSRPHGDTAKKPIIGILMQKCRNKVMKNYGRYYIAASYVKYLESAGARVVPVRLDLTEKDYEILFKSINGILFPGGSVDLRRSDYAKVAKIFYNLSIQSFDDGDYFPVWGTCLGFEELSLLISGECLLTATDTVDVAMPLNFTGGQLHSRMFQNFPTELLLSLAVEPLTANFHKWSLSVKNFTMNEKLKKFFNVLTTNTDGKIEFISTMEGYKYPVYGVQWHPEKAPYEWKNLDGISHAPNAVKTAFYLAEFFVNEARKNNHHFKSESEEEKALIYQFSPIYTGNISSFQQCYIFD

SEQ ID NO: 141647 - DNA, 957 bp, Artificial Sequence
  derived and/or modified sequence
atggcttcccccggatgtttgctatgtgttctaggcctgctgctctgcggagccgcttccctggagcttagtaggccacacggggatacagctaaaaagcccatcatcggcattcttatgcagaagtgtaggaataaggtcatgaaaaactacgggcggtattatatcgccgcatcttacgtcaaatacctcgaaagcgctggagctagggttgtccctgtgcgccttgacctcactgagaaggattacgaaatcttgtttaagtcaattaacggcatcctttttccaggaggtagcgttgacttacggcgctccgactacgcgaaggtcgcaaagattttctataacttatctatccagtctttcgacgacggagactatttccccgtttgggggacttgtcttggcttcgaggaattgagtctgctgattagcggagaatgtctgctgaccgccacagacaccgtggatgttgctatgcctctgaactttaccggaggacagttgcattcacgaatgttccaaaacttcccaactgagctactgctgtccctggctgtggaaccactgaccgccaacttccataaatggagcctctccgtcaaaaacttcactatgaacgagaagctcaaaaagttttttaatgtgctgaccaccaacaccgatgggaagattgaatttataagtaccatggaagggtacaagtaccccgtgtacggcgtccaatggcaccccgaaaaagccccctatgaatggaagaaccttgatggaatcagccatgcgccaaatgctgtaaagactgctttttatttggcagagttcttcgtgaacgaagctaggaagaataaccaccactttaaatccgaatctgaagaggaaaaagccttgatctatcagttttcaccaatctacacaggaaacatctctagcttccagcaatgttacatctttgactag

SEQ ID NO: 141648 - DNA, 1607 bp, Artificial Sequence
  derived and/or modified sequence
tcccctctcgaggacctgggttggccagcccagctttgtacgggtgactgaagtccacatcgacgtaacagttgaaagggaaggacgcggagaccacccggtacccgccccaggcgtttccagagtctccgcttaggcggcccgtgggggtcggggtcgcggtcgcggtcgcggaccggggacagagcaatggggcgggcgcgcagcgccggctgcactcccagagcctcccaccgccgccccacggccgcctagcgcgcgccgggactgcatttcccataggcccacgctgcggagcaccgcccacccgagtctcacgcgagtgcgctgccgcgaggtgtccctgccgcagcccccgcccgcccgcagagcttttgaaaggcggcgggaggcggcgagcgccatggccagtccgggctgcctgctgtgcgtgctgggcctgctactctgcggggcggcgagcctcgagctgtctagaccccacggcgacaccgccaagaagcccatcatcggaatattaatgcaaaaatgccgtaataaagtcatgaaaaactatggaagatactatattgctgcgtcctatgtaaagtacttggagtctgcaggtgcgagagttgtaccagtaaggctggatcttacagagaaagactatgaaatacttttcaaatctattaatggaatccttttccctggaggaagtgttgacctcagacgctcagattatgctaaagtggccaaaatattttataacttgtccatacagagttttgatgatggagactattttcctgtgtggggcacatgccttggatttgaagagctttcactgctgattagtggagagtgcttattaactgccacagatactgttgacgtggcaatgccgctgaacttcactggaggtcaattgcacagcagaatgttccagaattttcctactgagttgttgctgtcattagcagtagaacctctgactgccaatttccataagtggagcctctccgtgaagaattttacaatgaatgaaaagttaaagaagtttttcaatgtcttaactacaaatacagatggcaagattgagtttatttcaacaatggaaggatataagtatccagtatatggtgtccagtggcatccagagaaagcaccttatgagtggaagaatttggatggcatttcccatgcacctaatgctgtgaaaaccgcattttatttagcagagttttttgttaatgaagctcggaaaaacaaccatcattttaaatctgaatctgaagaggagaaagcattgatttatcagttcagtccaatttatactggaaatatttcttcatttcagcaatgttacatatttgattgaaagtcttcaatttgttaacagagcaaatttgaataattccatgattaaactgttagaataacttgctactcatggcaagattaggaagtcacagattcttttctataatgtgcctggctctgattcttcattctgtatgtgactatttatataacattagataattaaatagtgagacataaatagagtgtttttcatggaaaagccttcttatatctgaagattgaaaaaaataaatttactgaaa

SEQ ID NO: 141649 - DNA, 957 bp, Artificial Sequence
  derived and/or modified sequence
atggccagccctggctgcctgctgtgtgtgctgggcctgctgctgtgtggggccgccagcctggagctgagccggccccatggagacacagccaagaagcccatcatcggcatcctgatgcagaagtgcaggaacaaggtgatgaagaactacggccgctactacatcgccgccagctatgtgaagtacctggagagcgctggggcccgggtggtgcctgtgcggctggacctgacagagaaggactatgagatcctcttcaagagcatcaatggcatcctcttccctgggggctctgtggacctgcggcggagtgactatgccaaggtggccaagatcttctacaacctgagcatccagagctttgatgatggagactacttccctgtgtggggcacctgcctgggctttgaggagctgagcctgctgatctctggagaatgtctgctgacagccacagacacagtggatgtggccatgcccctgaacttcaccggcggccagctgcacagcaggatgttccagaacttccccacagagctgctgctgagcctggccgtggagcccctgacagccaacttccacaagtggagcctgtctgtgaagaacttcaccatgaatgagaagctgaagaagttcttcaacgtgctgaccaccaacacagatggcaagattgagttcatcagcaccatggagggctacaagtaccctgtgtatggagtgcagtggcaccctgagaaggccccctatgagtggaagaacctggatggcatcagccacgccccaaatgctgtgaagacagccttctacctggccgagttctttgtgaatgaggccaggaagaacaaccaccacttcaagtctgagagcgaggaggagaaggccctgatctaccagttcagccccatctacacaggcaacatcagcagcttccagcagtgctacatctttgattag

SEQ ID NO: 141650 - DNA, 957 bp, Artificial Sequence
  derived and/or modified sequence
atggccagccccggctgcctgctgtgcgtgctgggcctgctgctgtgtggcgctgcatcactcgagttgtcacgccctcatggagatacagcgaagaagcccattattggcatactcatgcagaagtgcagaaacaaggtgatgaaaaactatggtcgctactatatcgccgcaagctatgtgaagtacctcgagagcgctggtgcccgcgtggtacccgtgaggcttgatcttacagagaaggattatgagattctcttcaagtcgatcaacgggatactgttccctggagggtcggtggatttgcggcgatcagactatgcgaaagtagcgaaaattttctataatctgtccattcaatccttcgatgatggcgactatttcccagtatggggtacctgtttaggcttcgaagagctctcattgctgatttctggagaatgtttgttaacagccactgatactgtcgatgtcgcgatgccccttaattttaccggcggccagctccacagccgaatgtttcagaacttccccacagaactattgctgtccctagccgttgaaccactgacagccaactttcataagtggtctctgtctgttaaaaatttcacaatgaacgaaaagctcaaaaaattcttcaacgttttgaccactaacacagacggcaagatcgagttcatatcaactatggagggttataaataccccgtgtatggtgtgcaatggcatccggagaaggctccttatgagtggaagaacctagatggcatcagtcacgctcctaatgcagtgaaaactgccttctacttggccgagtttttcgtgaacgaggccaggaagaataatcaccatttcaaaagtgaaagtgaggaggagaaagccttgatctatcagttttcgcccatctatactggaaacatctcgtcattccagcagtgttatatctttgactag

SEQ ID NO: 141651 - DNA, 957 bp, Artificial Sequence
  derived and/or modified sequence
atggcatcacctgggtgcttgttgtgcgttcttggccttttgttgtgtggtgccgcatctctagaactgtcgcggcctcacggtgatacagcgaaaaagccaatcattgggattctaatgcagaagtgccgaaacaaggtcatgaaaaactacggacgatattatatcgcggcatcatatgtgaaatacctggagtccgccggagccagagtagtgccagttcggttggatctgacagagaaagattacgagatcttattcaagagcatcaatggcattctgttccctggtggctctgtggaccttagacggtcagattatgccaaggtcgccaagatcttttataacttatccatccagtccttcgatgatggagattatttcccagtgtgggggacttgtctcgggttcgaggagctctctctcctcatctccggcgaatgtctgctaacggctaccgacaccgtggatgttgccatgccactcaacttcaccggaggccaactacacagtcggatgttccaaaacttccccaccgagcttctcctgtctctggcagtggaacctctaactgcaaattttcacaaatggtccctttcggtcaagaattttactatgaacgaaaagctcaagaaattttttaacgtcttgactacgaacactgacggaaaaatcgagtttatatccaccatggaggggtacaagtatcccgtgtacggtgtgcaatggcacccagagaaagcgccttatgaatggaaaaacctggatgggatcagtcacgctcccaacgctgtgaagacagccttttatttggccgagttttttgtaaatgaggctaggaagaataaccaccactttaaatcagagtccgaggaggagaaggctttaatttaccagttcagtcctatttacacaggaaacatcagtagtttccagcagtgctacatcttcgactag

SEQ ID NO: 141652 - DNA, 957 bp, Artificial Sequence
  derived and/or modified sequence
atggccagccccggctgcctgctgtgcgtgctgggcctgctgctgtgcggcgccgccagcctggagctgagcagaccccacggcgacaccgccaagaagcccatcatcggcatcctgatgcagaagtgcagaaacaaggtgatgaagaactacggcagatactacatcgccgccagctacgtgaagtacctggagagcgccggcgccagagtggtgcccgtgagactggacctgaccgagaaggactacgagatcctgttcaagagcatcaacggcatcctgttccccggcggcagcgtggacctgagaagaagcgactacgccaaggtggccaagatcttctacaacctgagcatccagagcttcgacgacggcgactacttccccgtgtggggcacctgcctgggcttcgaggagctgagcctgctgatcagcggcgagtgcctgctgaccgccaccgacaccgtggacgtggccatgcccctgaacttcaccggcggccagctgcacagcagaatgttccagaacttccccaccgagctgctgctgagcctggccgtggagcccctgaccgccaacttccacaagtggagcctgagcgtgaagaacttcaccatgaacgagaagctgaagaagttcttcaacgtgctgaccaccaacaccgacggcaagatcgagttcatcagcaccatggagggctacaagtaccccgtgtacggcgtgcagtggcaccccgagaaggccccctacgagtggaagaacctggacggcatcagccacgcccccaacgccgtgaagaccgccttctacctggccgagttcttcgtgaacgaggccagaaagaacaaccaccacttcaagagcgagagcgaggaggagaaggccctgatctaccagttcagccccatctacaccggcaacatcagcagcttccagcagtgctacatcttcgactag

SEQ ID NO: 141653 - protein, 480 aa, Artificial Sequence
  derived and/or modified sequence
MSAEVIHQVEEALDTDEKEMLLFLCRDVAIDVVPPNVRDLLDILRERGKLSVGDLAELLYRVRRFDLLKRILKMDRKAVETHLLRNPHLVSDYRVLMAEIGEDLDKSDVSSLIFLMKDYMGRGKISKEKSFLDLVVELEKLNLVAPDQLDLLEKCLKNIHRIDLKTKIQKYKQSVQGAGTSYRNVLQAAIQKSLKDPSNNFRLHNGRSKEQRLKEQLGAQQEPVKKSIQESEAFLPQSIPEERYKMKSKPLGICLIIDCIGNETELLRDTFTSLGYEVQKFLHLSMHGISQILGQFACMPEHRDYDSFVCVLVSRGGSQSVYGVDQTHSGLPLHHIRRMFMGDSCPYLAGKPKMFFIQNYVVSEGQLEDSSLLEVDGPAMKNVEFKAQKRGLCTVHREADFFWSLCTADMSLLEQSHSSPSLYLQCLSQKLRQERKRPLLDLHIELNGYMYDWNSRVSAKEKYYVWLQHTLRKKLILSYT

SEQ ID NO: 141654 - protein, 384 aa, Artificial Sequence
  derived and/or modified sequence
MAEIGEDLDKSDVSSLIFLMKDYMGRGKISKEKSFLDLVVELEKLNLVAPDQLDLLEKCLKNIHRIDLKTKIQKYKQSVQGAGTSYRNVLQAAIQKSLKDPSNNFRLHNGRSKEQRLKEQLGAQQEPVKKSIQESEAFLPQSIPEERYKMKSKPLGICLIIDCIGNETELLRDTFTSLGYEVQKFLHLSMHGISQILGQFACMPEHRDYDSFVCVLVSRGGSQSVYGVDQTHSGLPLHHIRRMFMGDSCPYLAGKPKMFFIQNYVVSEGQLEDSSLLEVDGPAMKNVEFKAQKRGLCTVHREADFFWSLCTADMSLLEQSHSSPSLYLQCLSQKLRQERKRPLLDLHIELNGYMYDWNSRVSAKEKYYVWLQHTLRKKLILSYT

SEQ ID NO: 141655 - DNA, 1443 bp, Artificial Sequence
  derived and/or modified sequence
atgtccgcagaagtgatacaccaggttgaggaagctctggatacagacgaaaaggagatgctgcttttcttgtgccgcgacgttgcaattgacgtcgtgccacctaacgtgagagatctgctggacattctcagagagaggggtaaactgagcgttggcgatctagccgagttgctgtatagggtgaggcggtttgacttgctcaagcgaatcctgaagatggaccgaaaggctgttgaaacccacttgctgcggaacccacatcttgtgtcagactacagggtgcttatggccgagatcggagaggatctggacaaatctgacgtgtcttctttaatctttctgatgaaagattatatggggcgagggaaaatctccaaagagaaatcatttctcgacctagtggtggaactcgaaaagttgaacttggtcgctccggaccaacttgacctgctcgaaaaatgtctaaagaatatccatcgaattgacctaaagactaagatccaaaagtataaacagtcagtgcagggagcaggcaccagctatagaaacgttctgcaggccgctatacaaaagtctttaaaagatccaagcaataactttcggttgcacaatgggcgctccaaggagcagcggctcaaagagcaactgggcgcacagcaggagcctgtgaagaagagtatccaggagtccgaagcttttctgccccagtctatccccgaggaacgctacaagatgaaatctaagcccctcggtatatgtttaattatcgattgcataggaaatgaaacagagttgcttcgcgatacttttaccagcctgggctatgaagtccaaaagttcctacatctgtccatgcatggcatttctcagattctcgggcagttcgcgtgtatgcccgagcacagggattacgattcatttgtttgtgttctggtgagccgcggggggtcccaatccgtgtacggagtcgaccagacgcatagcggcctgcctctgcaccacatcagacgcatgttcatgggggactcctgcccctaccttgcaggaaaacccaagatgttcttcatccagaattatgtcgtttctgaaggacaactggaggactctagcctcctcgaggtagacggaccagcgatgaagaacgtcgaattcaaagcccagaagagagggctgtgcacggtgcacagagaggccgattttttctggagcctgtgcacagcagatatgtccctgctcgaacaatctcatagttccccaagtttatatctgcaatgcctctctcagaaacttagacaggagagaaagagaccgctattggacctgcatattgagctgaatggatacatgtatgattggaactcaagggtgtccgcaaaagagaagtactacgtgtggcttcagcacacccttcggaagaaactcatcctctcttacacttag

SEQ ID NO: 141656 - DNA, 1443 bp, Artificial Sequence
  derived and/or modified sequence
atgtcagccgaggttatccatcaggttgaagaagcactggacaccgacgaaaaagagatgctgctcttcctgtgccgggacgtcgcaatcgacgtggtcccgcctaacgtgagagacttgctcgacatcctgcgcgagcgcgggaagctgagcgtgggcgatctggctgaattgctataccgggtacgcaggtttgatctactcaaacggatactgaaaatggatcggaaagcggtcgagacccatctccttagaaacccacacctcgtaagtgactaccgcgtcttaatggcagaaatcggagaggacctggacaagagcgacgtgtcttccctgattttcctcatgaaagattacatgggacgcggcaaaattagcaaggaaaaaagtttcttggacttggtggtcgagctcgagaagctcaatttagttgcgccggatcagttagacctcctggagaagtgcctgaaaaacatacatcgaattgatctgaagaccaagattcaaaagtacaagcagagcgttcaaggagctggaacttcctaccggaatgtactgcaggcagcgattcagaagagtcttaaggacccaagtaacaattttcgcctgcacaacggcagatccaaggagcaaaggctaaaagagcagcttggtgcacaacaggagcccgtcaaaaagagcatccaggagtcagaagcattcctcccccagagcattccagaagagcgctacaagatgaagagcaaaccactggggatatgtctgattatcgactgtattggcaatgaaaccgaactactgcgagacacctttacttctctgggttacgaagtccagaagtttctccatctgagcatgcatggcatctcacagatcctgggccagttcgcttgcatgccggagcatcgggactatgatagctttgtgtgtgtgttggtcagcaggggcgggagtcaatcagtgtacggtgtcgaccaaactcacagtggactgcctctacaccatatccgtagaatgttcatgggtgacagttgcccttacctcgccggaaagccaaagatgttttttattcagaattatgtggtctcggagggacagcttgaggatagctccctgctggaagtcgacggaccagctatgaagaacgtggaattcaaggcccaaaaacgcgggctctgcacagtgcatagggaagctgattttttttggagtttatgcactgcggatatgagcctgcttgagcagagtcatagctccccaagtctatacctacagtgtctgagccagaagctgagacaggaacggaagaggcctctgctcgacctgcacattgaactgaacggctatatgtacgactggaatagcagggtgagtgcaaaagagaaatactacgtttggttgcagcatacgctccgcaaaaaactgatactgagttacacctag

SEQ ID NO: 141657 - DNA, 1443 bp, Artificial Sequence
  derived and/or modified sequence
atgtctgctgaggtgatccaccaggtggaggaggccctggacacagatgagaaggagatgctgctcttcctgtgcagagatgtggccattgatgtggtgccccccaacgtgcgggacctgctggacatcctgcgggagcggggcaagctgtctgtgggggacctggccgagctgctgtacagagtgagaagatttgacctgctgaagaggatcctgaagatggacaggaaggctgtggagacccacctgctgaggaacccccacctggtgtctgactacagagtgctgatggccgagatcggggaggacctggacaagagtgatgtgagcagcctcatcttcctgatgaaggactacatgggccggggcaagatcagcaaggagaagagcttcctggacctggtggtggagctggagaagctgaacctggtggccccagaccagctggacctgctggagaagtgcctgaagaacatccacagaattgacctgaagaccaagatccagaagtacaagcagagcgtgcagggcgccggcaccagctacagaaatgtgctgcaggccgccatccagaagagcctgaaggaccccagcaacaacttccggctgcacaacggccgcagcaaggagcagaggctgaaggagcagctgggcgcccagcaggagcctgtgaagaagagcatccaggagagcgaggccttcctgccccagagcatccctgaggagcgctacaagatgaagagcaagcccctgggcatctgcctgatcatcgactgcattggaaatgaaacagagctgctgcgggacaccttcaccagcctgggctatgaggtgcagaagttcctgcacctgtccatgcacggcatcagccagatcctgggccagtttgcctgcatgcctgagcaccgggactatgacagctttgtgtgtgtgctggtgtcccggggcggcagccagagcgtgtatggagtggaccagacccacagcggcctgcccctgcaccacatccggaggatgttcatgggagacagctgcccctacctggccggcaagcccaagatgttcttcatccagaactacgtggtgtctgagggccagctggaggacagcagcctgctggaggtggatggccctgccatgaagaatgtggagttcaaggcccagaagaggggcctgtgcaccgtgcaccgggaggccgacttcttctggagcctgtgcacagctgacatgagcctgctggagcagagccacagcagccccagcctgtacctgcagtgcctgagccagaagctgcggcaggagaggaagaggcccctgctggacctgcacatcgagctgaatggctacatgtatgactggaacagccgggtgtctgccaaggagaagtactacgtgtggctgcagcacaccctgaggaagaagctgatcctgagctacacctag

SEQ ID NO: 141658 - DNA, 1443 bp, Artificial Sequence
  derived and/or modified sequence
atgagcgccgaggtgatccaccaggtggaggaggccctggacaccgacgagaaagagatgctgctgtttctctgtagggatgtggccatcgacgtggtgccgcccaacgtgcgggacctcctagatatccttagggagcggggcaaactcagcgtgggtgacctcgccgagttgttataccgcgtaagacgttttgatctgttaaaacgtatcctgaaaatggatagaaaggccgtcgaaactcatctcctgcgtaacccccatttagtgtcagactacagagtcctgatggcagaaatcggggaggatttagacaaaagcgatgtgagcagcctcattttcttaatgaaggactatatggggcgcggcaagatcagtaaagagaagagcttcttagacctcgtggtggagctggagaagctcaatttggtggcccccgaccagcttgatctgttggagaagtgtctcaaaaatattcatcgtattgacctgaagacaaagatccagaaatacaaacagagtgtccaaggtgccggcacttcctacaggaacgtgctgcaggctgctatacagaaatctttaaaggacccaagtaataattttaggctgcacaatggacgctccaaggaacagaggctcaaggagcaattgggagcacaacaggaaccagtgaagaagtcaattcaggagagcgaagcctttctcccacaaagtattccagaggagcgctataagatgaaaagtaagccgttaggcatctgcctcatcattgactgcatcggtaacgagactgagttgttgagggatacatttacgagcctcggctacgaggtgcagaaattccttcatttatcaatgcatgggatcagtcaaattcttggacaatttgcatgtatgccggaacaccgggattacgactcctttgtgtgcgtgctggtgtcaaggggtggcagccaaagcgtgtacggggtggatcagacacacagcggtttacctctccatcacattaggcggatgtttatgggagacagttgcccatacctggccggaaagcctaagatgttcttcatacagaattatgtagtttctgagggtcagctagaagatagtagtttactcgaggtagatggcccagctatgaaaaacgtagagttcaaagcgcagaagcggggcctgtgtaccgtacaccgagaagccgactttttttggtctttatgcaccgccgacatgtccctgctggaacagtcccacagtagccccagcctctacctgcagtgtctgtctcagaagctacgtcaagagcggaagcgtcctcttcttgatctgcatatcgagcttaacggctatatgtatgactggaattctcgggtgagcgccaaagagaaatattacgtgtggctccagcatactctgaggaagaagctgattcttagctacacgtag

SEQ ID NO: 141659 - DNA, 1443 bp, Artificial Sequence
  derived and/or modified sequence
atgagcgccgaggtgatccaccaggtggaggaggccctggacaccgatgaaaaagagatgctcttgtttctttgccgagatgtggccatcgatgtggtcccaccaaacgtgcgcgacctgctcgacatccttcgggagcgaggtaagttgagcgtgggcgaccttgcggagcttctgtatcgagtacggcggtttgacctcctgaagagaatccttaagatggacagaaaggcagtggaaacccatttgctgaggaatccgcacctcgtctccgattacagggtgctgatggccgagattggtgaggatctggataaatcagacgtgtcctcattgatctttctaatgaaggactacatggggagaggtaaaattagtaaggagaagtcctttctggacctggtggtggaactggaaaagttaaacttggtcgcacccgatcaattagacctgctggaaaagtgccttaagaatattcacagaatcgacctgaaaactaaaatccagaaatataaacagtcagttcagggcgctgggacttcttatcgaaacgttcttcaggccgccatccagaagtcactcaaagaccccagcaataacttccgactgcacaacggccgatctaaagaacagcgattgaaagaacagctgggggcacagcaagaacctgtcaagaaaagtatccaagagtccgaggcatttctcccgcagtccatccctgaggagcgctataaaatgaaaagcaagccactcgggatttgtttaatcatcgactgtataggcaacgagacagagctcttgagagataccttcactagcctgggatatgaggtgcagaagttcctacacctgagcatgcacggtatctcccagatacttggccagtttgcatgcatgccagagcaccgtgattatgactcgtttgtgtgtgtactagtttcccgagggggctcccagtctgtctacggtgtcgatcagacacatagcggcctgccactgcaccatattcgtcgcatgtttatgggagacagctgtccttatttagcgggaaagccaaagatgttctttattcaaaactatgtggttagcgagggacaattggaagatagctctttactcgaggtggacgggcccgccatgaagaacgtggagttcaaggcacagaaacgtggcctttgtaccgtccaccgcgaagccgactttttttggtccctgtgtaccgctgatatgagcctactggagcaatcacactcaagtccttctctgtacctgcagtgcttgtcgcaaaagctcagacaggagaggaaaaggccgcttttggatctgcacattgagcttaatggctatatgtacgactggaacagtagagtgagcgccaaggaaaagtactacgtgtggttacaacataccctccgcaagaagcttattctcagctatacatag

SEQ ID NO: 141660 - DNA, 1443 bp, Artificial Sequence
  derived and/or modified sequence
atgtccgccgaagtgatccatcaggtggaagaagcattggacaccgacgagaaagagatgctgctgttcctgtgcagggatgtcgccatcgatgtagtccctcccaacgtgagagatctgctagatatccttcgtgagaggggcaaactgtcggtgggagacctcgctgaactgttgtaccgtgtgagaagattcgatcttttgaagagaatcctgaagatggaccgtaaggccgtcgagacccacctcctcagaaacccacacttagtaagcgactacagggtgcttatggcagagattggtgaagatttggataagagcgacgtgtcaagtttaatcttcctcatgaaggactatatgggcaggggtaaaatcagtaaagagaagtcatttcttgacctcgtagtggagctcgagaaactcaacttggtagcaccagatcagctggacctacttgagaagtgtctaaaaaacattcacaggattgatctcaagacgaagatccagaagtacaaacagtcggtgcaaggcgcaggcacctcatatagaaacgtgctgcaggcggcaattcagaaaagcttgaaagatccctccaataactttcgtctccacaatggaaggagtaaggagcagcgattgaaggagcaactgggcgctcagcaagagccagtaaaaaagtctatccaggaatcagaggcttttctgcctcagtctatccccgaagaacggtacaaaatgaagtcaaagcccctggggatttgcctgattattgactgcattggcaatgagaccgagctgctgcgcgacacctttacatctctgggctacgaggtgcagaagtttttgcatttgtctatgcacggaatctcacagatcctgggccagttcgcttgcatgcccgagcaccgcgattatgattcattcgtttgcgtgctcgtgagccgaggcggatctcagagtgtgtacggagttgatcaaacacattcaggacttccgctgcaccatatcagacggatgttcatgggggattcatgcccatatcttgccggaaaacctaagatgtttttcatccaaaactatgtggtgtcagagggtcagttggaagatagcagtctgctcgaagtcgatggccctgccatgaagaacgtggagttcaaggcccagaaacgtgggctgtgcactgtgcacagagaggctgatttcttttggtctttatgcacggcagacatgagcttacttgagcagtcacactcgtccccctcgttatacctccaatgcctgtcacagaaactgcggcaagagcgcaaaagacctctgctggacctccatattgaactaaacggatatatgtacgattggaactcccgggtctcagccaaagagaagtactatgtgtggctgcagcacactctcaggaagaaactgatcctgagctatacttag

SEQ ID NO: 141661 - DNA, 1443 bp, Artificial Sequence
  derived and/or modified sequence
atgtcagcagaagtcatccaccaggttgaggaagcgcttgacaccgacgaaaaggaaatgttactgttcctgtgccgggatgttgcaattgacgtcgtgccaccaaatgttcgcgacctcctggatattctgcgggaacggggtaagctttcagtcggcgatttggccgagctgctctaccgggtgagaaggtttgacctactgaagcgtattttgaaaatggacaggaaggctgtcgaaacacatttgctacgcaatccccacctggtctctgattacagggtcctgatggctgaaattggtgaggatcttgacaagagcgatgtgtcgagtctgatatttctcatgaaagattatatgggcagagggaagatctctaaagagaaatcttttctggatctggtggtggagctggagaagttgaacctggtagcaccagatcagcttgacctcctggagaaatgccttaaaaatattcatagaatcgacctcaagacgaagatccagaagtacaagcagagtgttcagggcgcagggacaagctatcgaaacgtactccaggctgccatccaaaagtccttgaaggatcctagcaacaactttcgtctacataatggtagatcaaaggagcagcgactgaaagagcagctgggcgctcaacaggaaccagttaaaaaaagcatccaggagtctgaagcatttctaccacagtctatacccgaggaacggtataagatgaaatctaagcctctggggatttgcttgattatcgattgcatcggcaatgagaccgaacttctgcgcgacacctttacatcactgggatatgaagtgcagaagtttttgcatctgagcatgcatggcatcagccaaattcttggccagtttgcgtgtatgccagaacaccgcgattacgatagctttgtctgtgtcttggtgagtcgaggcggatcccagagcgtgtacggtgtcgatcagactcattcaggcctgccactgcatcatatacggcgtatgtttatgggtgactcttgtccttacttggcagggaaaccaaagatgtttttcatccagaattacgtggtctcagagggacagcttgaggatagctcccttctggaggtcgatggccctgctatgaagaatgtcgaattcaaagcgcagaagagaggactctgcacagttcacagagaggccgattttttctggagcctctgcacggcagacatgtccctgttagagcagagtcatagctctccatcattgtatctgcagtgtcttagtcaaaaacttcgccaggagaggaagagaccgctgctcgatttgcatatagaattgaatggttatatgtatgactggaacagcagggtttccgccaaagaaaaatactatgtctggcttcaacatactcttaggaagaagctcatcctctcctacacatag

SEQ ID NO: 141662 - DNA, 2295 bp, Artificial Sequence
  derived and/or modified sequence
tttactcctaacgcgtggaacttgtgtcgacatccacccccggttactgcatactcagtcacacaagccatagcaggaaacagcgagcttgcagcctcaccgacgagtctcaactaaaagggactcccggagctaggggtggggactcggcctcacacagtgagtgccggctattggacttttgtccagtgacagctgagacaacaaggaccacgggaggaggtgtaggagagaagcgccgcgaacagcgatcgcccagcaccaagtccgcttccaggctttcggtttctttgcctccatcttgggtgcgccttcccggcgtctaggggagcgaaggctgaggtggcagcggcaggagagtccggccgcgacaggacgaactcccccactggaaaggattctgaaagaaatgaagtcagccctcagaaatgaagttgactgcctgctggctttctgttgactggcccggagctgtactgcaagacccttgtgagcttccctagtctaagagtaggatgtctgctgaagtcatccatcaggttgaagaagcacttgatacagatgagaaggagatgctgctctttttgtgccgggatgttgctatagatgtggttccacctaatgtcagggaccttctggatattttacgggaaagaggtaagctgtctgtcggggacttggctgaactgctctacagagtgaggcgatttgacctgctcaaacgtatcttgaagatggacagaaaagctgtggagacccacctgctcaggaaccctcaccttgtttcggactatagagtgctgatggcagagattggtgaggatttggataaatctgatgtgtcctcattaattttcctcatgaaggattacatgggccgaggcaagataagcaaggagaagagtttcttggaccttgtggttgagttggagaaactaaatctggttgccccagatcaactggatttattagaaaaatgcctaaagaacatccacagaatagacctgaagacaaaaatccagaagtacaagcagtctgttcaaggagcagggacaagttacaggaatgttctccaagcagcaatccaaaagagtctcaaggatccttcaaataacttcaggctccataatgggagaagtaaagaacaaagacttaaggaacagcttggcgctcaacaagaaccagtgaagaaatccattcaggaatcagaagcttttttgcctcagagcatacctgaagagagatacaagatgaagagcaagcccctaggaatctgcctgataatcgattgcattggcaatgagacagagcttcttcgagacaccttcacttccctgggctatgaagtccagaaattcttgcatctcagtatgcatggtatatcccagattcttggccaatttgcctgtatgcccgagcaccgagactacgacagctttgtgtgtgtcctggtgagccgaggaggctcccagagtgtgtatggtgtggatcagactcactcagggctccccctgcatcacatcaggaggatgttcatgggagattcatgcccttatctagcagggaagccaaagatgttttttattcagaactatgtggtgtcagagggccagctggaggacagcagcctcttggaggtggatgggccagcgatgaagaatgtggaattcaaggctcagaagcgagggctgtgcacagttcaccgagaagctgacttcttctggagcctgtgtactgcggacatgtccctgctggagcagtctcacagctcaccatccctgtacctgcagtgcctctcccagaaactgagacaagaaagaaaacgcccactcctggatcttcacattgaactcaatggctacatgtatgattggaacagcagagtttctgccaaggagaaatattatgtctggctgcagcacactctgagaaagaaacttatcctctcctacacataagaaaccaaaaggctgggcgtagtggctcacacctgtaatcccagcactttgggaggccaaggagggcagatcacttcaggtcaggagttcgagaccagcctggccaacatggtaaacgctgtccctagtaaaaatacaaaaattagctgggtgtgggtgtgggtacctgtattcccagttacttgggaggctgaggtgggaggatcttttgaacccaggagttcagggtcatagcatgctgtgattgtgcctacgaatagccactgcataccaacctgggcaatatagcaagatcccatctctttaaaaaaaaaaaaaaaggacaggaactatctta

SEQ ID NO: 141663 - DNA, 2128 bp, Artificial Sequence
  derived and/or modified sequence
cactcagtcctggtggggtcgcacgtaacggtcctgagctatgcataagccgtttgaccacgcatggagaattttaccacccagagacacgcgagtggccctgtgcaagtttcaactgcgcggggggcggggaattccgcagacaggattctagaatttatgtcttgtgtggtaacatttcagccggtgggtggcggggattaggcgtgaagcggttcagcaggcagaggttctcggacgccctccggcgaagccacctgttgatgcttttgactttctgtccttgttcctcgtcccatctggagcatttccaattctggttttgcggagcagcaggtctgagcttgtccggcgagggtgggagttggtcccggcggagatccagtgggaagagccggcggctgcccgggcaactcccccactggaaaggattctgaaagaaatgaagtcagccctcagaaatgaagttgactgcctgctggctttctgttgactggcccggagctgtactgcaagacccttgtgagcttccctagtctaagagtaggatgtctgctgaagtcatccatcaggttgaagaagcacttgatacagatgagaaggagatgctgctctttttgtgccgggatgttgctatagatgtggttccacctaatgtcagggaccttctggatattttacgggaaagaggtaagctgtctgtcggggacttggctgaactgctctacagagtgaggcgatttgacctgctcaaacgtatcttgaagatggacagaaaagctgtggagacccacctgctcaggaaccctcaccttgtttcggactatagagtgctgatggcagagattggtgaggatttggataaatctgatgtgtcctcattaattttcctcatgaaggattacatgggccgaggcaagataagcaaggagaagagtttcttggaccttgtggttgagttggagaaactaaatctggttgccccagatcaactggatttattagaaaaatgcctaaagaacatccacagaatagacctgaagacaaaaatccagaagtacaagcagtctgttcaaggagcagggacaagttacaggaatgttctccaagcagcaatccaaaagagtctcaaggatccttcaaataacttcaggctccataatgggagaagtaaagaacaaagacttaaggaacagcttggcgctcaacaagaaccagtgaagaaatccattcaggaatcagaagcttttttgcctcagagcatacctgaagagagatacaagatgaagagcaagcccctaggaatctgcctgataatcgattgcattggcaatgagacagagcttcttcgagacaccttcacttccctgggctatgaagtccagaaattcttgcatctcagtatgcatggtatatcccagattcttggccaatttgcctgtatgcccgagcaccgagactacgacagctttgtgtgtgtcctggtgagccgaggaggctcccagagtgtgtatggtgtggatcagactcactcagggctccccctgcatcacatcaggaggatgttcatgggagattcatgcccttatctagcagggaagccaaagatgttttttattcagaactatgtggtgtcagagggccagctggaggacagcagcctcttggaggtggatgggccagcgatgaagaatgtggaattcaaggctcagaagcgagggctgtgcacagttcaccgagaagctgacttcttctggagcctgtgtactgcggacatgtccctgctggagcagtctcacagctcaccatccctgtacctgcagtgcctctcccagaaactgagacaagaaagaaaacgcccactcctggatcttcacattgaactcaatggctacatgtatgattggaacagcagagtttctgccaaggagaaatattatgtctggctgcagcacactctgagaaagaaacttatcctctcctacacataagaaaccaaaaggctgggcgtagtggctcacacctgtaatcccagcactttgggaggccaaggagggcagatcacttcaggtcaggagttcgagaccagcctggccaacatggtaaacgctgtccctagtaaaaatac

SEQ ID NO: 141664 - DNA, 1679 bp, Artificial Sequence
  derived and/or modified sequence
atactcagtcacacaagccatagcaggaaacagcgagcttgcagcctcaccgacgagtctcaactaaaagggactcccggagctaggggtggggactcggcctcacacagtgagtgccggctattggacttttgtccagtgacagctgagacaacaaggaccacgggaggaggtgtaggagagaagcgccgcgaacagcgatcgcccagcaccaagtccgcttccaggctttcggtttctttgcctccatcttgggtgcgccttcccggcgtctaggggagcgaaggctgaggtggcagcggcaggagagtccggccgcgacaggacgagtgctgatggcagagattggtgaggatttggataaatctgatgtgtcctcattaattttcctcatgaaggattacatgggccgaggcaagataagcaaggagaagagtttcttggaccttgtggttgagttggagaaactaaatctggttgccccagatcaactggatttattagaaaaatgcctaaagaacatccacagaatagacctgaagacaaaaatccagaagtacaagcagtctgttcaaggagcagggacaagttacaggaatgttctccaagcagcaatccaaaagagtctcaaggatccttcaaataacttcaggctccataatgggagaagtaaagaacaaagacttaaggaacagcttggcgctcaacaagaaccagtgaagaaatccattcaggaatcagaagcttttttgcctcagagcatacctgaagagagatacaagatgaagagcaagcccctaggaatctgcctgataatcgattgcattggcaatgagacagagcttcttcgagacaccttcacttccctgggctatgaagtccagaaattcttgcatctcagtatgcatggtatatcccagattcttggccaatttgcctgtatgcccgagcaccgagactacgacagctttgtgtgtgtcctggtgagccgaggaggctcccagagtgtgtatggtgtggatcagactcactcagggctccccctgcatcacatcaggaggatgttcatgggagattcatgcccttatctagcagggaagccaaagatgttttttattcagaactatgtggtgtcagagggccagctggaggacagcagcctcttggaggtggatgggccagcgatgaagaatgtggaattcaaggctcagaagcgagggctgtgcacagttcaccgagaagctgacttcttctggagcctgtgtactgcggacatgtccctgctggagcagtctcacagctcaccatccctgtacctgcagtgcctctcccagaaactgagacaagaaagaaaacgcccactcctggatcttcacattgaactcaatggctacatgtatgattggaacagcagagtttctgccaaggagaaatattatgtctggctgcagcacactctgagaaagaaacttatcctctcctacacataagaaaccaaaaggctgggcgtagtggctcacacctgtaatcccagcactttgggaggccaaggagggcagatcacttcaggtcaggagttcgagaccagcctggccaacatggtaaacgctgtccctagtaaaaatacaaaaattagctgggtgtgggtgtgggtacctgtattcccagttacttgggag

SEQ ID NO: 141665 - DNA, 1443 bp, Artificial Sequence
  derived and/or modified sequence
atgagcgccgaggtgatccaccaggtggaggaggccctggacaccgacgagaaggagatgctgctgttcctgtgcagagacgtggccatcgacgtggtgccccccaacgtgagagacctgctggacatcctgagagagagaggcaagctgagcgtgggcgacctggccgagctgctgtacagagtgagaagattcgacctgctgaagagaatcctgaagatggacagaaaggccgtggagacccacctgctgagaaacccccacctggtgagcgactacagagtgctgatggccgagatcggcgaggacctggacaagagcgacgtgagcagcctgatcttcctgatgaaggactacatgggcagaggcaagatcagcaaggagaagagcttcctggacctggtggtggagctggagaagctgaacctggtggcccccgaccagctggacctgctggagaagtgcctgaagaacatccacagaatcgacctgaagaccaagatccagaagtacaagcagagcgtgcagggcgccggcaccagctacagaaacgtgctgcaggccgccatccagaagagcctgaaggaccccagcaacaacttcagactgcacaacggcagaagcaaggagcagagactgaaggagcagctgggcgcccagcaggagcccgtgaagaagagcatccaggagagcgaggccttcctgccccagagcatccccgaggagagatacaagatgaagagcaagcccctgggcatctgcctgatcatcgactgcatcggcaacgagaccgagctgctgagagacaccttcaccagcctgggctacgaggtgcagaagttcctgcacctgagcatgcacggcatcagccagatcctgggccagttcgcctgcatgcccgagcacagagactacgacagcttcgtgtgcgtgctggtgagcagaggcggcagccagagcgtgtacggcgtggaccagacccacagcggcctgcccctgcaccacatcagaagaatgttcatgggcgacagctgcccctacctggccggcaagcccaagatgttcttcatccagaactacgtggtgagcgagggccagctggaggacagcagcctgctggaggtggacggccccgccatgaagaacgtggagttcaaggcccagaagagaggcctgtgcaccgtgcacagagaggccgacttcttctggagcctgtgcaccgccgacatgagcctgctggagcagagccacagcagccccagcctgtacctgcagtgcctgagccagaagctgagacaggagagaaagagacccctgctggacctgcacatcgagctgaacggctacatgtacgactggaacagcagagtgagcgccaaggagaagtactacgtgtggctgcagcacaccctgagaaagaagctgatcctgagctacacctag

SEQ ID NO: 141666 - protein, 230 aa, Artificial Sequence
  derived and/or modified sequence
MQGLLFSTLLLAGLAQFCCRVQGTGPLDTTPEGRPGEVSDAPQRKQFCHWPCKCPQQKPRCPPGVSLVRDGCGCCKICAKQPGEICNEADLCDPHKGLYCDYSVDRPRYETGVCAYLVAVGCEFNQVHYHNGQVFQPNPLFSCLCVSGAIGCTPLFIPKLAGSHCSGAKGGKKSDQSNCSLEPLLQQLSTSYKTMPAYRNLPLIWKKNVLCKQQNGLPAPEHVGWEYLTG

SEQ ID NO: 141667 - DNA, 1065 bp, Artificial Sequence
  derived and/or modified sequence
atgcagggcctgctgttcagcaccctgctgctggccggcctggcccagttctgctgcagagtgcagggcaccggccccctggacaccacccccgagggcagacccggcgaggtgagcgacgccccccagagaaagcagttctgccactggccctgcaagtgcccccagcagaagcccagatgcccccccggcgtgagcctggtgagagacggctgcggctgctgcaagatctgcgccaagcagcccggcgagatctgcaacgaggccgacctgtgcgacccccacaagggcctgtactgcgactacagcgtggacagacccagatacgagaccggcgtgtgcgcctacctggtggccgtgggctgcgagttcaaccaggtgcactaccacaacggccaggtgttccagcccaaccccctgttcagctgcctgtgcgtgagcggcgccatcggctgcacccccctgttcatccccaagctggccggcagccactgcagcggcgccaagggcggcaagaagagcgaccagagcaactgcagcctggagcccctgctgcagcagctgagcaccagctacaagaccatgcccgcctacagaaacctgcccctgatctggaagaagaagtgcctggtgcaggccaccaagtggaccccctgcagcagaacctgcggcatgggcatcagcaacagagtgaccaacgagaacagcaactgcgagatgagaaaggagaagagactgtgctacatccagccctgcgacagcaacatcctgaagaccatcaagatccccaagggcaagacctgccagcccaccttccagctgagcaaggccgagaagttcgtgttcagcggctgcagcagcacccagagctacaagcccaccttctgcggcatctgcctggacaagagatgctgcatccccaacaagagcaagatgatcaccatccagttcgactgccccaacgagggcagcttcaagtggaagatgctgtggatcaccagctgcgtgtgccagagaaactgcagagagcccggcgacatcttcagcgagctgaagatcctgtag

SEQ ID NO: 141668 - DNA, 1065 bp, Artificial Sequence
  derived and/or modified sequence
atgcagggacttctgttctctaccttattgcttgccggacttgcccagttctgctgccgagtccaggggactggcccgctggatactactcccgaaggacggccaggggaagtttccgatgctccacagcgtaaacaattctgccattggccatgcaaatgccctcaacaaaaacccagatgtccaccgggcgtgtcattagtgcgggacggctgcggttgttgtaagatctgcgctaagcagcccggggagatctgtaatgaggccgacctatgcgatccacataagggcctgtactgtgactacagtgtggaccgaccgcgctacgaaaccggagtttgtgcttacctggtggcggttgggtgcgaatttaaccaagtgcactaccataacgggcaggtatttcagcccaatccactcttcagctgcctgtgcgtatctggggctattggttgtactcccttatttatccccaagctagctgggtctcactgtagcggggccaagggaggcaagaagagcgaccaatcgaactgcagccttgaacctttgttgcagcagctgtccacatcatacaagacgatgcccgcttaccgaaacctgccattaatttggaaaaagaagtgtctcgtccaggccacgaaatggacaccttgttcaaggacctgcgggatggggatttccaatcgcgtgacaaatgagaactctaattgtgaaatgagaaaagagaaaagactgtgctacattcagccctgcgattcaaatatactcaagaccattaagattcctaagggcaaaacgtgccagcccaccttccagctgtctaaggctgagaagtttgtcttcagcgggtgctccagtacacagagctataagcctaccttctgcggaatttgcctagataagagatgttgtatccctaataagtcaaagatgatcactatccaatttgattgtcctaacgagggatcattcaagtggaagatgctgtggatcacgagctgcgtgtgccagcgcaactgtcgggagccaggcgacatcttttctgaattgaaaatcctctag

SEQ ID NO: 141669 - DNA, 1065 bp, Artificial Sequence
  derived and/or modified sequence
atgcagggcctgctcttcagcaccctgctgctggccggcctggcccagttctgctgccgggtgcagggcaccggccccctggacaccaccccagagggccggcctggagaggtgtctgatgccccccagaggaagcagttctgccactggccctgcaagtgcccccagcagaagccccgctgccccccaggagtgtccctggtgagagatggctgcggctgctgcaagatctgtgccaagcagcccggggagatctgcaatgaagctgacctgtgtgacccccacaagggcctgtactgtgactacagcgtggaccggcccaggtatgaaacaggagtgtgtgcctacctggtggccgtgggctgtgagttcaaccaggtgcactaccacaacggccaggtgttccagcccaaccccctcttcagctgcctgtgtgtgtctggggccatcggctgcacccccctcttcatccccaagctggccggcagccactgcagcggggccaagggcggcaagaagagtgaccagagcaactgcagcctggagcccctgctgcagcagctgagcaccagctacaagaccatgcctgcctacagaaacctgcccctcatctggaagaagaagtgcctggtgcaggccaccaagtggaccccctgcagcaggacctgtggcatgggcatcagcaacagagtgaccaatgaaaacagcaactgtgagatgaggaaggagaagaggctgtgctacatccagccctgtgacagcaacatcctgaagaccatcaagatccccaagggcaagacctgccagcccaccttccagctgagcaaggccgagaagtttgtgttttctggctgcagcagcacccagagctacaagcccaccttctgtggcatctgcctggacaagcgctgctgcatccccaacaagagcaagatgatcaccatccagtttgactgccccaatgaaggcagcttcaagtggaagatgctgtggatcaccagctgtgtgtgccagaggaactgccgggagcccggggacatcttcagcgagctgaagatcctgtag

SEQ ID NO: 141670 - DNA, 1065 bp, Artificial Sequence
  derived and/or modified sequence
atgcagggcctgctgttcagcaccctgctgctggccggcctggcccaattttgctgtagggttcagggaaccggcccattggatactacacccgaaggacggcccggtgaagtgtctgacgctcctcagcgcaagcaattttgccattggccctgcaagtgtcctcagcaaaagccacgctgccctccaggcgtcagcttggtgcgggacggctgcggatgttgcaagatatgcgcaaaacaaccgggagagatctgcaacgaggctgacctgtgcgatccacacaaaggcctgtattgcgactacagtgttgatcgcccaaggtatgagactggcgtctgcgcttatttggtggcagtcggctgtgagttcaatcaggtccactatcataatgggcaggttttccagcctaacccgctgttctcctgtctgtgcgtttcaggcgcaatcggctgcaccccactgtttataccaaaactcgcgggttcacactgctctggagccaaaggcggcaagaagtcagatcagtctaattgctctctggagcccctcctgcagcaactaagtacctcctacaagaccatgcccgcctacagaaatcttccacttatctggaaaaagaaatgcctggtgcaggctaccaagtggacaccatgttcacgaacctgcggcatgggaatttcaaatagagtgactaatgaaaattctaactgtgagatgcggaaggagaaacgcctgtgctatatccagccctgcgacagcaatattctaaagacaattaagataccaaaaggaaagacatgccagcccacctttcagctcagtaaagccgagaagttcgtctttagtggatgttcaagcactcaatcgtataagcccacattctgtggaatctgtctggataagcggtgctgtattccaaataagtccaaaatgattaccatccagtttgactgcccaaatgaggggtccttcaagtggaaaatgctctggattacatcctgcgtttgccaaagaaactgtcgggagcctggggatatatttagcgaactcaagatcctgtag

SEQ ID NO: 141671 - DNA, 1065 bp, Artificial Sequence
  derived and/or modified sequence
atgcaggggctgctgttcagtacacttctgctggctggcttggcccagttttgttgcagagtccagggaaccggacccctggatacaacccccgaaggcagacctggagaagtcagcgatgcaccgcagcgcaaacagttttgccactggccgtgtaagtgcccacaacagaagccaaggtgcccacccggagtgtccctcgtgcgtgacggttgcggttgctgtaaaatctgcgcgaagcagcccggagaaatttgcaatgaagcagacctgtgcgaccctcataaggggctttattgcgactactctgtagacaggccacgctacgagacaggtgtgtgtgcctacctggtggctgtgggatgtgagtttaatcaggtacactatcataacggacaggtctttcagcctaatcccctctttagttgcctgtgcgtgagcggggctattggatgcacacctctgttcatccctaaattagctggttcacattgttctggtgcaaagggcggaaaaaaatcagaccaatctaattgttcattggagcctttgttgcagcagctctccacaagttataagaccatgccagcctacaggaatcttcctttaatatggaaaaaaaaatgtcttgtccaagcgacaaaatggaccccctgttctcgaacttgtggaatgggtatctcaaacagagtgacaaacgagaatagcaattgcgaaatgcgcaaagaaaaacggctgtgctatatccaaccctgcgatagtaatatcctgaagactattaaaattcccaaagggaaaacttgtcagcctacctttcagctaagtaaggccgaaaagtttgtgtttagcggttgctcatccacccagagctataagcctacattctgtggtatctgcctggacaagagatgttgcataccaaataaaagtaaaatgataacaattcagttcgactgtccaaatgaaggcagctttaagtggaagatgttgtggataacctcttgcgtgtgtcagcggaactgccgcgagcccggtgacattttctccgagcttaaaatcctgtag

SEQ ID NO: 141672 - DNA, 996 bp, Artificial Sequence
  derived and/or modified sequence
atgaagatcagcagaggcagagtgtgcctggagagcgagaacaaggacgccggcgtggccggcagaaagcagttctgccactggccctgcaagtgcccccagcagaagcccagatgcccccccggcgtgagcctggtgagagacggctgcggctgctgcaagatctgcgccaagcagcccggcgagatctgcaacgaggccgacctgtgcgacccccacaagggcctgtactgcgactacagcgtggacagacccagatacgagaccggcgtgtgcgcctgcaagagcgtgggctgcgagttcaaccaggtgcactaccacaacggccaggtgttccagcccaaccccctgttcagctgcctgtgcgtgagcggcgccatcggctgcacccccctgttcatccccaagctggccggcagccactgcagcggcgccaagggcggcaagaagagcgaccagagcaactgcagcctggagcccctgctgcagcagctgagcaccagctacaagaccatgcccgcctacagaaacctgcccctgatctggaagaagaagtgcctggtgcaggccaccaagtggaccccctgcagcagaacctgcggcatgggcatcagcaacagagtgaccaacgagaacagcaactgcgagatgagaaaggagaagagactgtgctacatccagccctgcgacagcaacatcctgaagaccatcaagatccccaagggcaagacctgccagcccaccttccagctgagcaaggccgagaagttcgtgttcagcggctgcagcagcacccagagctacaagcccaccttctgcggcatctgcctggacaagagatgctgcatccccaacaagagcaagatgatcaccatccagttcgactgccccaacgagggcagcttcaagtggaagatgctgtggatcaccagctgcgtgtgccagagaaactgcagagagcccggcgacatcttcagcgagctgaagatcctgtag

SEQ ID NO: 141673 - DNA, 693 bp, Artificial Sequence
  derived and/or modified sequence
atgcagggcctgctgttcagcaccctgctgctggccggcctggcccagttctgctgcagagtgcagggcaccggccccctggacaccacccccgagggcagacccggcgaggtgagcgacgccccccagagaaagcagttctgccactggccctgcaagtgcccccagcagaagcccagatgcccccccggcgtgagcctggtgagagacggctgcggctgctgcaagatctgcgccaagcagcccggcgagatctgcaacgaggccgacctgtgcgacccccacaagggcctgtactgcgactacagcgtggacagacccagatacgagaccggcgtgtgcgcctacctggtggccgtgggctgcgagttcaaccaggtgcactaccacaacggccaggtgttccagcccaaccccctgttcagctgcctgtgcgtgagcggcgccatcggctgcacccccctgttcatccccaagctggccggcagccactgcagcggcgccaagggcggcaagaagagcgaccagagcaactgcagcctggagcccctgctgcagcagctgagcaccagctacaagaccatgcccgcctacagaaacctgcccctgatctggaagaagaacgtgctgtgcaagcagcagaacggcctgcccgcccccgagcacgtgggctgggagtacctgaccggctag

SEQ ID NO: 141674 - DNA, 1065 bp, Artificial Sequence
  derived and/or modified sequence
atgcagggactccttttcagtactctgcttctagccggtctggcacagttttgctgcagagtgcaaggcactggacccctcgatacaaccccagaagggaggccaggggaagtgagcgatgcacctcagagaaaacaattttgccattggccttgtaagtgcccccaacaaaaacctcgatgtccacccggggtgtcactggtgcgagatggctgtggttgctgcaagatttgtgccaagcagcctggcgaaatctgcaatgaagcagacctttgtgatccccacaaggggctttactgtgactacagtgtagaccgtcctcgttacgagacgggtgtctgtgcctatctagttgcagtggggtgtgagttcaaccaagttcattaccacaacggtcaagtgttccagccaaacccgctgttttcctgcctctgcgttagcggagctattggatgcacaccattattcatcccgaagctggctggaagccattgctccggtgccaaggggggaaagaagtcagaccagtctaattgtagtctcgagcccctgctgcagcagctgtccacctcctacaagaccatgccggcctaccgaaatctccccttgatttggaaaaagaagtgcttggtgcaagccaccaagtggacgccatgttccagaacttgcggcatgggcatctccaacagagtgactaacgaaaacagtaattgcgaaatgagaaaagagaaaaggttgtgttacatccaaccatgcgacagcaatattctgaagaccattaaaatcccaaaaggaaagacctgccagccgaccttccagctgtctaaggcagagaagtttgttttctcaggttgctccagcacccaatcctacaagccaaccttctgcggaatatgcctggacaagcgttgttgcatccccaataaaagtaaaatgatcacgatccagtttgactgtcccaatgagggtagctttaaatggaagatgctttggatcaccagctgcgtgtgccaaaggaactgccgcgaacctggagacattttttctgaattaaaaattctttag

SEQ ID NO: 141675 - DNA, 996 bp, Artificial Sequence
  derived and/or modified sequence
atgaagattagtaggggccgtgtgtgcctggagagtgagaataaggatgccggggtggcgggtaggaagcagttttgccactggccgtgtaagtgcccacagcaaaagccgcgttgccccccaggagtgagtctggtgcgggacggatgcggctgctgcaagatatgtgcaaagcaaccaggtgagatctgtaacgaggctgatctgtgtgacccccacaaaggtctctattgcgactactctgtggataggcctcggtatgagacaggcgtgtgtgcttgcaagtccgttggctgcgagtttaaccaggtacactaccataacgggcaagtgttccagccaaatccgctattcagttgtctgtgtgtgtcaggagccattggttgcacacccctttttatacctaagctcgctggcagccactgttccggggccaaggggggcaaaaaaagcgaccagagcaattgttcgctggaaccactgctgcagcaacttagcactagttataagacaatgcccgcctacagaaatttgcccttgatctggaagaagaagtgcctggtgcaggccacgaagtggacaccgtgcagcaggacatgtggaatggggatctctaatcgtgtgaccaatgagaattccaactgcgaaatgcgcaaagagaaacggttatgttacattcaaccctgcgacagcaacatcctaaaaaccatcaagattcccaagggaaagacctgccagcccacttttcagctgagcaaggccgagaagttcgtcttcagtggttgttcctccacgcagagctataagcccaccttttgcggaatatgcttggataagcggtgctgcatcccaaataaaagcaagatgattaccatccagttcgattgtcccaacgaaggatccttcaagtggaagatgctctggataacatcctgtgtctgccaacgcaactgcagagaaccgggcgacatattcagcgagctgaaaatcttgtag

SEQ ID NO: 141676 - DNA, 1065 bp, Artificial Sequence
  derived and/or modified sequence
atgcaggggctcctcttctccaccttgctcttggccggactggctcaattctgctgccgcgtacaagggacgggacccctcgacacgacccccgaagggagacccggggaggtgtccgacgccccacaaagaaagcagttctgtcattggccttgtaaatgcccccagcagaaaccgaggtgtccaccaggagtttccctcgtgcgggacgggtgcgggtgctgtaagatttgcgctaagcagccaggcgagatctgtaacgaagccgatctttgcgatcctcacaaggggctctactgcgattatagcgtcgaccggcccaggtatgagacaggcgtctgtgcgtaccttgtggcagttgggtgtgaattcaaccaggttcactaccataacgggcaggtgtttcaacctaatccccttttcagttgcctctgtgtttcaggagccatcggctgcactcctctgtttatccccaagctcgctggcagtcactgttcaggggccaaaggcgggaaaaaatccgaccagagtaattgctcactggagccactgttgcaacagttgagcacttcttataaaacgatgcctgcctatcgtaaccttcccctgatttggaaaaaaaaatgtctggttcaggccaccaaatggaccccatgctccaggacctgtgggatgggtatttccaaccgcgtgaccaatgagaatagtaactgcgaaatgagaaaggagaaacgcctttgttacatccagccttgtgattcgaacattctgaagactatcaaaattccaaaaggcaagacctgtcagccaacgtttcagctgtccaaagctgagaagttcgtgttcagtgggtgtagttctacccagagttacaagcctacattctgtgggatttgtcttgataaacggtgctgcattccaaacaaatctaagatgatcacaattcagtttgactgcccaaatgaggggagctttaaatggaaaatgctgtggataacctcatgcgtgtgccagagaaattgcagggagcccggtgatatctttagcgagctgaaaatcctatag

SEQ ID NO: 141677 - DNA, 693 bp, Artificial Sequence
  derived and/or modified sequence
atgcagggattgctcttctccacactccttctagctggactggcacagttttgctgtcgcgtgcagggtaccggcccactggataccacaccggaaggacggcccggggaggtgagtgatgctcctcagagaaaacagttttgtcactggccatgtaaatgtccgcaacagaagccccgctgtccgcctggagtctcattggtgcgcgacggctgtggctgctgcaaaatatgcgcgaagcaacctggcgaaatctgcaatgaggcagatctgtgtgatcctcacaagggcctctattgcgactactctgtcgatcgacccagatacgaaactggggtgtgtgcctacctggtggcagtgggttgtgaatttaatcaagtccactaccacaatgggcaggtctttcagcctaacccgctgttctcctgtttgtgcgtgagtggcgccattgggtgtacacctctgtttattcctaagctcgctggctcccattgctccggggccaagggaggcaaaaagtctgatcaatccaactgtagcctggaacccctcctgcagcagttaagcacctcatacaaaaccatgcccgcttatcgtaacctgccactgatttggaaaaaaaatgtgctgtgtaaacagcaaaacggcctgcccgcacccgaacatgtggggtgggaataccttaccggatag

SEQ ID NO: 141678 - DNA, 996 bp, Artificial Sequence
  derived and/or modified sequence
atgaagatcagccggggccgggtgtgcctggagagcgagaacaaggatgctggggtggccggcaggaagcagttctgccactggccctgcaagtgcccccagcagaagccccgctgccccccaggagtgtccctggtgagagatggctgcggctgctgcaagatctgtgccaagcagcccggggagatctgcaatgaagctgacctgtgtgacccccacaagggcctgtactgtgactacagcgtggaccggcccaggtatgaaacaggagtgtgtgcctgcaagtctgtgggctgtgagttcaaccaggtgcactaccacaacggccaggtgttccagcccaaccccctcttcagctgcctgtgtgtgtctggggccatcggctgcacccccctcttcatccccaagctggccggcagccactgcagcggggccaagggcggcaagaagagtgaccagagcaactgcagcctggagcccctgctgcagcagctgagcaccagctacaagaccatgcctgcctacagaaacctgcccctcatctggaagaagaagtgcctggtgcaggccaccaagtggaccccctgcagcaggacctgtggcatgggcatcagcaacagagtgaccaatgaaaacagcaactgtgagatgaggaaggagaagaggctgtgctacatccagccctgtgacagcaacatcctgaagaccatcaagatccccaagggcaagacctgccagcccaccttccagctgagcaaggccgagaagtttgtgttcagcggctgcagcagcacccagagctacaagcccaccttctgtggcatctgcctggacaagcgctgctgcatccccaacaagagcaagatgatcaccatccagtttgactgccccaatgaaggcagcttcaagtggaagatgctgtggatcaccagctgtgtgtgccagaggaactgccgggagcccggggacatcttcagcgagctgaagatcctgtag

SEQ ID NO: 141679 - DNA, 693 bp, Artificial Sequence
  derived and/or modified sequence
atgcagggcctgctcttcagcaccctgctgctggccggcctggcccagttctgctgccgggtgcagggcaccggccccctggacaccaccccagagggccggcctggagaggtgtctgatgccccccagaggaagcagttctgccactggccctgcaagtgcccccagcagaagccccgctgccccccaggagtgtccctggtgagagatggctgcggctgctgcaagatctgtgccaagcagcccggggagatctgcaatgaagctgacctgtgtgacccccacaagggcctgtactgtgactacagcgtggaccggcccaggtatgaaacaggagtgtgtgcctacctggtggccgtgggctgtgagttcaaccaggtgcactaccacaacggccaggtgttccagcccaaccccctcttcagctgcctgtgtgtgtctggggccatcggctgcacccccctcttcatccccaagctggccggcagccactgcagcggggccaagggcggcaagaagagtgaccagagcaactgcagcctggagcccctgctgcagcagctgagcaccagctacaagaccatgcctgcctacagaaacctgcccctcatctggaagaagaatgtgctgtgcaagcagcagaatggcctgcctgcccctgagcacgtgggctgggagtacctgactggatag

SEQ ID NO: 141680 - DNA, 1065 bp, Artificial Sequence
  derived and/or modified sequence
atgcagggcctgctgttcagcaccctgctgctggccggcctggcccagttttgttgcagagtgcagggtacaggaccgctcgacacaacgcccgagggaaggccaggggaagtgagcgacgctccgcagagaaaacagttttgccactggccatgcaagtgtcctcagcaaaaacctcgttgcccacctggcgtctctctggtaagagacggatgcggatgctgtaagatctgcgcgaagcagccaggtgaaatttgcaacgaagccgacttatgtgacccacacaaggggctgtattgcgattattctgtagataggcccagatacgagactggagtgtgtgcttatctggtggccgttggatgcgaatttaatcaagtccactaccataatggccaggtgtttcagcctaatcccctattcagttgtttatgtgtgagtggtgctatcggatgtaccccactgtttattccaaaactcgccggatcccactgtagcggtgccaagggcggtaagaagtccgaccagagtaattgtagtctggagcccctgttacaacagctgtcgacctcatataagacaatgccagcttatagaaacctcccgctaatctggaagaagaagtgcctcgtccaggccaccaagtggaccccgtgctcccgcacctgtgggatggggatctcaaatagggtcactaacgaaaactcaaactgtgagatgcgcaaagagaaaagattgtgttacatccagccttgcgatagcaatattttgaagactattaaaattcccaagggcaaaacctgtcagcccacgttccagttatccaaagccgaaaagtttgtcttcagtggctgttcaagtacacagtcgtacaagcctacattttgcggtatctgtctggacaagcggtgttgcatccccaataaatctaaaatgatcaccatccagtttgactgccccaacgagggcagttttaagtggaagatgttatggataactagttgtgtgtgtcagcgcaactgtagagaaccaggtgacattttcagcgaactaaagatcctatag

SEQ ID NO: 141681 - DNA, 996 bp, Artificial Sequence
  derived and/or modified sequence
atgaagatcagccggggccgggtgtgcctggagagcgagaacaaggacgccggagtagcaggccgcaagcagttctgtcattggccatgcaagtgcccgcaacagaaaccacgatgtccaccaggggtgagcttggtgcgcgatgggtgtggctgctgcaaaatctgtgccaaacagccaggagagatctgcaacgaagccgatctgtgtgatccacacaaaggcctttactgtgactacagcgtggaccgaccccgttacgaaactggtgtctgcgcctgtaagtccgttggatgcgagttcaaccaagttcactaccataatgggcaagttttccaacctaaccctctgtttagctgtctgtgcgttagtggagcgatcgggtgtacacccttattcatccccaagcttgcgggctcacactgtagcggagccaaaggaggcaagaagtctgatcagtccaactgcagcctcgaacctctgctgcaacagttgtcaacgtcatataaaacaatgcctgcttatcgcaatttaccactgatctggaaaaagaagtgccttgtgcaggccaccaagtggaccccgtgtagccgtacgtgtggtatgggcatttcaaaccgggttaccaacgagaacagcaattgcgaaatgcgcaaagaaaaacggttgtgttacatccagccttgcgatagtaatatactgaagacgatcaagattcctaagggaaagacttgtcaacctacatttcagctgagcaaggcggagaaatttgtctttagtgggtgtagctcaacccaatcctacaaacctacattttgtggcatatgtcttgataaacggtgttgcattcccaacaagagcaaaatgattacgatccagttcgattgtccgaacgagggctcgttcaaatggaaaatgctatggatcacctcttgcgtgtgtcaacggaactgccgggaacctggagatattttcagcgagctgaaaatcctctag

SEQ ID NO: 141682 - DNA, 1065 bp, Artificial Sequence
  derived and/or modified sequence
atgcagggcctgctgttcagcaccctgctgctggccggcctggcccaattctgttgccgggtacaaggcaccggccctcttgatactacaccagaggggcgccccggggaggtctctgacgcaccacagcgaaagcaattctgccattggccctgcaaatgtccccaacagaagcctcgctgtccaccgggcgtgtccttggtgagagatggatgtgggtgttgtaaaatctgtgccaagcaacctggcgagatctgtaacgaggctgacctgtgcgatccccacaaaggcctgtattgtgactatagcgtcgatcgcccacgatatgagaccggggtctgcgcctatctggtggccgtgggttgcgagtttaaccaggtgcactatcacaatggacaggtttttcaacccaacccgctgttctcctgtctgtgcgtctcaggcgccattggatgtacgccgcttttcatcccgaagctggctggatctcactgctcaggtgcaaagggcggcaagaagtcagatcagagtaactgttccctggagccactgctgcagcagctgtccacaagctacaaaacaatgccagcctatcgcaatttgccgctcatttggaagaaaaaatgtttggtgcaggctacgaaatggacgccttgtagtcgcacatgtggcatgggaattagcaatagggtaacaaacgagaattccaactgtgaaatgcggaaggaaaagagactctgctacattcaaccctgtgattctaacattttgaaaactatcaagatacctaagggaaagacctgccagcctaccttccagctctcaaaggccgagaaatttgtgttttccggttgttcttcaacccagtcatataaaccgaccttctgcggtatttgcctcgacaagagatgctgtatccccaataagagcaagatgattacaatacagttcgattgccctaatgagggaagcttcaagtggaagatgctgtggatcacaagttgtgtgtgccagaggaactgtagggagcctggcgacattttttccgaacttaagatcttatag

SEQ ID NO: 141683 - DNA, 693 bp, Artificial Sequence
  derived and/or modified sequence
atgcagggcctgctgttcagcaccctgctgctggccggcctggcccaattctgctgtcgcgtccaaggaacaggcccgctcgacacgactcccgaaggacgcccaggcgaagtgagtgacgcaccacaacgaaaacagttctgtcactggccttgcaagtgtccgcagcaaaaacctaggtgcccaccgggtgtctcattggtgcgtgatggatgtgggtgctgcaaaatctgcgcaaagcagcctggcgagatatgcaatgaagccgatctgtgtgacccacacaaagggctgtactgtgattactccgtggaccgtccacgatacgagaccggcgtatgtgcctatctcgtagctgtgggctgtgaatttaatcaggtgcattatcataacgggcaggtgttccagcctaacccgctcttctcttgcctctgtgtctcaggggctattggctgcacaccactttttatccctaaattagctggcagccattgctccggcgcaaaggggggaaagaaaagtgaccagtcaaactgctcgttagagcctctcctgcaacagctgtctacgagttacaagactatgcctgcttatcgtaatctccccctcatctggaaaaaaaacgtgctttgtaagcagcaaaacgggctgcctgcacccgaacatgtaggatgggaatatcttaccgggtag

SEQ ID NO: 141684 - DNA, 1065 bp, Artificial Sequence
  derived and/or modified sequence
atgcaagggctgctgttctctacccttctcctcgccggactagcacagttttgttgtcgcgtgcaaggcaccgggcctctggacaccacacccgaggggcgacccggtgaagtcagcgacgcccctcagcgcaaacaattctgtcactggccttgtaaatgtccccaacaaaagccaaggtgccctccaggcgtttccttggtccgggatgggtgcgggtgttgcaaaatttgcgccaagcagcccggagagatctgcaatgaagcggatctgtgcgatcctcacaagggcctctattgtgattatagtgtcgaccgtccaagatacgagacaggcgtgtgtgcctatctggtggctgtcggctgcgagttcaaccaggtacactatcacaacggacaggtgttccagccgaacccgctgttttcatgtctatgtgtgtctggggcaattgggtgtacccctttgtttattcctaagctcgccggatcccattgtagcggtgcgaaggggggaaagaagtccgatcagtccaattgttctctggaaccactgctgcagcagttaagtactagttacaagacgatgccggcttatcgtaatctcccattaatttggaagaagaagtgcttagtccaggccaccaaatggacaccctgttcgaggacctgcggcatgggaatctcaaatagggtcactaacgagaattcaaattgcgaaatgcggaaagagaaacggctgtgttatattcagccgtgtgacagcaatatcttaaagacaatcaagattcccaaggggaagacatgtcagcctacgtttcagctgtccaaggctgagaagttcgtgttttcaggctgttcttctacccaaagctataaaccaacattctgtggtatatgtctcgacaagaggtgttgcatccctaataagagcaagatgattacgatccagtttgactgccctaatgaaggctcctttaagtggaagatgctctggattacttcttgcgtctgtcagcggaactgtcgcgaacccggtgacatcttttctgagttgaaaatcttatag

SEQ ID NO: 141685 - DNA, 996 bp, Artificial Sequence
  derived and/or modified sequence
atgaaaatcagccgcggacgcgtgtgtctggaatctgaaaataaagacgccggagtggcaggccgtaaacagttttgtcattggccttgtaaatgcccccagcaaaaacctagatgtccccctggcgtgagcctggtaagagatggatgcggatgttgtaaaatatgtgccaaacagcccggtgaaatctgtaatgaagctgacctgtgtgatccacacaaggggttgtactgtgattactcagtggaccgcccacgctacgagaccggagtctgtgcttgcaagtccgtgggctgtgaattcaaccaggttcactaccacaacggacaagtgttccagccgaatcctctgttcagctgtctgtgtgtctctggcgcaattggttgtacgccactctttatccccaagctcgcaggttcccactgttctggggcaaaaggcggtaagaaatcagaccagagcaattgctcactggagccgctcctccagcagcttagtactagctacaagacgatgcctgcataccggaatctgccactcatctggaaaaagaaatgcctggtccaagccactaagtggaccccctgtagcaggacctgcggtatgggcattagtaatcgggtgaccaatgagaatagtaactgcgagatgcgaaaggagaagcgtctatgctacatccagccttgtgacagtaacatcctgaagactatcaaaatacccaaggggaagacctgccaacctactttccagctgtctaaagccgaaaagttcgtgttctccggatgcagctcgacccagagctacaagcccacattctgtggcatttgcttagataaacgctgttgtataccaaataagtcaaagatgataacaattcagtttgattgccccaatgaaggatcgttcaaatggaagatgttatggattacctcttgtgtttgccagcgcaactgtagagaaccaggtgatatcttttcggagctgaaaattttatag

SEQ ID NO: 141686 - DNA, 1065 bp, Artificial Sequence
  derived and/or modified sequence
atgcaaggtctcctattctctacgttgctcctcgctggcctcgcacagttctgttgccgcgtgcaggggacaggacctctcgacactacacccgagggacgacccggtgaggtgtcagatgcccctcagaggaagcagttttgccattggccatgcaaatgtccacagcagaaacccagatgtcccccaggcgttagcttggtgagagatggttgcggctgctgtaaaatctgtgccaagcagcccggagaaatctgtaacgaagcggatctgtgtgatccacacaaagggctgtattgcgattattcagtggatcggccaagatacgagaccggtgtgtgcgcctatttggtggccgtggggtgtgagttcaatcaggtgcattaccataatggacaggtcttccagcctaaccctctattctcctgcctgtgtgtctcaggcgcaatcgggtgtacaccactctttatccctaaactggctggctctcattgctccggagcaaagggtggtaaaaagagcgaccagtcaaactgtagcctggaacccctactgcagcagctgtctacctcgtacaagaccatgccagcatatagaaatcttccgctgatctggaaaaaaaagtgcctcgtccaagccaccaaatggacgccctgctcaagaacatgtggtatgggcatctcaaaccgagtgaccaatgaaaacagcaactgtgaaatgcggaaggagaagagattatgttacattcagccctgcgatagtaacatccttaaaacaatcaaaatccctaaaggcaaaacctgtcagcccacctttcagttgtctaaagccgaaaaatttgtgttctcaggatgcagctctacacagagttacaagcccaccttctgcgggatctgcttggataagcgttgttgcatccccaacaagtctaaaatgatcaccattcagttcgattgccccaacgaaggcagctttaagtggaaaatgctgtggattacttcctgtgtgtgtcagcgcaactgtcgcgaaccgggtgacatcttttctgaactgaaaatcttatag

SEQ ID NO: 141687 - DNA, 693 bp, Artificial Sequence
  derived and/or modified sequence
atgcagggtctgctgtttagtacgttgctactcgccggactggcccagttttgttgccgagtccagggcactggcccattggatacaacacccgaagggaggcctggtgaggtgtccgatgcgccacagaggaagcagttctgccattggccatgcaagtgtcctcagcaaaagccccgttgtccccctggtgtaagcctggttagggatggttgcggttgttgtaaaatctgcgccaaacaaccgggtgaaatctgtaatgaggcggatctttgtgatccgcataaggggctgtattgcgattactctgttgacagacctagatacgagactggtgtgtgcgcttatctcgtcgctgttggctgcgaattcaaccaggtgcactatcacaacggccaggtcttccagcccaatccattattcagctgcttgtgtgtgtcaggagccattggatgcacacccttgtttattccgaagctggccggttcacactgtagtggggcaaaggggggaaaaaaatccgatcagtctaattgttcactggagcctttgctgcagcagctgtctacaagttacaagactatgccagcctacagaaatctgccactgatctggaaaaaaaacgtgttgtgtaaacaacagaatggcctgccagctccggaacatgtgggatgggagtacttgaccggctag

SEQ ID NO: 141688 - DNA, 1065 bp, Artificial Sequence
  derived and/or modified sequence
atgcaagggctgctgttcagcacacttctccttgccggtctggctcagttctgttgccgtgtccagggcaccggaccactagatacgacacctgaaggacggcccggggaggtgtccgacgcacctcaaagaaagcaattttgtcattggccgtgcaaatgcccccagcagaagccccgttgcccccctggtgtgtcccttgttagagacggctgtggatgctgtaagatttgtgcaaagcagcccggcgagatctgcaatgaagctgacctatgcgatcctcacaagggcctgtattgtgactattctgttgataggccacggtacgagaccggtgtctgtgcctatctggtagcggtcggctgcgaattcaaccaggtgcattatcataatggacaggtgtttcagccaaatcccttattcagctgcctttgcgtgagtggcgctataggatgtactccactgtttatcccaaaactggccggatctcactgtagcggtgccaagggaggaaagaaaagcgatcagtccaactgttctttagagcctctactccagcagctgagtacttcgtacaaaacaatgcccgcttacaggaacttacctctgatctggaaaaagaagtgtctcgtccaggccactaaatggactccctgtagcaggacctgtggcatgggaatatctaacagggtgacaaacgaaaattcaaactgtgaaatgcggaaggaaaagcgcctatgctatatacaaccgtgtgactcaaacattctcaagacaatcaagattcccaaaggcaagacctgtcagccaacctttcaattaagcaaggccgaaaaatttgtgttctcgggttgctctagtacacagtcctacaagcccacattctgcgggatttgcctcgacaagcggtgctgcatccctaacaaaagtaaaatgattacaatccagtttgactgtcccaatgaaggcagttttaaatggaaaatgttgtggatcacgtcatgcgtgtgccaaaggaactgccgggaacctggcgacatttttagcgagctgaaaatactatag

SEQ ID NO: 141689 - DNA, 996 bp, Artificial Sequence
  derived and/or modified sequence
atgaagattagcaggggccgggtatgtcttgaatccgagaacaaggacgcaggcgtcgctggtcggaagcaattctgtcattggccatgcaagtgccctcagcagaaacccaggtgcccacccggagtgtccctggttagagatggctgtgggtgctgcaagatctgtgcgaagcagcccggtgagatctgcaacgaggcagatctgtgcgatccccacaaggggctttactgcgactattcagtggatcgaccccggtacgagacaggagtgtgcgcctgcaaaagcgttggctgtgaatttaaccaggtgcattatcacaacggtcaggtctttcaacccaaccccctcttctcatgcctatgcgtttctggggcaattggctgtactccactattcatacctaagcttgcggggagccactgcagtggagccaagggcggcaagaaatcagaccagtccaattgctcgctcgaaccattactccagcaactgtctactagctataagacgatgcccgcctatcgtaacttacccttaatctggaaaaagaaatgtttagtgcaggctacgaagtggacaccctgttcaagaacctgcggtatgggtatttccaacagagttaccaatgaaaacagtaattgtgagatgagaaaggagaagcgattatgctatatacagccctgcgactcaaacatcctcaaaacaattaaaattccaaaaggtaagacatgccagcccacattccagctcagtaaagcagaaaaatttgtgtttagtggatgcagttctactcagtcatacaaaccaactttttgtggaatctgcttagataaacgctgctgcattccaaataaatccaaaatgattactattcagttcgactgtccaaacgaaggctctttcaaatggaaaatgctgtggattacaagttgcgtttgtcagagaaactgccgggagccgggtgacatcttttcggaactcaagatcctgtag

SEQ ID NO: 141690 - DNA, 1065 bp, Artificial Sequence
  derived and/or modified sequence
atgcagggcctgctcttctccactctcctattagctggtctcgcacaattttgctgcagagtgcagggaaccggacccctggataccacaccagaaggtaggcccggggaggtttctgacgccccgcagagaaagcaattttgtcactggccatgcaagtgcccccagcagaagccacggtgtccccctggagtttcccttgtccgggatggctgcggctgctgcaaaatttgtgccaagcagcccggcgagatatgtaacgaggccgatctttgtgacccccataaggggctctactgtgattatagcgtagaccgacctagatacgaaaccggagtgtgcgcatacttagtggcagtagggtgtgagtttaaccaggttcactaccataacgggcaggtgttccagccaaaccctttgttttcatgcctttgtgtcagcggcgctatcggttgtacacccttgttcataccaaagctggccggttctcattgctccggggcgaagggagggaaaaaatccgaccaatctaactgctcacttgaaccgctgcttcaacaactgtccaccagctataagacgatgcccgcttaccgtaacttaccactcatctggaagaaaaagtgtttggttcaggcaacaaaatggaccccgtgcagcaggacctgcgggatgggaatttcaaacagggtgacaaacgagaattctaattgcgaaatgcgcaaagagaagcgcctctgttacatccaaccttgtgatagcaacattctaaagacgataaaaatcccaaaaggcaagacatgccaaccaacattccaactgtcaaaagccgaaaaattcgttttctctggatgttccagtactcagagctataagcccaccttttgcggaatttgcctggataagaggtgttgcatcccaaataaaagtaagatgattactatccagtttgattgcccaaatgagggaagtttcaaatggaaaatgctgtggataacatcgtgtgtttgccagaggaactgccgagagccaggagacatcttctccgaactgaaaattctgtag

SEQ ID NO: 141691 - DNA, 693 bp, Artificial Sequence
  derived and/or modified sequence
atgcagggacttcttttcagtacgttgttattggcagggttagctcagttctgctgccgcgtgcagggcaccggaccattggataccacccccgagggacgtcctggcgaggtgtctgacgcaccccaacgcaagcaattctgtcactggccctgcaagtgccctcagcagaaacctaggtgtcctcccggagtctcactggtgcgggacgggtgtggctgctgcaaaatatgtgcaaaacagcccggcgagatctgtaatgaggccgatctctgcgatccccacaaaggactgtattgcgattactcagtcgacaggcctagatatgaaacaggcgtctgcgcgtatcttgtcgcggtaggttgcgaattcaaccaggtgcactaccataacgggcaagtgttccagcccaatcctctattctcttgtctgtgtgtaagcggcgcaataggttgtactcctctgtttattcctaaattggcaggctcccattgcagcggcgctaaaggaggtaaaaaaagcgaccagtcaaactgctcactggagccactgctgcaacaactgagtacgtcttataagaccatgccagcctaccggaacctaccactgatctggaagaagaacgttctatgtaaacagcaaaacgggcttcctgctccagagcatgtcggatgggagtacttgaccggctag

SEQ ID NO: 141692 - DNA, 1065 bp, Artificial Sequence
  derived and/or modified sequence
atgcaaggtctattattctctaccctactgctggcaggattagcacagttttgttgccgtgtgcaggggacaggacctctcgacaccacaccagaaggacgtccaggagaggtgagcgatgcgccccagagaaaacaattctgccactggccatgtaaatgtccgcagcagaaaccacggtgccctccaggtgtcagtctggttagagatgggtgtggatgctgtaaaatctgtgccaagcagccaggcgagatttgcaacgaagccgatttatgcgatccacacaaagggctgtattgtgactattctgttgatagaccaagatacgagaccggggtgtgcgcttatttggtcgccgttggatgcgagtttaaccaggttcactatcacaatggccaggtcttccagcccaaccctctgtttagctgcctgtgcgtcagtggtgcaattggatgtactcctctctttattcccaaacttgcaggctcacattgcagcggggctaaaggcggaaaaaaaagcgatcagagcaattgctctttggaaccgctcctgcagcagctctctacctcctataaaacgatgcccgcatacagaaatctacccttgatctggaagaagaagtgcctggtgcaggccacgaagtggaccccgtgtagccggacctgtggcatgggaatttccaatcgtgtgaccaacgaaaattctaactgcgagatgagaaaagaaaaacgcctttgttatatccagccctgtgacagcaacatcttaaaaacaatcaaaataccaaaaggcaaaacctgtcagcccacctttcagctcagcaaggccgaaaagtttgtgttcagcggatgttcctccacccaatcctataagcccaccttctgcggtatctgcctcgacaaacgttgctgcatccccaacaagagcaagatgatcacaattcaattcgactgcccgaacgagggctcatttaaatggaaaatgctgtggataacctcgtgtgtgtgtcagagaaattgtcgcgaacctggggacatcttttccgaactcaagatcctttag

SEQ ID NO: 141693 - DNA, 996 bp, Artificial Sequence
  derived and/or modified sequence
atgaaaatatctcgaggaagggtgtgtttagagagtgagaacaaggacgctggtgtcgcaggaagaaaacagttctgccactggccatgtaagtgtccccagcagaagcctaggtgtccgccaggagtgagccttgttagagatggctgcggatgttgtaagatttgcgcgaagcaacctggcgagatatgtaacgaagctgatctgtgcgacccacacaaaggactctattgtgattactccgtcgatcggccacgatacgaaaccggagtttgcgcatgtaaatccgtaggctgtgaatttaatcaggtacattatcataacggtcaggtgtttcagcctaatcccctattttcttgtctgtgtgtcagcggcgcaatcggatgcacccccctctttatccccaaattggccggatcccattgcagcggtgctaaaggcgggaaaaagtccgatcagtctaattgctctctggagcctctcctacaacagctgtccacctcctataagacaatgcccgcctatcgcaacctacccttgatttggaagaaaaaatgtctggtccaggcaacaaagtggaccccatgctctcgcacctgcggtatgggtatttccaacagagttaccaatgaaaacagtaattgtgagatgagaaaggagaagcgattatgctatatacagccctgcgactcaaacatcctcaaaacaattaaaattccaaaaggtaagacatgccagcccacattccagctcagtaaagcagaaaaatttgtgtttagtggatgcagttctactcagtcatacaaaccaactttttgtggaatctgcttagataaacgctgctgcattccaaataaatccaaaatgattactattcagttcgactgtccaaacgaaggctcatttaagtggaaaatgctatggattacatcttgtgtttgccagaggaactgtagagaacccggagatatattcagcgagttgaaaattctgtag

SEQ ID NO: 141694 - DNA, 1065 bp, Artificial Sequence
  derived and/or modified sequence
atgcaaggtttgctgttttctacactgctgctggcaggattagcacagttctgttgccgcgtgcagggtacgggaccattagataccactccagaaggacggccaggtgaagttagtgacgcgccccaacgaaaacagttctgccactggccgtgtaagtgcccccagcagaagccgagatgcccccccggcgtgagcctggtccgcgacggatgtggatgctgcaaaatctgtgcgaagcaaccaggagagatctgtaacgaagctgatctgtgtgacccgcataaagggctctactgcgattatagcgtagaccgacctagatacgaaaccggagtgtgcgcatacttagtggcagtagggtgtgagtttaaccaggttcactaccataacgggcaggtgttccagccaaaccctttgttttcatgcctttgtgtcagcggcgctatcggttgtacacccttgttcataccaaagctggccggttctcattgctccggggcgaagggagggaaaaaatccgaccaatctaactgctcacttgaaccgctgcttcaacaactgtccaccagctataagacgatgcccgcttaccgtaacttacctcttatatggaagaaaaagtgcttagttcaagccaccaagtggaccccctgttcgcggacctgcgggatgggaatatcaaacagagtgacaaacgaaaactccaattgcgaaatgagaaaagagaaacgcctgtgttacattcagccctgtgacagcaatattctgaaaactataaagattcccaagggtaagacctgccagcccacatttcaactttcgaaggccgaaaagtttgtcttctccgggtgtagttccacacagtcttacaagccaactttctgcggcatttgcctggacaagcggtgctgcatccctaataagtcaaagatgattacgatacagttcgattgccccaacgaaggctcattcaagtggaaaatgctgtggataacaagctgcgtgtgccaacgcaattgcagagaacctggtgatatttttagcgaattaaaaattctttag

SEQ ID NO: 141695 - DNA, 693 bp, Artificial Sequence
  derived and/or modified sequence
atgcagggccttctgttttctacactccttctagcgggattggctcagttctgctgtagagtgcaggggaccggacccttggacacaacccctgagggaaggcccggcgaagtgagtgatgctccccaacgaaaacagttctgtcattggccatgtaagtgccctcagcaaaagccccggtgtccaccaggcgtatctttagtgcgggacggatgcggatgctgcaaaatttgcgctaaacagcccggcgagatctgcaatgaagccgacctgtgcgaccctcacaaaggcctttattgtgactattctgtagaccggcccaggtacgaaaccggcgtttgcgcctatttagtcgccgtgggctgtgagtttaatcaggtgcactaccataatggtcaggtattccaacccaacccactcttctcttgtctctgtgtctccggtgcaataggctgcactccgctctttatccctaaactcgcaggaagccactgtagcggcgcaaaaggcgggaaaaaaagtgaccagagtaactgctctttggagcccctgctgcagcaactttctacttcctacaaaacaatgccagcttatcggaacttgcccctgatttggaaaaagaacgttctctgcaaacaacaaaatggcctgccagcccctgaacacgttggatgggaatatcttacgggctag

SEQ ID NO: 141696 - DNA, 1062 bp, Artificial Sequence
  derived and/or modified sequence
atgaagatatctaggggcagagtgtgcttggagtcagagaacaaggacgctggtgtggctggtcgtaaacagttttgtcactggccctgcaaatgccctcagcagaagccccgttgccctcctggagtgagcctggtgagagatggctgtggatgctgtaaaatctgtgccaagcaaccaggggaaatctgcaatgaagctgacctctgtgacccacacaaagggctgtattgtgactactcagtagacaggcctaggtacgagactggagtgtgtgcatgtaagtctgttgggtgcgagttcaaccaggtacattatcataatggccaagtgtttcagcccaaccccttgttcagctgcctctgtgtgagtggggccattggatgcacacctctgttcataccaaagctggctggcagtcactgctctggagctaaaggtggaaagaagtctgatcagtcaaactgtagcctggaaccattactacagcagctttcaacaagctacaaaacaatgccagcttatagaaatctcccacttatttggaaaaaaaaatgtcttgtgcaagcaacaaaatggactccctgctccagaacatgtgggatgggaatatctaacagggtgaccaatgaaaacagcaactgtgaaatgagaaaagagaaaagactgtgttacattcagccttgcgacagcaatatattaaagacaataaagattcccaaaggaaaaacatgccaacctactttccaactctccaaagctgaaaaatttgtcttttctggatgctcaagtactcagagttacaaacccactttttgtggaatatgcttggataagagatgctgtatccctaataagtctaaaatgattactattcaatttgattgcccaaatgaggggtcatttaaatggaagatgctgtggattacatcttgtgtgtgtcagagaaactgcagagaacctggagatatattttctgagctcaagattctgtaaaaccaagcaaatgggggaaaagttagtcaatcctgtcatataataaaaaaattagtgagtataaaa

SEQ ID NO: 141697 - DNA, 1089 bp, Artificial Sequence
  derived and/or modified sequence
acatgcaggggctcctcttctccactcttctgcttgctggcctggcacagttctgctgcagggtacagggcactggaccattagatacaacacctgaaggaaggcctggagaagtgtcagatgcacctcagcgtaaacagttttgtcactggccctgcaaatgccctcagcagaagccccgttgccctcctggagtgagcctggtgagagatggctgtggatgctgtaaaatctgtgccaagcaaccaggggaaatctgcaatgaagctgacctctgtgacccacacaaagggctgtattgtgactactcagtagacaggcctaggtacgagactggagtgtgtgcataccttgtagctgttgggtgcgagttcaaccaggtacattatcataatggccaagtgtttcagcccaaccccttgttcagctgcctctgtgtgagtggggccattggatgcacacctctgttcataccaaagctggctggcagtcactgctctggagctaaaggtggaaagaagtctgatcagtcaaactgtagcctggaaccattactacagcagctttcaacaagctacaaaacaatgccagcttatagaaatctcccacttatttggaaaaaaaatgtcttgtgcaagcaacaaaatggactccctgctccagaacatgtgggatgggaatatctaacagggtgaccaatgaaaacagcaactgtgaaatgagaaaagagaaaagactgtgttacattcagccttgcgacagcaatatattaaagacaataaagattcccaaaggaaaaacatgccaacctactttccaactctccaaagctgaaaaatttgtcttttctggatgctcaagtactcagagttacaaacccactttttgtggaatatgcttggataagagatgctgtatccctaataagtctaaaatgattactattcaatttgattgcccaaatgaggggtcatttaaatggaagatgctgtggattacatcttgtgtgtgtcagagaaactgcagagaacctggagatatattttctgagctcaagattctgtaaaaccaagcaaatgggggaaaagt

SEQ ID NO: 141698 - protein, 367 aa, Artificial Sequence
  derived and/or modified sequence
MRWFLPWTLAAVTAAAASTVLATALSPAPTTMDFTPAPLEDTSSRPQFCKWPCECPPSPPRCPLGVSLITDGCECCKMCAQQLGDNCTEAAICDPHRGLYCDYSGDRPRYAIGVCAQVVGVGCVLDGVRYNNGQSFQPNCKYNCTCIDGAVGCTPLCLRVRPPRLWCPHPRRVSIPGHCCEQWVCEDDAKRPRKTAPRDTGAFDAVGEVEAWHRNCIAYTSPWSPCSTSCGLGVSTRISNVNAQCWPEQESRLCNLRPCDVDIHTLIKAGKKCLAVYQPEASMNFTLAGCISTRSYQPKYCGVCMDNRCCIPYKSKTIDVSFQCPDGLGFSRQVLWINACFCNLSCRNPNDIFADLESYPDFSEIAN

SEQ ID NO: 141699 - DNA, 1104 bp, Artificial Sequence
  derived and/or modified sequence
atgagatggttcctgccctggaccctggccgccgtgaccgccgccgccgccagcaccgtgctggccaccgccctgagccccgcccccaccaccatggacttcacccccgcccccctggaggacaccagcagcagaccccagttctgcaagtggccctgcgagtgcccccccagcccccccagatgccccctgggcgtgagcctgatcaccgacggctgcgagtgctgcaagatgtgcgcccagcagctgggcgacaactgcaccgaggccgccatctgcgacccccacagaggcctgtactgcgactacagcggcgacagacccagatacgccatcggcgtgtgcgcccaggtggtgggcgtgggctgcgtgctggacggcgtgagatacaacaacggccagagcttccagcccaactgcaagtacaactgcacctgcatcgacggcgccgtgggctgcacccccctgtgcctgagagtgagaccccccagactgtggtgcccccaccccagaagagtgagcatccccggccactgctgcgagcagtgggtgtgcgaggacgacgccaagagacccagaaagaccgcccccagagacaccggcgccttcgacgccgtgggcgaggtggaggcctggcacagaaactgcatcgcctacaccagcccctggagcccctgcagcaccagctgcggcctgggcgtgagcaccagaatcagcaacgtgaacgcccagtgctggcccgagcaggagagcagactgtgcaacctgagaccctgcgacgtggacatccacaccctgatcaaggccggcaagaagtgcctggccgtgtaccagcccgaggccagcatgaacttcaccctggccggctgcatcagcaccagaagctaccagcccaagtactgcggcgtgtgcatggacaacagatgctgcatcccctacaagagcaagaccatcgacgtgagcttccagtgccccgacggcctgggcttcagcagacaggtgctgtggatcaacgcctgcttctgcaacctgagctgcagaaaccccaacgacatcttcgccgacctggagagctaccccgacttcagcgagatcgccaactag

SEQ ID NO: 141700 - DNA, 1104 bp, Artificial Sequence
  derived and/or modified sequence
atgcggtggttcctgccctggaccctggccgcggttactgctgcagcggcctcaaccgttttggcgaccgcattaagtccagcccccactaccatggacttcacaccagctcccctcgaagacacatcatctcgaccacagttttgcaagtggccttgcgaatgccccccgtctcctcctaggtgcccattaggcgtctccctcatcactgatggctgcgaatgctgtaagatgtgcgcccaacaactcggcgacaattgcacggaggctgcgatctgtgacccccaccgcggtctatattgcgactactccggcgacagaccccggtacgcgatcggggtgtgcgctcaggttgtcggcgtggggtgcgtactggatggagtacgctataataatgggcagtccttccagcctaactgtaagtacaactgtacctgtatcgatggagctgtggggtgcacacctctatgcctgagggttaggcccccacggctttggtgcccccatccacgcagggttagcattcctggccactgttgtgagcagtgggtgtgtgaagatgatgccaagcggccacgtaaaaccgccccacgggatacgggcgcctttgatgctgttggcgaagtggaggcttggcacaggaattgtatcgcttacacatccccatggagtccatgctcaacctcatgtggcctgggagtttcaacccgtatttctaacgtaaacgcacagtgttggcccgagcaggagtcacgcctgtgtaatctcagaccctgcgacgtggacatccacacactgataaaagctgggaaaaagtgcttagcagtgtaccagcccgaggcttctatgaatttcacattggctgggtgcatttcaacacggagctatcagccgaagtactgcggcgtgtgcatggacaaccggtgctgtatcccctacaaatctaagaccatcgacgtaagcttccagtgtcctgatggtctgggatttagcagacaggtcctgtggattaatgcctgtttttgcaacctcagttgtcggaacccaaatgatattttcgcagatctagagtcatatcccgattttagtgagattgctaattag

SEQ ID NO: 141701 - DNA, 1104 bp, Artificial Sequence
  derived and/or modified sequence
atgcgctggttcctgccctggaccctggccgctgtgacagctgctgctgccagcacagtgctggccacagccctgagccctgcccccaccaccatggacttcaccccagcccccctggaggacaccagcagccggccccagttctgcaagtggccctgtgagtgcccccccagccccccacgctgccccctgggcgtgtccctcatcacagatggctgtgagtgctgcaagatgtgtgcccagcagctgggggacaactgcacagaggccgccatctgtgacccccaccggggcctgtactgtgactacagcggggaccggcccaggtatgccatcggcgtgtgtgcccaggtggtgggcgtgggctgtgtgctggatggagtgcgctacaacaacggccagagcttccagcccaactgcaagtacaactgcacctgcattgatggagctgtgggctgcacccccctgtgcctgcgggtgcggcccccccggctgtggtgcccccaccccaggagagtgtccatccctggccactgctgtgagcagtgggtgtgtgaagatgatgccaagaggcccaggaagacagccccccgggacaccggggcctttgatgctgtgggggaggtggaggcctggcacaggaactgcatcgcctacaccagcccctggagcccctgcagcaccagctgtggcctgggcgtgtccacccgcatcagcaatgtgaatgcccagtgctggccagagcaggagagccggctgtgcaacctgcggccctgtgatgtggacatccacaccctcatcaaggccggcaagaagtgcctggccgtgtaccagcctgaggcctccatgaacttcaccctggccggctgcatcagcaccaggagctaccagcccaagtactgcggcgtgtgcatggacaaccgctgctgcatcccctacaagagcaagaccattgatgtgtccttccagtgcccagatggcctgggcttcagccggcaggtgctgtggatcaatgcctgcttctgcaacctgagctgcaggaaccccaatgacatctttgctgacctggagagctacccagacttcagcgagatcgccaactag

SEQ ID NO: 141702 - DNA, 1104 bp, Artificial Sequence
  derived and/or modified sequence
atgcggtggttcctgccctggaccctggccgccgtgaccgccgccgcagctagcacggtgttagccactgctctgagcccagcccccacaaccatggacttcacccccgcaccccttgaagatacaagcagtagaccccagttctgcaagtggccctgtgaatgcccaccctctcctcctaggtgcccactaggagtgagcctgattaccgacggttgcgaatgctgcaagatgtgtgcacagcagctgggcgataattgtacagaagcagctatatgcgatcctcacagggggctttattgtgattacagtggagacaggccacggtacgctattggtgtttgcgctcaggttgtgggcgtggggtgcgtgttggacggtgtgagatataacaacggccagtcttttcagcccaactgcaaatacaactgcacctgcatagacggcgctgttggctgcacccccctttgcctccgagttcggcccccacggctgtggtgtccccaccctagacgtgtgtctattcccggtcattgttgtgagcagtgggtctgtgaagatgatgctaagcggccccggaagacggcgcctcgagacaccggtgcctttgatgccgtcggtgaagtagaagcctggcaccgtaactgcatcgcttatacgagcccgtggtctccttgtagcacttcatgcggcctcggcgtcagcacgagaatcagcaacgtaaatgcccagtgctggcctgagcaggaaagccggctttgtaatcttcgaccatgtgatgtggacatccataccctgatcaaagctgggaagaagtgcctagctgtgtatcagcctgaagcgtcaatgaacttcaccttggccggatgcatctcaactagatcgtatcagccaaaatattgcggagtatgcatggacaacaggtgctgcatcccatacaaatcaaaaaccattgacgtgagtttccagtgcccagacggtctggggttctctcgtcaggttctgtggattaacgcttgcttctgtaatttatcatgccggaatcctaatgacatctttgccgatctggagagctaccccgactttagcgagattgccaattag

SEQ ID NO: 141703 - DNA, 1104 bp, Artificial Sequence
  derived and/or modified sequence
atgcgatggtttctcccctggaccctggctgctgtgacggctgctgccgcttccaccgtcttggctaccgccctgtcccccgctccaactactatggactttacccctgccccactggaggatacttcttcgagacctcagttctgtaaatggccatgcgagtgtcccccatccccaccgagatgtccactgggcgtgtccctgattaccgacggatgtgagtgctgcaaaatgtgtgcccaacagctgggtgacaattgtacggaggctgctatctgcgatccacatagggggctgtactgtgactacagtggggatagacctagatatgccatcggcgtttgtgcacaagtggttggtgttggttgtgtgttggacggcgtgcgatacaacaatggtcagtccttccaaccgaactgtaagtataattgcacctgtatagatggagccgtggggtgcaccccactgtgcctgcgggtacgaccacccaggctctggtgtcctcacccgagaagggtctccattcctggacactgttgtgaacaatgggtgtgtgaagacgatgctaagcgccctcgcaaaacggccccacgtgacactggagcattcgatgcggtgggtgaagtggaggcctggcatcgtaactgcatagcatataccagcccatggtccccgtgcagtacatcgtgtggtcttggggtgagcacaaggattagcaacgttaacgcccaatgctggccggagcaggagagccgcctctgcaacctgaggccctgcgatgtcgacatccatacgttaatcaaagcaggcaagaagtgcctcgcagtttaccaaccggaggcctcgatgaacttcacccttgccggatgcatatctactcggagctatcagccgaagtattgtggagtttgcatggacaatcggtgctgcatcccatacaaatccaagactatcgacgtgtctttccagtgccctgatggcctgggattctccaggcaggtcttatggatcaacgcgtgtttttgtaatttgtcatgtcggaaccccaatgacatctttgcggatctggaatcctaccctgatttcagcgagatcgccaattag

SEQ ID NO: 141704 - DNA, 1564 bp, Artificial Sequence
  derived and/or modified sequence
atatctggtgctcctgatgggccggccagtctgggcccagctcccccgagaggtggtcggatcctctgggctgctcggtcgatgcctgtgccactgacgtccaggcatgaggtggttcctgccctggacgctggcagcagtgacagcagcagccgccagcaccgtcctggccacggccctctctccagcccctacgaccatggactttaccccagctccactggaggacacctcctcacgcccccaattctgcaagtggccatgtgagtgcccgccatccccaccccgctgcccgctgggggtcagcctcatcacagatggctgtgagtgctgtaagatgtgcgctcagcagcttggggacaactgcacggaggctgccatctgtgacccccaccggggcctctactgtgactacagcggggaccgcccgaggtacgcaataggagtgtgtgcacaggtggtcggtgtgggctgcgtcctggatggggtgcgctacaacaacggccagtccttccagcctaactgcaagtacaactgcacgtgcatcgacggcgcggtgggctgcacaccactgtgcctccgagtgcgccccccgcgtctctggtgcccccacccgcggcgcgtgagcatacctggccactgctgtgagcagtgggtatgtgaggacgacgccaagaggccacgcaagaccgcaccccgtgacacaggagccttcgatgctgtgggtgaggtggaggcatggcacaggaactgcatagcctacacaagcccctggagcccttgctccaccagctgcggcctgggggtctccactcggatctccaatgttaacgcccagtgctggcctgagcaagagagccgcctctgcaacttgcggccatgcgatgtggacatccatacactcattaaggcagggaagaagtgtctggctgtgtaccagccagaggcatccatgaacttcacacttgcgggctgcatcagcacacgctcctatcaacccaagtactgtggagtttgcatggacaataggtgctgcatcccctacaagtctaagactatcgacgtgtccttccagtgtcctgatgggcttggcttctcccgccaggtcctatggattaatgcctgcttctgtaacctgagctgtaggaatcccaatgacatctttgctgacttggaatcctaccctgacttctcagaaattgccaactaggcaggcacaaatcttgggtcttggggactaacccaatgcctgtgaagcagtcagcccttatggccaataacttttcaccaatgagccttagttaccctgatctggacccttggcctccatttctgtctctaaccattcaaatgacgcctgatggtgctgctcaggcccatgctatgagttttctccttgatatcattcagcatctactctaaagaaaaatgcctgtctctagctgttctggactacacccaagcctgatccagcctttccaagtcactagaagtcctgctggatcttgcctaaatcccaagaaatggaatcaggtagacttttaatatcactaatttcttcttt

SEQ ID NO: 141705 - protein, 428 aa, Artificial Sequence
  derived and/or modified sequence
MAKTVAYFYDPDVGNFHYGAGHPMKPHRLALTHSLVLHYGLYKKMIVFKPYQASQHDMCRFHSEDYIDFLQRVSPTNMQGFTKSLNAFNVGDDCPVFPGLFEFCSRYTGASLQGATQLNNKICDIAINWAGGLHHAKKFEASGFCYVNDIVIGILELLKYHPRVLYIDIDIHHGDGVQEAFYLTDRVMTVSFHKYGNYFFPGTGDMYEVGAESGRYYCLNVPLRDGIDDQSYKHLFQPVINQVVDFYQPTCIVLQCGADSLGCDRLGCFNLSIRGHGECVEYVKSFNIPLLVLGGGGYTVRNVARCWTYETSLLVEEAISEELPYSEYFEYFAPDFTLHPDVSTRIENQNSRQYLDQIRQTIFENLKMLNHAPSVQIHDVPADLLTYDRTDEADAEERGPEENYSRPEAPNEFYDGDHDNDKESDVEI

SEQ ID NO: 141706 - DNA, 1287 bp, Artificial Sequence
  derived and/or modified sequence
atggccaagaccgtggcctacttctacgaccccgacgtgggcaacttccactacggcgccggccaccccatgaagccccacagactggccctgacccacagcctggtgctgcactacggcctgtacaagaagatgatcgtgttcaagccctaccaggccagccagcacgacatgtgcagattccacagcgaggactacatcgacttcctgcagagagtgagccccaccaacatgcagggcttcaccaagagcctgaacgccttcaacgtgggcgacgactgccccgtgttccccggcctgttcgagttctgcagcagatacaccggcgccagcctgcagggcgccacccagctgaacaacaagatctgcgacatcgccatcaactgggccggcggcctgcaccacgccaagaagttcgaggccagcggcttctgctacgtgaacgacatcgtgatcggcatcctggagctgctgaagtaccaccccagagtgctgtacatcgacatcgacatccaccacggcgacggcgtgcaggaggccttctacctgaccgacagagtgatgaccgtgagcttccacaagtacggcaactacttcttccccggcaccggcgacatgtacgaggtgggcgccgagagcggcagatactactgcctgaacgtgcccctgagagacggcatcgacgaccagagctacaagcacctgttccagcccgtgatcaaccaggtggtggacttctaccagcccacctgcatcgtgctgcagtgcggcgccgacagcctgggctgcgacagactgggctgcttcaacctgagcatcagaggccacggcgagtgcgtggagtacgtgaagagcttcaacatccccctgctggtgctgggcggcggcggctacaccgtgagaaacgtggccagatgctggacctacgagaccagcctgctggtggaggaggccatcagcgaggagctgccctacagcgagtacttcgagtacttcgcccccgacttcaccctgcaccccgacgtgagcaccagaatcgagaaccagaacagcagacagtacctggaccagatcagacagaccatcttcgagaacctgaagatgctgaaccacgcccccagcgtgcagatccacgacgtgcccgccgacctgctgacctacgacagaaccgacgaggccgacgccgaggagagaggccccgaggagaactacagcagacccgaggcccccaacgagttctacgacggcgaccacgacaacgacaaggagagcgacgtggagatctag

SEQ ID NO: 141707 - DNA, 1287 bp, Artificial Sequence
  derived and/or modified sequence
atggctaaaacagtggcctatttctatgaccccgacgtgggcaattttcattatggcgcaggacaccctatgaagccccacagactggcactgacacactcactggtcctgcactatggcctctataaaaagatgatcgtctttaagccgtaccaggccagtcagcatgacatgtgccggttccactccgaggactacattgatttcctccagcgagtctcacctacaaacatgcaggggttcacgaagtcacttaatgcattcaatgtgggcgacgattgccctgtgttccccggactctttgaattctgctcaaggtatacgggcgcttccttgcagggcgccacccagctgaacaataagatctgcgacattgctattaattgggctggtggcctgcaccacgctaagaaattcgaggcaagcggattctgctatgtaaacgatatcgtgatcggaattctggaactactaaagtaccaccctagagtcctgtacatagacatagatattcaccacggggacggcgttcaggaagccttttacctcacggatcgcgtgatgacagtgtcttttcataaatacggaaactactttttcccaggcaccggggacatgtatgaagtgggggctgagtccgggcggtattactgcctaaacgtccctctgcgggacgggattgatgatcagagctacaagcacttgttccaaccagtaattaaccaggtagtcgacttctaccagcccacctgtattgttctgcaatgcggggctgatagcctgggctgtgatcgtcttgggtgttttaacctttccattagagggcacggcgagtgcgtggagtacgttaaatcgttcaatatcccattgcttgtgcttggcggaggtggctatactgtaaggaatgtggcccgatgttggacatacgagactagcttgctcgtcgaggaagctatcagtgaggaactgccttacagtgaatattttgaatattttgctcctgactttacgctgcatcctgacgtgtcaacacgcatcgaaaaccagaattcccgacaatacttggatcagatccggcagaccatcttcgaaaatttgaaaatgcttaaccatgcaccgtccgtgcagattcacgatgtgcccgctgatctgctgacctacgatagaactgatgaagccgacgcagaagaacgcgggcccgaggaaaattattccaggccggaggctccaaacgagttctacgacggggaccatgacaatgacaaagaaagcgatgtcgagatttag

SEQ ID NO: 141708 - DNA, 1959 bp, Artificial Sequence
  derived and/or modified sequence
agcacgcacggccggggaggggctggcggcggccgcgggcggcgggcggcggaggtgcggggcctgctcccgccggcaccatggccaagaccgtggcctatttctacgaccccgacgtgggcaacttccactacggagctggacaccctatgaagccccatcgcctggcattgacccatagcctggtcctgcattacggtctctataagaagatgatcgtcttcaagccataccaggcctcccaacatgacatgtgccgcttccactccgaggactacattgacttcctgcagagagtcagccccaccaatatgcaaggcttcaccaagagtcttaatgccttcaacgtaggcgatgactgcccagtgtttcccgggctctttgagttctgctcgcgttacacaggcgcatctctgcaaggagcaacccagctgaacaacaagatctgtgatattgccattaactgggctggtggtctgcaccatgccaagaagtttgaggcctctggcttctgctatgtcaacgacattgtgattggcatcctggagctgctcaagtaccaccctcgggtgctctacattgacattgacatccaccatggtgacggggttcaagaagctttctacctcactgaccgggtcatgacggtgtccttccacaaatacggaaattacttcttccctggcacaggtgacatgtatgaagtcggggcagagagtggccgctactactgtctgaacgtgcccctgcgggatggcattgatgaccagagttacaagcaccttttccagccggttatcaaccaggtagtggacttctaccaacccacgtgcattgtgctccagtgtggagctgactctctgggctgtgatcgattgggctgctttaacctcagcatccgagggcatggggaatgcgttgaatatgtcaagagcttcaatatccctctactcgtgctgggtggtggtggttatactgtccgaaatgttgcccgctgctggacatatgagacatcgctgctggtagaagaggccattagtgaggagcttccctatagtgaatacttcgagtactttgccccagacttcacacttcatccagatgtcagcacccgcatcgagaatcagaactcacgccagtatctggaccagatccgccagacaatctttgaaaacctgaagatgctgaaccatgcacctagtgtccagattcatgacgtgcctgcagacctcctgacctatgacaggactgatgaggctgatgcagaggagaggggtcctgaggagaactatagcaggccagaggcacccaatgagttctatgatggagaccatgacaatgacaaggaaagcgatgtggagatttaagagtggcttgggatgctgtgtcccaaggaatttcttttcacctcttggttgggctggagggaaaaggagtggctcctagagtcctgggggtcaccccagggcttttgctgactctgggaaagagtctggagaccacatttggttctcgaaccatctacctgcttttcctctctctcccaaggcctgacaatggtacctattagggatgagatacagacaaggatagctatctgggacattattggcagtgggccctggaggccagtccctagccccccttgccccttatttcttccctgcttccctcgaacccagagatttttgagggatgaacgggtagacaaggactgagattgcctctgacttcctcctcccctgggttctgacttcttcctccccttgcttccagggaagatgaagagagagagatttggaaggggctctggctccctaacacctgaatcccagatgatgggaagtatgttttcaagtgtggggaggatatgaaaatgttctgttctcacttttggctttatgtccattttaccactgtttttatccaataaactaagtcggtattttttgtaccttt

SEQ ID NO: 141709 - DNA, 1287 bp, Artificial Sequence
  derived and/or modified sequence
atggccaagacagtggcctacttctatgaccctgatgtgggcaacttccactacggggccggccaccccatgaagccccaccggctggccctgacccacagcctggtgctgcactacggcctgtacaagaagatgattgtgttcaagccctaccaggccagccagcacgacatgtgccgcttccacagcgaggactacatcgacttcctgcagagggtgagccccaccaacatgcagggcttcaccaagagcctgaatgccttcaacgtgggagatgactgccctgtgtttcctggcctgtttgagttctgcagccgctacaccggggccagcctgcagggcgccacccagctgaacaacaagatctgtgacatcgccatcaactgggccggcggcctgcaccacgccaagaagtttgaggccagcggcttctgctacgtgaatgacatcgtcatcggcatcctggagctgctgaagtaccacccccgggtgctgtacattgatattgacatccaccacggagatggagtgcaggaggccttctacctgacagacagagtgatgacagtgtccttccacaagtatggcaactacttcttccctggcactggagacatgtatgaggtgggcgctgagagcggccgctactactgcctgaatgtgcccctgagagatggcattgatgaccagagctacaagcacctgttccagcccgtcatcaaccaggtggtggacttctaccagcccacctgcatcgtgctgcagtgtggggctgacagcctgggctgtgaccggctgggctgcttcaacctgagcatccggggccacggggagtgtgtggagtatgtgaagagcttcaacatccccctgctggtgctgggcggcggcggctacacagtgagaaatgtggcccgctgctggacctatgagaccagcctgctggtggaggaggccatcagcgaggagctgccctacagcgagtactttgagtactttgccccagacttcaccctgcacccagatgtgtccaccagaattgagaaccagaacagccggcagtacctggaccagatccggcagaccatctttgagaacctgaagatgctgaaccacgcccccagcgtgcagatccatgatgtgcctgctgacctgctgacctatgacagaacagatgaagcagatgctgaggagcggggccctgaggagaactacagcaggcctgaggccccaaatgagttctatgatggagaccatgacaatgacaaggagagtgatgtggagatctag

SEQ ID NO: 141710 - DNA, 1287 bp, Artificial Sequence
  derived and/or modified sequence
atggccaagaccgtggcctacttctacgaccccgacgtgggcaacttccattacggcgctggtcatcctatgaaaccccatcgtctggccctgactcacagtctcgtgctccactacggtttgtataaaaagatgattgtattcaaaccgtaccaggcttcccagcacgacatgtgccgattccattccgaggattatattgatttccttcaaagggttagcccaaccaacatgcagggttttacgaaatcactgaatgcattcaacgtgggagatgactgtcccgtttttcccggcctcttcgaattttgcagccggtataccggagcatccctgcagggagcaactcagctgaacaataagatttgtgatattgcgattaactgggctggcggtttacatcatgcaaaaaaattcgaggcttccggtttttgttacgttaatgacatcgtgattgggatccttgaactgcttaaatatcacccacgggtactgtacattgatatcgacatacatcatggggacggcgtacaggaagccttttacctgaccgaccgcgtgatgaccgtgtccttccacaagtacggcaactatttttttccaggcaccggcgatatgtacgaggtcggagccgaatctggtaggtactactgtcttaatgtgcccctgcgggacggaattgatgaccaatcatataaacatctgttccaacccgtgatcaaccaggtagttgatttctatcagcccacctgcattgtgctccagtgcggcgcggacagcctgggatgtgacagattaggttgctttaacctttccatccgtggccacggagagtgtgtggaatacgttaagagcttcaacatcccactgctggtgctgggcggggggggttacactgtgagaaacgtggcacgatgctggacctatgaaacctctcttctcgtcgaagaagccatatcagaggagctgccctactcagagtactttgagtactttgctcccgattttacactccatcccgatgtctccacccgcattgaaaaccagaattcacggcagtacctcgaccagataagacagacaatttttgagaacctgaagatgttgaaccacgccccaagtgtgcaaatccatgatgtgccagctgacttgttaacttacgataggacagatgaagcagacgcagaagagcgaggtcctgaggagaactactccagacccgaggcccccaacgagttctatgatggcgaccatgacaatgacaaggagagcgacgtggagatttag

SEQ ID NO: 141711 - DNA, 1287 bp, Artificial Sequence
  derived and/or modified sequence
atggctaaaactgttgcgtacttttatgaccctgacgtgggtaacttccactacggggcagggcaccccatgaagcctcaccggttagcacttacccattctctcgtattacactacggactttataagaagatgatcgtgtttaagccttatcaggcaagccagcatgacatgtgtcggttccacagcgaagattatatagattttctccagcgggtaagtccaaccaacatgcaggggtttaccaagtctctgaacgccttcaacgtcggcgacgattgcccagttttccctggactgttcgagttctgctcaaggtacactggtgcctcactgcaaggtgcaacccagctgaacaacaaaatttgcgatattgccatcaattgggccggagggctgcaccatgccaagaagtttgaggcatctggattttgctacgtgaatgacatcgtcattggtatcttggagcttctcaagtaccacccacgcgtcctttacatcgacattgatatccaccatggggatggagttcaggaggctttttatctgacagaccgcgtgatgacagtgtcctttcacaaatacggcaactacttcttcccaggcaccggggacatgtacgaggtcggcgctgagtcaggtcgctattactgccttaatgttccgttgcgcgacggaatcgatgatcagagctacaagcacctttttcagcccgtaatcaatcaagtggtggacttttatcagccaacctgcattgttcttcaatgcggtgctgattcgctcggttgcgatcgccttggatgcttcaatctgtccatcaggggccatggcgaatgtgtggaatatgttaagtcctttaatattccactgctggtcttgggaggcggtgggtatacagtgaggaatgttgcccgatgctggacctacgagacctctcttcttgtggaagaggctatttccgaggaactgccatacagcgagtatttcgagtatttcgcccctgattttacgctgcaccctgatgtgagcaccaggattgagaaccagaattctcgtcagtacctggaccagatacgacagacgatatttgagaacctgaaaatgctgaaccatgcgccttccgtccaaatccatgatgttcccgcagatctgttgacctatgacaggaccgacgaggcagatgccgaagagcgaggaccagaggaaaattacagtaggcccgaggctcccaatgaattctacgatggggatcatgataatgacaaggagagcgacgtcgagatttag

SEQ ID NO: 141712 - protein, 832 aa, Artificial Sequence
  derived and/or modified sequence
MSEAGGAGPGGCGAGAGAGAGPGALPPQPAALPPAPPQGSPCAAAAGGSGACGPATAVAAAGTAEGPGGGGSARIAVKKAQLRSAPRAKKLEKLGVYSACKAEESCKCNGWKNPNPSPTPPRADLQQIIVSLTESCRSCSHALAAHVSHLENVSEEEMNRLLGIVLDVEYLFTCVHKEEDADTKQVYFYLFKLLRKSILQRGKPVVEGSLEKKPPFEKPSIEQGVNNFVQYKFSHLPAKERQTIVELAKMFLNRINYWHLEAPSQRRLRSPNDDISGYKENYTRWLCYCNVPQFCDSLPRYETTQVFGRTLLRSVFTVMRRQLLEQARQEKDKLPLEKRTLILTHFPKFLSMLEEEVYSQNSPIWDQDFLSASSRTSQLGIQTVINPPPVAGTISYNSTSSSLEQPNAGSSSPACKASSGLEANPGEKRKMTDSHVLEEAKKPRVMGDIPMELINEVMSTITDPAAMLGPETNFLSAHSARDEAARLEERRGVIEFHVVGNSLNQKPNKKILMWLVGLQNVFSHQLPRMPKEYITRLVFDPKHKTLALIKDGRVIGGICFRMFPSQGFTEIVFCAVTSNEQVKGYGTHLMNHLKEYHIKHDILNFLTYADEYAIGYFKKQGFSKEIKIPKTKYVGYIKDYEGATLMGCELNPRIPYTEFSVIIKKQKEIIKKLIERKQAQIRKVYPGLSCFKDGVRQIPIESIPGIRETGWKPSGKEKSKEPRDPDQLYSTLKSILQQVKSHQSAWPFMEPVKRTEAPGYYEVIRFPMDLKTMSERLKNRYYVSKKLFMADLQRVFTNCKEYNPPESEYYKCANILEKFFFSKIKEAGLIDK

SEQ ID NO: 141713 - DNA, 2499 bp, Artificial Sequence
  derived and/or modified sequence
atgtctgaggccggcggggccgggcccggaggttgcggcgccggggcaggtgccggcgctggccctggcgcattacctcctcagcctgccgctttgcctccagcccccccccaggggtctccctgcgccgcggccgcaggcggatccggagcctgtgggccggccaccgctgtggccgccgcaggcacagccgagggcccgggtggcggaggatctgcccgcatcgctgtgaaaaaggcccagctcaggtccgccccgcgggccaaaaaactggagaaacttggagtttattccgcctgtaaagccgaagagtcatgcaaatgtaacggttggaagaaccctaatccaagcccgaccccacctagagctgatttgcagcagattattgtcagcctgaccgaatcctgcagatcttgctctcacgccctcgcagcccacgtaagccacctggaaaacgttagcgaagaagagatgaacaggctgctcggtatcgtgcttgatgtcgaatatttgttcacatgcgtgcataaggaagaagacgctgacacgaaacaggtgtatttttacctcttcaagcttctccgcaaaagtatacttcagcgggggaaaccggtagtggaaggcagcctagagaagaaaccccccttcgaaaagccgtccatcgagcagggagtgaataactttgtgcagtacaagttcagtcatctcccagctaaagaaagacagaccatcgtggagctcgcaaaaatgtttctgaacagaatcaattactggcacctcgaggccccgtcccagcggcgactccgctctcctaacgacgacatctccggatataaggaaaattacacaagatggctctgttactgtaatgtccctcagttctgcgacagtctcccccggtatgagactacacaggtattcgggaggactctcctccgaagcgtgtttacagtcatgaggaggcagttattagagcaggctcggcaagagaaggataaactgccgcttgagaagcggacactgatattgacccacttcccaaagttcctctctatgctcgaggaggaggtgtattctcagaattccccaatatgggaccaggactttctgagtgcctcctccaggacttctcagctggggattcagaccgttattaacccacctccagtggcaggcactatctcctacaacagcacatctagttccctagaacagcctaatgcaggatccagctctccggcctgtaaggcctcatccggcctagaggccaaccctggagaaaagaggaagatgactgattcccacgtgctagaggaggcaaagaagcccagggtcatgggcgatatccctatggagctaattaatgaggtgatgagtacaattactgacccggcagccatgcttggacctgagacaaactttctctcggctcatagtgcgcgcgacgaagcggctcgcctcgaagaacgcagaggtgtgatcgaatttcatgtcgtgggcaactcccttaaccagaagccaaacaagaagatattaatgtggctggtcggtctgcagaatgtgttttctcatcagctgcctaggatgccaaaggagtatattactcggctggtattcgatcctaaacacaagaccctggctttaattaaagacggacgagtcataggtggcatctgctttcggatgttcccatctcagggattcaccgaaattgtgttttgtgccgtgacgtcaaatgaacaagttaaagggtacggcacacatcttatgaaccacctgaaggaatatcatattaagcatgacattctcaatttccttacatatgctgacgagtacgcaattggatactttaagaaacaagggttctcaaaggagatcaagataccgaagacaaagtatgttggatacataaaggactatgagggagcaaccctgatgggatgcgagttaaatccaagaatcccctacaccgaattctccgtgattatcaagaagcaaaaggagatcattaaaaagttaattgagagaaagcaggctcagattcgaaaagtctatcccggactgagctgcttcaaagacggagtgcgccagatccccatcgaaagtattccgggaatcagagagactggctggaaaccttccggtaaagagaaatctaaagagcctagggaccccgaccaactgtatagtacgctcaagtcgattctccagcaggtcaaatcccaccagtccgcttggccattcatggagcctgtcaagcgcaccgaggcgcccggctattatgaagtgatccggttcccaatggacctgaagaccatgagcgagcgcttgaaaaatcgttactacgtcagcaaaaaattatttatggccgacctgcaacgggtgtttaccaactgtaaagagtataacccacccgagtctgagtactataaatgcgccaacatcctcgagaagttttttttcagcaaaatcaaggaggcggggttaatagacaagtag

SEQ ID NO: 141714 - DNA, 2499 bp, Artificial Sequence
  derived and/or modified sequence
atgtctgaggccggcggggccggccctgggggctgtggggccggggccggggccggggccggccctggggccctgcccccccagcctgctgccctgcccccagccccaccccagggcagcccctgtgccgctgctgctgggggcagcggggcctgtggccctgccacagctgtggccgctgctggaacagctgagggccctgggggcggcggcagcgccagaattgctgtgaagaaggcccagctgcggagcgccccccgggccaagaagctggagaagctgggcgtgtacagcgcctgcaaggccgaggagagctgcaagtgcaatggctggaagaaccccaaccccagccccaccccacccagggctgacctgcagcagatcatcgtgtccctgacagagagctgccgcagctgcagccacgccctggccgcccacgtgagccacctggagaatgtgtctgaggaggagatgaaccggctgctgggcatcgtgctggatgtggagtacctgttcacctgtgtgcacaaggaggaggatgctgacaccaagcaggtgtacttctacctgttcaagctgctgaggaagagcatcctgcagaggggcaagcctgtggtggagggcagcctggagaagaagcccccatttgagaagcccagcattgagcagggcgtgaacaactttgtgcagtacaagttcagccacctgcctgccaaggagcggcagaccatcgtggagctggccaagatgttcctgaaccgcatcaactactggcacctggaggcccccagccagaggcggctgcggagccccaatgatgacatcagcggctacaaggagaactacacccgctggctgtgctactgcaatgtgccccagttctgtgacagcctgcccaggtatgagaccacccaggtgtttggaagaaccctgctgcggagcgtcttcaccgtgatgaggcggcagctgctggagcaggcccggcaggagaaggacaagctgcccctggagaagaggaccctcatcctgacccacttccccaagttcctgtccatgctggaggaggaggtgtacagccagaacagccccatctgggaccaggacttcctgagcgccagcagcaggaccagccagctgggcatccagaccgtcatcaaccccccacctgtggccggcaccatctcctacaacagcaccagcagcagcctggagcagcccaatgccggcagcagcagccctgcctgcaaggccagcagcggcctggaggccaaccctggagagaagaggaagatgacagacagccacgtgctggaggaggccaagaagccccgggtgatgggagacatccccatggagctgatcaatgaggtgatgagcaccatcacagatcctgctgccatgctgggccctgagaccaacttcctgagcgcccacagcgccagagatgaggccgcccggctggaggagcggcggggcgtcatcgagttccacgtggtgggcaacagcctgaaccagaagcccaacaagaagatcctgatgtggctggtgggcctgcagaatgtgttcagccaccagctgcccaggatgcccaaggagtacatcacccggctggtgtttgaccccaagcacaagaccctggccctgatcaaggatggccgggtgattggaggcatctgcttcaggatgttccccagccagggcttcacagaaattgtgttctgtgctgtgaccagcaatgagcaggtgaagggctacggcacccacctgatgaaccacctgaaggagtaccacatcaagcatgacatcctgaacttcctgacctatgcagatgaatatgccatcggctacttcaagaagcagggcttcagcaaggagatcaagatccccaagaccaagtatgtgggctacatcaaggactatgagggcgccaccctgatgggctgtgagctgaacccccgcatcccctacacagagttcagcgtcatcatcaagaagcagaaggagatcatcaagaagctgattgaaaggaagcaggcccagatcaggaaggtgtacccaggcctgagctgcttcaaggatggagtgcggcagatccccatcgagagcatccctggcatccgggagaccggctggaagcccagcggcaaggagaagagcaaggagccccgggaccctgaccagctgtacagcaccctgaagagcatcctgcagcaggtgaagagccaccagagcgcctggcccttcatggagcctgtgaagaggacagaggcccctggctactatgaagtcatccgcttccccatggacctgaagaccatgtctgagcggctgaagaaccgctactacgtgtccaagaagctgttcatggctgacctgcagagggtcttcaccaactgcaaggagtacaaccccccagagagcgagtactacaagtgtgccaacatcctggagaagttcttcttcagcaagatcaaggaggccggcctgattgacaagtag

SEQ ID NO: 141715 - DNA, 2499 bp, Artificial Sequence
  derived and/or modified sequence
atgagcgaggccggcggcgccggccccggcggctgcggcgccggcgccggggcaggagccggtcccggggccctccccccccagcccgcagcactgccgcctgcacccccacaaggctccccctgtgcggctgccgcaggaggctccggcgcctgcgggcccgccacagccgtggcagccgctggcaccgctgagggtcccggcggcggcggtagcgcacgaattgccgtgaagaaagcccagctccgttctgcacccagagccaagaaactggaaaagctgggagtgtatagcgcatgcaaagcggaagaatcgtgcaagtgcaatgggtggaagaatccaaatccatcccccaccccgcctagagctgatctccagcagattatagtgtcactgacagaatcttgcaggagctgctcacatgctctagccgctcacgtgagccacctggagaatgtctccgaagaggagatgaacaggctgctgggaatagtcttggatgtcgagtatctgtttacatgcgtccacaaagaagaagatgccgacaccaaacaagtgtatttttatctcttcaaactcctgcggaaaagcattctccagcgcggcaagcctgttgtcgaaggtagcttagagaaaaagccgccatttgaaaaaccttccatcgagcaaggagtaaacaatttcgtccagtacaagttctctcatctccctgccaaggagcgacaaacaattgtggagctcgccaaaatgtttctcaatcggatcaactactggcaccttgaggctccgtcgcaaaggagactgcgctcacctaatgacgacataagcggatataaagagaattacactaggtggttatgttactgcaacgtcccccagttttgcgacagtttgcccaggtatgaaaccacccaggtgtttggtcgaactctgctgaggtcagtttttactgttatgcggcggcagctgttggaacaggcacgccaggagaaggataagctgccactggaaaagcgtacccttatactcacccacttccctaagtttttgtccatgctggaggaagaggtgtatagccagaatagccctatatgggaccaagattttttatccgcctcaagcaggactagtcagttagggattcaaaccgtgatcaaccccccccctgtcgccggaactatctcttataactctacatctagctccctggagcagccaaacgcaggcagtagctctcctgcttgcaaagcttccagcgggctagaggcaaacccgggcgagaagagaaaaatgacagattcccacgttttggaggaggccaagaagccccgcgtaatgggcgatatccctatggagctgataaacgaagttatgagtacaattaccgaccctgcagctatgctaggccccgaaacaaatttcctgtcagcacactctgcaagagatgaggctgctagactcgaggaacggcggggcgtcattgaattccacgtggtcggtaactccctgaatcaaaaaccgaacaagaaaatcctgatgtggctggtaggactgcaaaatgtattcagtcatcagcttccgcgaatgcctaaggagtacatcacgagattggtttttgatccaaagcacaagactctggctcttataaaggacggccgggtaatcggcggaatatgttttcggatgttcccttcacagggattcaccgagatagtcttctgcgccgtgaccagcaatgaacaagttaaggggtatggtactcacctgatgaaccaccttaaggagtaccacatcaagcacgatatcttaaatttcctgacatatgctgatgagtatgcaattggatattttaaaaagcagggtttttccaaggagattaagatacccaaaaccaaatacgtcgggtatatcaaagattacgagggcgctactttgatgggctgtgagctgaatccaaggatcccgtatactgagtttagcgtgatcattaaaaagcagaaagaaattattaagaaactgatcgaacgcaaacaggctcagatcagaaaagtgtaccctggcctgagttgtttcaaggacggggtgcgccagataccgatcgaatccattcccggtattcgcgagaccggctggaaaccttcaggcaaggaaaagtcaaaagaacctcgcgatccggatcagctctacagtaccctgaagtccatcttacagcaggtcaagagtcaccagtccgcttggcctttcatggagcccgtgaaacggacggaagctccaggttattatgaagtgatccgcttcccaatggatttaaaaacaatgtctgagcgtttgaagaaccgctactatgtaagtaaaaagctgttcatggcagacctgcagagggtctttacaaattgcaaggaatacaacccaccagaatccgaatattacaagtgcgctaatattctggaaaaattcttcttcagcaaaatcaaagaggcaggtctgattgataagtag

SEQ ID NO: 141716 - DNA, 2499 bp, Artificial Sequence
  derived and/or modified sequence
atgtctgaagcagggggagcagggccaggtggatgtggtgcaggggcaggtgcaggggcagggcctggagctctgccccctcaacctgcagctcttcctccagccccacctcaaggctccccatgtgcagctgcggcaggcggttcgggtgcctgcggccctgcaacagcagtggccgcagcaggtactgccgagggccctggagggggaggcagtgcacggatagccgtgaagaaggcccagttgaggagcgcaccccgtgctaagaagctggagaagctcggtgtgtacagtgcttgtaaggcagaggagtcctgtaagtgcaatggttggaagaatccaaacccatcccctactcccccacgggcagatctgcagcagatcattgtgagcttaactgagtcatgccgctcatgctcccacgccttagccgctcacgtgtctcatctcgagaatgtttctgaggaggaaatgaacagactattggggattgttctggacgtcgagtacctctttacctgtgttcacaaggaggaggatgccgatactaaacaggtgtatttttacctctttaagctgctgaggaaatccattttgcaaaggggaaagcccgtcgtcgaaggtagcctggagaaaaagccaccttttgagaagccctccatcgagcaaggggtgaataacttcgttcagtacaagtttagccacttgccagctaaagaaaggcaaacaatagtcgagctcgctaagatgttcttaaatcgcattaactattggcatctggaagctccttcacaacgcaggctacgaagtccaaatgatgacattagtggatacaaggagaattatactcgctggttgtgctactgcaacgtgccacagttctgtgactccctgcctaggtatgagacaacccaagtgttcggcaggaccttgctcagatccgtgtttacggtaatgcgacggcagctccttgagcaggccaggcaggagaaggataaactgccattagaaaagcggacgcttatccttacacacttccctaagttcctatccatgctggaagaggaggtctactcccagaatagccctatttgggatcaagacttcctgagcgcctcttctagaactagccagctcgggatccagacagtgattaatccaccgccagtagctggcactatctcctacaacagcacgtcttcatctctggagcagcctaacgctggatcatcaagtcctgcttgcaaggcaagctctggtctagaggcaaacccaggcgaaaagcgcaagatgacagactcacacgtgctggaggaggccaagaagcccagagttatgggggacattccgatggagctaataaacgaggttatgtccaccatcacagacccggcagctatgctgggcccagaaaccaatttcctctctgctcatagcgcgcgtgacgaggccgcaagactggaggagagaaggggggtgatagagtttcatgtggtgggcaactcgctcaaccagaagccaaataagaaaatcctgatgtggctcgtcggactgcagaatgtcttttcccatcaactgcctcgcatgcccaaagaatacatcacccggcttgtcttcgaccctaagcataagactctcgcgcttatcaaggatgggagagtgatcgggggaatttgttttcgaatgtttccttcacagggattcacagaaattgtgttctgcgccgtgacttccaacgagcaggtgaagggttatggaacgcacctaatgaaccatctaaaggagtaccatattaagcacgatatcctgaactttcttacatacgccgacgaatacgctataggatactttaaaaaacagggcttcagcaaggaaattaagattcccaagactaagtatgtcgggtatatcaaggactacgagggtgcaactctgatgggctgcgaattgaatccaagaattccttacacggagttctctgtgataatcaagaagcagaaggagatcattaagaaactaatagaacggaagcaggcccagatcaggaaggtgtatccaggactgagctgtttcaaggatggcgttcggcaaatccctatcgagtccatccctggcatcagggaaaccggctggaagccctcaggaaaggagaagagcaaggagcccagggatcccgaccagctctattccacactgaagagcattctgcagcaggtgaaatcccaccaaagtgcatggccattcatggaacctgtgaagcgaaccgaagcccctggatactacgaggttatacgatttccaatggacctgaagaccatgtctgagagactgaaaaacagatactatgtcagcaaaaagcttttcatggctgacttgcagagggtgtttaccaactgtaaggagtataaccctcccgaaagtgaatattacaagtgcgctaatatccttgaaaagttcttcttttcaaaaattaaagaagccggacttattgacaagtag

SEQ ID NO: 141717 - DNA, 4833 bp, Artificial Sequence
  derived and/or modified sequence
ccgcgggcagcggaaaagaggccgtggggggcctcccagcgctggcagacaccgtgaggctggcagccgccggcacgcacacctagtccgcagtcccgaggaacatgtccgcagccagggcgcggagcagagtcccgggcaggagaaccaagggagggcgtgtgctgtggcggcggcggcagcggcagcggagccgctagtcccctccctcctgggggagcagctgccgccgctgccgccgccgccaccaccatcagcgcgcggggcccggccagagcgagccgggcgagcggcgcgctagggggagggcgggggcggggaggggggtgggcgaagggggcgggagggcgtggggggagggtctcgctctcccgactaccagagcccgagagggagaccctggcggcggcggcggcgcctgacactcggcgcctcctgccgtgctccggggcggcatgtccgaggctggcggggccgggccgggcggctgcggggcaggagccggggcaggggccgggcccggggcgctgcccccgcagcctgcggcgcttccgcccgcgcccccgcagggctccccctgcgccgctgccgccgggggctcgggcgcctgcggtccggcgacggcagtggctgcagcgggcacggccgaaggaccgggaggcggtggctcggcccgaatcgccgtgaagaaagcgcaactacgctccgctccgcgggccaagaaactggagaaactcggagtgtactccgcctgcaaggccgaggagtcttgtaaatgtaatggctggaaaaaccctaacccctcacccactccccccagagccgacctgcagcaaataattgtcagtctaacagaatcctgtcggagttgtagccatgccctagctgctcatgtttcccacctggagaatgtgtcagaggaagaaatgaacagactcctgggaatagtattggatgtggaatatctctttacctgtgtccacaaggaagaagatgcagataccaaacaagtttatttctatctatttaagctcttgagaaagtctattttacaaagaggaaaacctgtggttgaaggctctttggaaaagaaacccccatttgaaaaacctagcattgaacagggtgtgaataactttgtgcagtacaaatttagtcacctgccagcaaaagaaaggcaaacaatagttgagttggcaaaaatgttcctaaaccgcatcaactattggcatctggaggcaccatctcaacgaagactgcgatctcccaatgatgatatttctggatacaaagagaactacacaaggtggctgtgttactgcaacgtgccacagttctgcgacagtctacctcggtacgaaaccacacaggtgtttgggagaacattgcttcgctcggtcttcactgttatgaggcgacaactcctggaacaagcaagacaggaaaaagataaactgcctcttgaaaaacgaactctaatcctcactcatttcccaaaatttctgtccatgctagaagaagaagtatatagtcaaaactctcccatctgggatcaggattttctctcagcctcttccagaaccagccagctaggcatccaaacagttatcaatccacctcctgtggctgggacaatttcatacaattcaacctcatcttcccttgagcagccaaacgcagggagcagcagtcctgcctgcaaagcctcttctggacttgaggcaaacccaggagaaaagaggaaaatgactgattctcatgttctggaggaggccaagaaaccccgagttatgggggatattccgatggaattaatcaacgaggttatgtctaccatcacggaccctgcagcaatgcttggaccagagaccaattttctgtcagcacactcggccagggatgaggcggcaaggttggaagagcgcaggggtgtaattgaatttcacgtggttggcaattccctcaaccagaaaccaaacaagaagatcctgatgtggctggttggcctacagaacgttttctcccaccagctgccccgaatgccaaaagaatacatcacacggctcgtctttgacccgaaacacaaaacccttgctttaattaaagatggccgtgttattggtggtatctgtttccgtatgttcccatctcaaggattcacagagattgtcttctgtgctgtaacctcaaatgagcaagtcaagggctatggaacacacctgatgaatcatttgaaagaatatcacataaagcatgacatcctgaacttcctcacatatgcagatgaatatgcaattggatactttaagaaacagggtttctccaaagaaattaaaatacctaaaaccaaatatgttggctatatcaaggattatgaaggagccactttaatgggatgtgagctaaatccacggatcccgtacacagaattttctgtcatcattaaaaagcagaaggagataattaaaaaactgattgaaagaaaacaggcacaaattcgaaaagtttaccctggactttcatgttttaaagatggagttcgacagattcctatagaaagcattcctggaattagagagacaggctggaaaccgagtggaaaagagaaaagtaaagagcccagagaccctgaccagctttacagcacgctcaagagcatcctccagcaggtgaagagccatcaaagcgcttggcccttcatggaacctgtgaagagaacagaagctccaggatattatgaagttataaggttccccatggatctgaaaaccatgagtgaacgcctcaagaataggtactacgtgtctaagaaattattcatggcagacttacagcgagtctttaccaattgcaaagagtacaacccccctgagagtgaatactacaaatgtgccaatatcctggagaaattcttcttcagtaaaattaaggaagctggattaattgacaagtgattttttttcccctctgcttcttagaaactcaccaagcagtgtgcctaaagcaaggtggtttagttttttacaaagaattggacatgatgtattgaagagacttgtaaatgtaataattagcacttttgaaaaaacaaaaaacctccttttagcttttcagatatgtatttaaattgaagtcataggacatttttattttatggaatagattttaatctatttactactattaaggtaaattttctatggcatgtccattagctatttcatgatagatgattaggggtttcctcaaaacctgtgtgtgaggaaattgcacacagtagcaaaatttggggaaatccataacattttcagaccatgaatgaatgtttccatttttttctaatggaatgtgagagtttacttttattttattctgaaggactttaaggaagggatacatgattttaaaaaagcctgtaagaggtgaaatatgtgatgtttgaagtctctttatagactttttatatatattttttaaaacactcatctagatgaggtgctttgagcagttctgaaaaatgcagttccaggaaagcaactgctttggttcctaaggaagaaattctaaataatgcaaacttttaaaataagcatctaggtttttgataattctgtctacttacaacaaacttgttagtacataaccactattttaataattattttctctacacaaatgtgtaatatcatatttgactttgcttatgcaggccataagttccaaaagataatttccctgcccacaaaggcataaacttgaaaacacatgagattgaatcaacatgctttaataggaaaagatgtatggtctatatatgtatcaatctggtgaatcctcgttctaataaaggttctttttcttttctatgatacacacagccacgctgataatatgcaaatgaacattttcctttatgtctctccagataatgtttattgtctgaggtaaattaaattcccaccagggtttgctgtcagtattttaacacccacattagtatatgcgtccagggtcataaccccctaaaatccatcatgcaaccttattaatctgtcttgggattccagtttagtgcttggatttatttcctgattacactacatagaaaagtgagacatctgccattcccaactctgggaaaaccaactaatatacaaccatataaatgaaggccatcttgatggtctcaacactaatttttatgatgcaaatttatacactgatttttgtaaaggacaaagttttaaaagcgtatttaacttgatgttttctatcagcataaataaaatggtcatgaatagtcattaaaaacagttgccagtgataatctgcatgaaggaaaaagaaccctgcaaatggctattgagttggaagtattgtttttgatatgtaagagatattcagaatgctcacactgaaaatgcctcaactttttaaagtgtaagaaaccaccatgagtggtgtctagatttctaatgaagaatcatgatacagtttggattaagtatcttggactggttttaaacagtgctttgtaccggatctgctgaagcatctgtccagctggtatcctgtgaaagtttgttattttctgagtagacattcttatagagtattgtctttaaaatcagattgtctcttctatattgaaagcatttttatgttttctaatttaaaaattaatattttcttatagatattgtgcaataaagctgaagtagaatgtgtggtttttgcaaatgctttaacagctgataaaaattttacatttgtaaaattaatatattgtactggtacaaaatagttttaaattatattttaaaaagcttccaa

SEQ ID NO: 141718 - DNA, 2499 bp, Artificial Sequence
  derived and/or modified sequence
atgagcgaggccggcggcgccggccccggcggctgcggcgccggcgccggcgccggcgccggccccggcgccctgcccccccagcccgccgccctgccccccgcccccccccagggcagcccctgcgccgccgccgccggcggcagcggcgcctgcggccccgccaccgccgtggccgccgccggcaccgccgagggccccggcggcggcggcagcgccagaatcgccgtgaagaaggcccagctgagaagcgcccccagagccaagaagctggagaagctgggcgtgtacagcgcctgcaaggccgaggagagctgcaagtgcaacggctggaagaaccccaaccccagccccaccccccccagagccgacctgcagcagatcatcgtgagcctgaccgagagctgcagaagctgcagccacgccctggccgcccacgtgagccacctggagaacgtgagcgaggaggagatgaacagactgctgggcatcgtgctggacgtggagtacctgttcacctgcgtgcacaaggaggaggacgccgacaccaagcaggtgtacttctacctgttcaagctgctgagaaagagcatcctgcagagaggcaagcccgtggtggagggcagcctggagaagaagccccccttcgagaagcccagcatcgagcagggcgtgaacaacttcgtgcagtacaagttcagccacctgcccgccaaggagagacagaccatcgtggagctggccaagatgttcctgaacagaatcaactactggcacctggaggcccccagccagagaagactgagaagccccaacgacgacatcagcggctacaaggagaactacaccagatggctgtgctactgcaacgtgccccagttctgcgacagcctgcccagatacgagaccacccaggtgttcggcagaaccctgctgagaagcgtgttcaccgtgatgagaagacagctgctggagcaggccagacaggagaaggacaagctgcccctggagaagagaaccctgatcctgacccacttccccaagttcctgagcatgctggaggaggaggtgtacagccagaacagccccatctgggaccaggacttcctgagcgccagcagcagaaccagccagctgggcatccagaccgtgatcaaccccccccccgtggccggcaccatcagctacaacagcaccagcagcagcctggagcagcccaacgccggcagcagcagccccgcctgcaaggccagcagcggcctggaggccaaccccggcgagaagagaaagatgaccgacagccacgtgctggaggaggccaagaagcccagagtgatgggcgacatccccatggagctgatcaacgaggtgatgagcaccatcaccgaccccgccgccatgctgggccccgagaccaacttcctgagcgcccacagcgccagagacgaggccgccagactggaggagagaagaggcgtgatcgagttccacgtggtgggcaacagcctgaaccagaagcccaacaagaagatcctgatgtggctggtgggcctgcagaacgtgttcagccaccagctgcccagaatgcccaaggagtacatcaccagactggtgttcgaccccaagcacaagaccctggccctgatcaaggacggcagagtgatcggcggcatctgcttcagaatgttccccagccagggcttcaccgagatcgtgttctgcgccgtgaccagcaacgagcaggtgaagggctacggcacccacctgatgaaccacctgaaggagtaccacatcaagcacgacatcctgaacttcctgacctacgccgacgagtacgccatcggctacttcaagaagcagggcttcagcaaggagatcaagatccccaagaccaagtacgtgggctacatcaaggactacgagggcgccaccctgatgggctgcgagctgaaccccagaatcccctacaccgagttcagcgtgatcatcaagaagcagaaggagatcatcaagaagctgatcgagagaaagcaggcccagatcagaaaggtgtaccccggcctgagctgcttcaaggacggcgtgagacagatccccatcgagagcatccccggcatcagagagaccggctggaagcccagcggcaaggagaagagcaaggagcccagagaccccgaccagctgtacagcaccctgaagagcatcctgcagcaggtgaagagccaccagagcgcctggcccttcatggagcccgtgaagagaaccgaggcccccggctactacgaggtgatcagattccccatggacctgaagaccatgagcgagagactgaagaacagatactacgtgagcaagaagctgttcatggccgacctgcagagagtgttcaccaactgcaaggagtacaacccccccgagagcgagtactacaagtgcgccaacatcctggagaagttcttcttcagcaagatcaaggaggccggcctgatcgacaagtag

SEQ ID NO: 141719 - protein, 845 aa, Artificial Sequence
  derived and/or modified sequence
MSDDIDWLRSHRGVCKVDLYNPEGQQDQDRKVICFVDVSTLNVEDKDYKDAASSSSEGNLNLGSLEEKEIIVIKDTEKKDQSKTEGSVCLFKQAPSDPVSVLNWLLSDLQKYALGFQHALSPSTSTCKHKVGDTEGEYHRASSENCYSVYADQVNIDYLMNRPQNLRLEMTAAKNTNNNQSPSAPPAKPPSTQRAVISPDGECSIDDLSFYVNRLSSLVIQMAHKEIKEKLEGKSKCLHHSICPSPGNKERISPRTPASKIASEMAYEAVELTAAEMRGTGEESREGGQKSFLYSELSNKSKSGDKQMSQRESKEFADSISKGLMVYANQVASDMMVSLMKTLKVHSSGKPIPASVVLKRVLLRHTKEIVSDLIDSCMKNLHNITGVLMTDSDFVSAVKRNLFNQWKQNATDIMEAMLKRLVSALIGEEKETKSQSLSYASLKAGSHDPKCRNQSLEFSTMKAEMKERDKGKMKSDPCKSLTSAEKVGEHILKEGLTIWNQKQGNSCKVATKACSNKDEKGEKINASTDSLAKDLIVSALKLIQYHLTQQTKGKDTCEEDCPGSTMGYMAQSTQYEKCGGGQSAKALSVKQLESHRAPGPSTCQKENQHLDSQKMDMSNIVLMLIQKLLNENPFKCEDPCEGENKCSEPRASKAASMSNRSDKAEEQCQEHQELDCTSGMKQANGQFIDKLVESVMKLCLIMAKYSNDGAALAELEEQAASANKPNFRGTRCIHSGAMPQNYQDSLGHEVIVNNQCSTNSLQKQLQAVLQWIAASQFNVPMLYFMGDKDGQLEKLPQVSAKAAEKGYSVGGLLQEVMKFAKERQPDEAVGKVARKQLLDWLLANL

SEQ ID NO: 141720 - protein, 854 aa, Artificial Sequence
  derived and/or modified sequence
MMAYSDTTMMSDDIDWLRSHRGVCKVDLYNPEGQQDQDRKVICFVDVSTLNVEDKDYKDAASSSSEGNLNLGSLEEKEIIVIKDTEKKDQSKTEGSVCLFKQAPSDPVSVLNWLLSDLQKYALGFQHALSPSTSTCKHKVGDTEGEYHRASSENCYSVYADQVNIDYLMNRPQNLRLEMTAAKNTNNNQSPSAPPAKPPSTQRAVISPDGECSIDDLSFYVNRLSSLVIQMAHKEIKEKLEGKSKCLHHSICPSPGNKERISPRTPASKIASEMAYEAVELTAAEMRGTGEESREGGQKSFLYSELSNKSKSGDKQMSQRESKEFADSISKGLMVYANQVASDMMVSLMKTLKVHSSGKPIPASVVLKRVLLRHTKEIVSDLIDSCMKNLHNITGVLMTDSDFVSAVKRNLFNQWKQNATDIMEAMLKRLVSALIGEEKETKSQSLSYASLKAGSHDPKCRNQSLEFSTMKAEMKERDKGKMKSDPCKSLTSAEKVGEHILKEGLTIWNQKQGNSCKVATKACSNKDEKGEKINASTDSLAKDLIVSALKLIQYHLTQQTKGKDTCEEDCPGSTMGYMAQSTQYEKCGGGQSAKALSVKQLESHRAPGPSTCQKENQHLDSQKMDMSNIVLMLIQKLLNENPFKCEDPCEGENKCSEPRASKAASMSNRSDKAEEQCQEHQELDCTSGMKQANGQFIDKLVESVMKLCLIMAKYSNDGAALAELEEQAASANKPNFRGTRCIHSGAMPQNYQDSLGHEVIVNNQCSTNSLQKQLQAVLQWIAASQFNVPMLYFMGDKDGQLEKLPQVSAKAAEKGYSVGGLLQEVMKFAKERQPDEAVGKVARKQLLDWLLANL

SEQ ID NO: 141721 - protein, 471 aa, Artificial Sequence
  derived and/or modified sequence
MSDDIDWLRSHRGVCKVDLYNPEGQQDQDRKVICFVDVSTLNVEDKDYKDAASSSSEGNLNLGSLEEKEIIVIKDTEKKDQSKTEGSVCLFKQAPSDPVSVLNWLLSDLQKYALGFQHALSPSTSTCKHKVGDTEGEYHRASSENCYSVYADQVNIDYLMNRPQNLRLEMTAAKNTNNNQNTCEEDCPGSTMGYMAQSTQYEKCGGGQSAKALSVKQLESHRAPGPSTCQKENQHLDSQKMDMSNIVLMLIQKLLNENPFKCEDPCEGENKCSEPRASKAASMSNRSDKAEEQCQEHQELDCTSGMKQANGQFIDKLVESVMKLCLIMAKYSNDGAALAELEEQAASANKPNFRGTRCIHSGAMPQNYQDSLGHEVIVNNQCSTNSLQKQLQAVLQWIAASQFNVPMLYFMGDKDGQLEKLPQVSAKAAEKGYSVGGLLQEVMKFAKERQPDEAVGKVARKQLLDWLLANL

SEQ ID NO: 141722 - protein, 254 aa, Artificial Sequence
  derived and/or modified sequence
MSDDIDWLRSHRGVCKVDLYNPEGQQDQDRKVICFVDVSTLNVEDKDYKDAASSSSEGNLNLGSLEEKEIIVIKDTEKKDQSKTEGSVCLFKQAPSDPVSVLNWLLSDLQKYALGFQHALSPSTSTCKHKVGDTEGEYHRASSENCYSVYADQVNIDYLMNRPQNLRLEMTAAKNTNNNQSPSAPPAKPPSTQRAVISPDGECSIDDLSFYVNRLSSLVIQMAHKEIKEKLEGKSKCLHHSICPSPGNKERISP

SEQ ID NO: 141723 - protein, 213 aa, Artificial Sequence
  derived and/or modified sequence
MSDDIDWLRSHRGVCKVDLYNPEGQQDQDRKVICFVDVSTLNVEDKDYKDAASSSSEGNLNLGSLEEKEIIVIKDTEKKDQSKTEGSVCLFKQAPSDPVSVLNWLLSDLQKYALGFQHALSPSTSTCKHKVGDTEGEYHRASSENCYSVYADQVNIDYLMNRPQNLRLEMTAAKNTNNNQNTCEEDCPGSTMGYMAQSTQYEKCGGGQSAKAL

SEQ ID NO: 141724 - DNA, 2538 bp, Artificial Sequence
  derived and/or modified sequence
atgagcgacgacatcgactggctgagaagccacagaggcgtgtgcaaggtggacctgtacaaccccgagggccagcaggaccaggacagaaaggtgatctgcttcgtggacgtgagcaccctgaacgtggaggacaaggactacaaggacgccgccagcagcagcagcgagggcaacctgaacctgggcagcctggaggagaaggagatcatcgtgatcaaggacaccgagaagaaggaccagagcaagaccgagggcagcgtgtgcctgttcaagcaggcccccagcgaccccgtgagcgtgctgaactggctgctgagcgacctgcagaagtacgccctgggcttccagcacgccctgagccccagcaccagcacctgcaagcacaaggtgggcgacaccgagggcgagtaccacagagccagcagcgagaactgctacagcgtgtacgccgaccaggtgaacatcgactacctgatgaacagaccccagaacctgagactggagatgaccgccgccaagaacaccaacaacaaccagagccccagcgccccccccgccaagccccccagcacccagagagccgtgatcagccccgacggcgagtgcagcatcgacgacctgagcttctacgtgaacagactgagcagcctggtgatccagatggcccacaaggagatcaaggagaagctggagggcaagagcaagtgcctgcaccacagcatctgccccagccccggcaacaaggagagaatcagccccagaacccccgccagcaagatcgccagcgagatggcctacgaggccgtggagctgaccgccgccgagatgagaggcaccggcgaggagagcagagagggcggccagaagagcttcctgtacagcgagctgagcaacaagagcaagagcggcgacaagcagatgagccagagagagagcaaggagttcgccgacagcatcagcaagggcctgatggtgtacgccaaccaggtggccagcgacatgatggtgagcctgatgaagaccctgaaggtgcacagcagcggcaagcccatccccgccagcgtggtgctgaagagagtgctgctgagacacaccaaggagatcgtgagcgacctgatcgacagctgcatgaagaacctgcacaacatcaccggcgtgctgatgaccgacagcgacttcgtgagcgccgtgaagagaaacctgttcaaccagtggaagcagaacgccaccgacatcatggaggccatgctgaagagactggtgagcgccctgatcggcgaggagaaggagaccaagagccagagcctgagctacgccagcctgaaggccggcagccacgaccccaagtgcagaaaccagagcctggagttcagcaccatgaaggccgagatgaaggagagagacaagggcaagatgaagagcgacccctgcaagagcctgaccagcgccgagaaggtgggcgagcacatcctgaaggagggcctgaccatctggaaccagaagcagggcaacagctgcaaggtggccaccaaggcctgcagcaacaaggacgagaagggcgagaagatcaacgccagcaccgacagcctggccaaggacctgatcgtgagcgccctgaagctgatccagtaccacctgacccagcagaccaagggcaaggacacctgcgaggaggactgccccggcagcaccatgggctacatggcccagagcacccagtacgagaagtgcggcggcggccagagcgccaaggccctgagcgtgaagcagctggagagccacagagcccccggccccagcacctgccagaaggagaaccagcacctggacagccagaagatggacatgagcaacatcgtgctgatgctgatccagaagctgctgaacgagaaccccttcaagtgcgaggacccctgcgagggcgagaacaagtgcagcgagcccagagccagcaaggccgccagcatgagcaacagaagcgacaaggccgaggagcagtgccaggagcaccaggagctggactgcaccagcggcatgaagcaggccaacggccagttcatcgacaagctggtggagagcgtgatgaagctgtgcctgatcatggccaagtacagcaacgacggcgccgccctggccgagctggaggagcaggccgccagcgccaacaagcccaacttcagaggcaccagatgcatccacagcggcgccatgccccagaactaccaggacagcctgggccacgaggtgatcgtgaacaaccagtgcagcaccaacagcctgcagaagcagctgcaggccgtgctgcagtggatcgccgccagccagttcaacgtgcccatgctgtacttcatgggcgacaaggacggccagctggagaagctgccccaggtgagcgccaaggccgccgagaagggctacagcgtgggcggcctgctgcaggaggtgatgaagttcgccaaggagagacagcccgacgaggccgtgggcaaggtggccagaaagcagctgctggactggctgctggccaacctgtag

SEQ ID NO: 141725 - DNA, 2864 bp, Artificial Sequence
  derived and/or modified sequence
agtctggtccaacagctgacaggggtggcagccaactgcaggtgcccaagaacttggcacttctcagttccatctaaaggggcacatctcccttctgggtgtcacgttttcagccaaacatctaaaagaacttcatcatcaagatgtctgatgatattgactggttacgcagccacaggggtgtgtgcaaggtagatctctacaacccagaaggacagcaagatcaggaccggaaagtgatatgctttgtcgatgtgtccaccctgaatgtagaagataaagattacaaggatgctgctagttccagctcagaaggcaacttaaacctgggaagtctggaagaaaaagagattatcgtgatcaaggacactgagaagaaagaccagtctaagacagagggatctgtatgccttttcaaacaagctccctctgatcctgtaagtgtcctcaactggcttctcagtgatctccagaagtatgccttgggtttccaacatgcactgagcccctcaacctctacctgtaaacataaagtaggagacacagagggcgaatatcacagagcatcctctgagaactgctacagtgtctatgccgatcaagtgaacatagattatttgatgaacagacctcaaaacctacgtctagaaatgacagcagctaaaaacaccaacaataatcaaagtccttcagctcctccagccaaacctcctagcactcagagagcagtcatttcccctgatggagaatgttctatagatgacctttccttctacgtcaaccgactatcttctctggtaatccagatggcccataaggaaatcaaggagaagttggaaggtaaaagcaaatgccttcatcattcaatctgtccatcccctgggaacaaagagagaatcagtccccgaactcctgcgagcaagattgcttctgaaatggcctatgaagctgtggaactgacagctgcagaaatgcgtggcactggagaggagtccagggaaggtggccagaaaagctttctatatagcgaattatccaacaagagcaaaagtggagacaaacagatgtcccagagagagagcaaagaatttgcagattccatcagcaaggggctcatggtttatgcaaatcaggtggcatctgacatgatggtctctctcatgaagaccttgaaagtgcacagctctgggaagccaattccagcatctgtggtcctgaagagggtgttgctaaggcacaccaaggagattgtgtccgatttgattgattcttgcatgaagaacctgcataatattactggggtcctgatgactgactcagactttgtctcagctgtcaagagaaatctgttcaaccagtggaaacaaaatgctacagacatcatggaggccatgctgaagcgcttggtcagtgcccttataggtgaggagaaggagactaagtctcagagtctgtcatatgcatctttaaaagctgggtcccatgatcccaaatgcaggaatcagagtcttgaattctccaccatgaaagctgaaatgaaagagagggacaaaggcaaaatgaaatcagacccatgcaagtcactgactagtgctgagaaagtcggtgaacacattctcaaagagggcctaaccatctggaaccaaaagcaaggaaactcatgcaaggtggctaccaaagcatgcagcaataaagatgagaaaggagaaaagatcaatgcttccacagattcactggccaaggacctgattgtctctgcccttaagctgatccagtaccatctgacccagcagactaagggcaaagatacatgtgaagaagactgtcctggttccaccatgggctatatggctcagagtactcaatatgaaaagtgtggaggtggccaaagtgccaaagcactttcagtgaaacaactagaatctcacagagcccctggaccatccacctgtcaaaaggagaaccaacacctggactcccagaaaatggatatgtcaaacatcgttctaatgctgattcagaaactgcttaatgagaaccccttcaaatgtgaggatccatgcgaaggtgagaacaagtgttctgagcccagggcaagcaaagcagcttccatgtccaacagatctgacaaagcggaagaacaatgccaggagcatcaagaacttgactgtaccagtgggatgaagcaagcgaacgggcaatttatagataaactagtagaatctgtgatgaagctctgccttatcatggctaagtatagcaacgatggggcagcccttgctgagttggaagaacaagcagcctcggcaaataagcccaatttcaggggcaccagatgcattcacagtggtgcaatgccacagaactatcaagactctcttggacatgaagtaattgtcaataatcagtgctctacaaatagcttgcagaagcagctccaggctgtcctgcagtggattgcagcctcccagtttaacgtgcccatgctctacttcatgggagataaggatggacaactggaaaagcttcctcaggtttcagctaaagcagcagagaaggggtacagtgtaggaggtcttcttcaagaggtcatgaagtttgccaaggaacggcaaccagatgaagctgtgggaaaggtggccaggaaacagttgctggactggctgctcgctaacctgtgagctgatccttgactcctcttcatcttagcccccctagcagcattccatcccagccagagcacccccaccatcaggccagtcaactgcacaatacacaactgtatttcccaatacacttgagcagttgcctgtgaatgtaagaggtgtcaacaaactgggaaataaaataaaaaaaaataataa

SEQ ID NO: 141726 - DNA, 2538 bp, Artificial Sequence
  derived and/or modified sequence
atgtcagatgacatcgactggcttaggtctcacaggggtgtgtgcaaagtggatttgtataatccagagggacaacaggaccaggatagaaaggtaatatgcttcgttgacgtgagcactttaaatgtggaggacaaggactacaaagatgctgcctcttcaagtagcgaaggaaatctcaatctagggagcctggaggagaaggaaattatcgtcatcaaagataccgagaagaaagaccaaagcaaaacggaaggcagcgtctgtctatttaagcaggcaccttcagaccctgtgtcggttctcaactggctgctgtccgacctccaaaaatacgccctgggatttcaacacgcgctgagcccaagtacctcaacctgcaagcataaagtcggagataccgagggggagtatcaccgggcttcctccgaaaactgttattccgtatacgcagaccaggttaacatcgactacctcatgaatagacctcagaatctaaggctggaaatgacagcagcaaagaacaccaataataatcaatcccctagcgcccccccagctaagccaccaagcactcagcgcgcagtaatctcacctgacggggagtgttcaatagatgacctctcgttctacgtgaaccgcctaagtagtttggttatccagatggcacataaggagatcaaggagaaattagaggggaaatctaagtgtctacaccacagcatttgcccatcccccggcaacaaggaacgcatatctccccgtacaccggccagtaaaatcgcctccgagatggcttacgaagccgtggaactgactgctgccgaaatgagggggaccggcgaggagtccagagagggcggacaaaaaagcttcctctacagcgagcttagcaataaatccaagagcggcgacaaacagatgtctcagagagaatcaaaggaatttgcagactccatctccaaaggcctcatggtctatgccaaccaggtggcaagtgacatgatggtgtctctgatgaaaacccttaaggttcattctagtggaaagcccatccccgctagcgttgtactcaagcgcgtgcttttgcggcataccaaggagatagtgtccgatctgattgacagctgcatgaaaaaccttcataatattacaggcgtcttgatgacagactcagacttcgtttcggcagttaaaaggaacctctttaaccagtggaaacagaacgctaccgacattatggaagccatgctgaaaaggttggtctctgcgctcatcggcgaggaaaaggagaccaaatctcagtctctatcttacgcatcgcttaaagctggctcccatgatccgaaatgtagaaatcagagcctggaattctctactatgaaggccgagatgaaagagagagataaaggaaagatgaagtcggacccatgcaaatctctcactagtgctgagaaggtcggagagcatattctcaaggagggacttaccatttggaatcaaaaacagggcaattcatgtaaagtcgcaacgaaggcttgctcaaataaagacgaaaaaggcgagaagataaatgcttcaactgactccctggcaaaagatttgattgtatctgctctaaagctgatacagtaccatttgacacagcagacaaaagggaaggacacttgcgaggaggattgcccaggctcgacaatgggatacatggcccagagcacgcaatatgaaaagtgcggcgggggccagtctgccaaagccctgtctgtcaagcagctggaatcccatcgcgctccggggccctccacttgtcagaaggaaaatcagcacttagactctcagaagatggacatgtctaacatagtgcttatgctcattcagaagcttctgaatgaaaacccattcaagtgtgaggatccctgtgagggggaaaataagtgttcagagcccagggcttccaaggctgcttctatgtcgaaccggtcagacaaagcagaggaacagtgccaggagcaccaggaacttgactgcacttcgggaatgaagcaggctaacgggcagttcatcgacaagctagtcgagtccgtgatgaaactgtgtttgatcatggctaagtactccaatgacggagccgcactggccgaactagaagagcaggcagcttcagccaacaagcccaacttcaggggaacaagatgcattcacagtggggcaatgcctcagaactatcaagacagcctgggccacgaggtgattgtcaacaaccagtgtagcaccaacagcttacagaagcagctccaggccgtcttacagtggattgctgccagccaattcaacgtgcccatgttgtactttatgggagacaaggatgggcagctggagaaactgccacaagtgagtgcaaaagctgcagagaaggggtatagcgtgggtgggcttctgcaggaggttatgaaattcgccaaggagaggcaaccagatgaggccgtaggaaaagtggcccggaagcagctcctggactggctgctcgcaaacctatag

SEQ ID NO: 141727 - DNA, 2538 bp, Artificial Sequence
  derived and/or modified sequence
atgtctgatgacatcgactggctgcggagccacagaggagtgtgcaaggtggacctgtacaaccctgagggccagcaggaccaggacaggaaggtgatctgctttgtggatgtgtccaccctgaatgtggaggacaaggactacaaggatgctgccagcagcagcagcgagggcaacctgaacctgggcagcctggaggagaaggagatcatcgtcatcaaggacacagagaagaaggaccagagcaagacagagggctctgtgtgcctcttcaagcaggcccccagcgaccctgtgtctgtgctgaactggctgctgagtgacctgcagaagtatgccctgggcttccagcacgccctgagccccagcaccagcacctgcaagcacaaggtgggggacacagaaggagagtaccaccgggccagcagcgagaactgctacagcgtgtatgctgaccaggtgaacatcgactacctgatgaaccggccccagaacctgcggctggagatgacagctgccaagaacaccaacaacaaccagagccccagcgcccccccagccaagccacccagcacccagagagctgtgatcagcccagatggagagtgcagcattgatgacctgtccttctacgtgaaccggctgagcagcctggtgatccagatggcccacaaggagatcaaggagaagctggagggcaagagcaagtgcctgcaccacagcatctgccccagccctggcaacaaggagcgcatcagccccaggaccccagccagcaagatcgccagcgagatggcctatgaagctgtggagctgacagctgctgagatgaggggcaccggggaggagagccgggagggcggccagaagagcttcctgtacagcgagctgagcaacaagagcaagagcggggacaagcagatgagccagcgggagagcaaggagtttgctgacagcatcagcaagggcctgatggtgtatgccaaccaggtggccagtgacatgatggtgtccctgatgaagaccctgaaggtgcacagcagcggcaagcccatcccagcctctgtggtgctgaagagggtgctgctgcggcacaccaaggagatcgtgtctgacctgattgacagctgcatgaagaacctgcacaacatcactggagtgctgatgacagacagcgactttgtgtctgctgtgaagaggaacctcttcaaccagtggaagcagaatgccacagacatcatggaggccatgctgaagaggctggtgtctgccctgattggagaggagaaggagaccaagagccagagcctgtcctatgccagcctgaaggccggcagccatgaccccaagtgcaggaaccagagcctggagttcagcaccatgaaggccgagatgaaggagcgggacaagggcaagatgaagagtgacccctgcaagagcctgaccagcgctgagaaggtgggggagcacatcctgaaggagggcctgaccatctggaaccagaagcagggcaacagctgcaaggtggccaccaaggcctgcagcaacaaggatgagaagggggagaagatcaatgccagcacagacagcctggccaaggacctgattgtgtctgccctgaagctgatccagtaccacctgacccagcagaccaagggcaaggacacctgtgaggaggactgccccggcagcaccatgggctacatggcccagagcacccagtatgaaaaatgtggcggcggccagagcgccaaggccctgtctgtgaagcagctggagagccaccgggcccctggccccagcacctgccagaaggagaaccagcacctggacagccagaagatggacatgagcaacatcgtgctgatgctgatccagaagctgctgaatgaaaaccccttcaagtgtgaggacccctgtgaaggagaaaataaatgttctgagccccgggccagcaaggccgcctccatgagcaacagaagtgacaaggccgaggagcagtgccaggagcaccaggagctggactgcaccagcggcatgaagcaggccaacggccagttcatcgacaagctggtggagagcgtgatgaagctgtgcctgatcatggccaagtacagcaatgatggagctgccctggccgagctggaggagcaggccgccagcgccaacaagcccaacttccggggcacccgctgcatccacagcggggccatgccccagaactaccaggacagcctgggccacgaggtgattgtgaacaaccagtgcagcaccaacagcctgcagaagcagctgcaggccgtgctgcagtggattgctgccagccagttcaacgtgcccatgctgtacttcatgggagacaaggatggccagctggagaagctgccccaggtgtctgccaaggctgctgagaagggctacagcgtgggcggcctgctgcaggaggtgatgaagtttgccaaggagcggcagccagatgaggccgtgggcaaggtggccaggaagcagctgctggactggctgctggccaacctgtag

SEQ ID NO: 141728 - DNA, 2538 bp, Artificial Sequence
  derived and/or modified sequence
atgagcgacgacatcgactggctgcggagccaccggggcgtgtgcaaggtggatctctataatccagagggccagcaggatcaggaccggaaagtcatttgcttcgtggatgtcagcacgctcaacgtggaggacaaggactacaaggatgcagctagtagctcctctgagggaaaccttaatctcggctctctggaagaaaaggagatcattgtgattaaggacactgagaagaaggaccagtctaagaccgagggatcagtgtgtctctttaaacaggctccaagtgacccagtttcagtgctcaactggttgctgtcagatcttcagaagtacgcccttggattccagcacgcccttagcccctccacatctacctgtaaacacaaggtgggggacacagaaggagaataccacagagcctcttccgagaattgctattccgtctatgctgaccaggtaaatattgactatctcatgaatcgcccccagaacctacgcctggagatgacagcagcaaagaatactaacaacaaccagtcaccatcagcacctccggccaaacccccttccacacaacgcgcagtgatctcccctgacggcgagtgtagtatcgatgatctgagcttctacgtgaaccgactctcctcgttagtgatccagatggcccacaaagagattaaagaaaagctcgagggtaaatccaagtgccttcatcactcaatttgtccatctcctgggaataaagaacgtatttcccctagaacaccggcttccaagatcgctagtgagatggcttatgaggccgtggagctgactgccgcagaaatgagggggaccggcgaggaatcgcgggaggggggtcagaagtcattcctgtacagcgaactgagcaacaagagcaagtcaggcgataagcagatgagccagagagagagcaaggaatttgccgatagtatctccaaaggactgatggtgtacgccaaccaagtcgcgtcagacatgatggtatcattaatgaaaaccctcaaggtccactcaagtggaaaacctatacctgcaagtgtggtgttgaagcgcgttctcctccgccatacaaaagagattgttagcgacctgatagatagttgcatgaaaaaccttcacaacataaccggagtgttgatgacagactctgactttgtcagcgccgtcaagcgcaacttgtttaaccagtggaagcagaatgctaccgatatcatggaggcgatgctaaagcggctggttagtgcactgattggggaggagaaagaaacgaagtctcagtctctgtcttatgccagtctgaaagctggcagccacgaccctaaatgtcggaatcaaagcctggagttcagcaccatgaaggctgaaatgaaggaaagagataagggcaaaatgaaatcagatccgtgtaaaagcttaacatcagccgagaaagtcggggaacacattcttaaggagggattaaccatctggaatcaaaaacaagggaacagctgtaaggtggccacaaaagcatgctctaacaaggatgaaaaaggcgagaaaatcaacgcctcaaccgatagcttagctaaggatctcatcgtatcagcgctcaagttaatacagtaccatttgacccagcaaaccaaggggaaggatacatgtgaagaggactgcccggggtccaccatgggatacatggcccaaagcacacagtatgagaagtgtgggggaggacagagtgcgaaagcgctgtccgtgaagcaactggagagccacagggctcccgggccgtcaacctgccagaaggaaaaccagcacttggattcacaaaaaatggacatgagcaatatagtgctcatgctgatacagaaattgctgaatgaaaacccattcaagtgtgaggatccgtgtgagggcgagaacaagtgcagcgaaccaagggcatccaaagcagcctcgatgtcaaaccggtctgataaggctgaggaacaatgtcaggagcatcaggagttggattgtacatctggaatgaaacaagccaatgggcagtttattgacaaactggtggaaagcgtgatgaagctgtgcctgatcatggcaaaatatagtaacgatggagcggcactggccgagttggaggagcaggcagcttcagctaacaagcctaattttagaggcacaaggtgtatccattctggcgcaatgccccagaattatcaggattcactggggcatgaggtcattgtgaacaaccagtgctccaccaactccctacagaaacagctgcaagcagtactacagtggattgcggcatctcagttcaatgttcctatgctgtattttatgggtgacaaagacggacagctggagaagctacctcaggtgtccgctaaagccgctgagaaggggtactcagttgggggactactgcaggaagtcatgaaatttgccaaagagcggcagcccgacgaagctgtagggaaagtggctcgcaaacagctcctggattggcttctagctaatctgtag

SEQ ID NO: 141729 - DNA, 2538 bp, Artificial Sequence
  derived and/or modified sequence
atgagcgatgacattgactggctcaggagtcaccggggtgtatgtaaagtggacctgtacaaccccgagggacaacaggaccaggataggaaagtcatctgcttcgtggatgtgtcaacactgaatgtagaggacaaagactataaagacgcagccagttcatctagcgagggcaatctgaacctagggtctctggaggaaaaggagataattgtgatcaaagacaccgagaagaaagatcagtcaaagacagagggctccgtttgtctttttaagcaggcaccctctgatcctgtttccgtgctgaactggctgctctccgatctacagaaatatgcactcgggtttcagcacgcgctctcccccagcaccagcacctgtaagcataaggtcggggacaccgagggcgagtaccaccgggcttctagcgagaactgctacagcgtgtacgccgatcaagtaaacatcgattacttaatgaaccgaccacagaatctgcgacttgaaatgacggccgctaaaaacaccaataacaaccaatccccatctgcacccccagcgaaacctccatcgacacagagggccgtgattagccctgacggagagtgttccatagacgacctgagcttttacgtcaataggctctcatccctggtgattcagatggcacataaggaaattaaggagaagctcgaagggaaatccaaatgcttacaccattccatttgtccaagcccaggaaataaagagcggatctcgcccaggacaccagcttctaaaatcgcctctgaaatggcttatgaagctgtggagttgacggctgctgagatgcggggtacaggggaagaaagcagggagggtggacagaagtcattcctttattctgagctcagtaataaaagtaagagtggtgataaacagatgtcacagagagaatctaaggaattcgccgactccatttccaagggtcttatggtatatgctaaccaggtcgcttccgacatgatggtgtcgctgatgaaaacactgaaggtccatagttccggaaagccaattccagcatccgttgttctcaaaagggtcctgctccggcacactaaagaaatcgtcagtgacctgattgactcgtgtatgaagaacctgcacaacattactggcgtgctaatgacagattctgacttcgtgagcgccgtgaagaggaacctgtttaaccagtggaagcagaacgcaacagacatcatggaagcaatgctcaaaaggttggttagcgccctgattggcgaagagaaagagacaaaaagccagagtctgtcttacgcttctctgaaagctggcagtcatgatcctaagtgtcgaaatcaatcgctggagttcagcacaatgaaagccgaaatgaaggaacgagacaaaggcaaaatgaagtctgacccttgtaagtccctgacttccgccgagaaagtgggtgagcacatcctgaaggaaggactgaccatatggaatcagaaacagggaaatagctgtaaggtagccaccaaagcatgcagcaataaagatgagaaaggagaaaaaattaatgctagcaccgactcactcgcgaaggacctcatcgtttccgccctgaagctgatccagtatcacctaacccaacagaccaagggtaaagatacttgtgaagaagactgcccaggatccaccatgggatatatggctcagtcaacacagtacgagaaatgcgggggtggccagagtgccaaggccctcagcgtgaaacagctagagtctcaccgggctccaggtccatcaacttgccagaaggagaatcagcaccttgattctcagaagatggatatgtccaatattgtgcttatgctgatacagaagctgctgaatgaaaatcctttcaagtgcgaagatccttgcgagggggagaataagtgcagcgaacccagggctagcaaagctgctagtatgtccaataggagtgacaaggctgaggagcagtgtcaggagcatcaggagctggattgtacttcaggcatgaagcaagcaaatggccagttcattgacaaactcgtagagagcgtgatgaaactttgtttgataatggcgaagtacagtaacgacggcgctgctctggctgagctggaggaacaggctgcatcagcgaataagcccaacttccggggaacccgctgcatacactcaggcgctatgcctcagaactatcaggacagtctgggccacgaggtcatagtcaacaatcaatgtagcaccaacagcctacagaagcagttacaggccgtgctgcagtggattgccgcatcccagtttaacgtacccatgctgtacttcatgggcgacaaagacggacagctcgagaaactgccccaggtttccgccaaggcagcagaaaagggatattcagtggggggattactccaagaagtgatgaaattcgccaaggaacggcagcctgatgaggctgtggggaaagtggctagaaaacagctcctcgattggttgctggccaacttgtag

SEQ ID NO: 141730 - DNA, 2565 bp, Artificial Sequence
  derived and/or modified sequence
atgatggcctactctgataccacaatgatgagcgacgatattgactggctccgtagtcatcggggagtctgtaaggttgacttatataatccagagggccagcaagatcaggataggaaagttatctgtttcgttgacgtttcaacactgaacgttgaagacaaggattacaaagatgcagcatctagcagctcagagggcaatcttaatttaggatcactggaggagaaagagatcattgtcatcaaagacacagagaagaaagaccaatccaagactgaaggttcggtgtgcctgttcaagcaggcacctagcgaccctgttagcgtgctgaattggctgttgagcgacctgcaaaagtacgcattagggtttcagcacgctctgtctccctccacttctacatgcaagcacaaggttggggatacggaaggagagtatcatcgggcgtcgagcgagaactgttacagcgtgtatgctgaccaggttaacattgattacctgatgaaccgcccacagaatttaagacttgagatgaccgctgctaagaacaccaacaacaaccagtcgccctccgcccccccggccaaaccaccaagcacacaacgggctgtcatttcccccgacggggagtgcagcatcgacgacctgtcgttttatgtaaatcggttatcgagcctggttattcagatggcacataaggagataaaagaaaagctggagggcaagagtaagtgcctgcaccactccatttgtccttccccaggcaataaggaacgcattagcccacgaacgccggcaagcaaaatagcgtcagagatggcttacgaggcggtggagctgaccgccgccgagatgcgcggcaccggcgaggagagcagggaaggcggtcaaaaatccttcctatacagtgaactctccaacaagtcaaagtccggtgacaaacagatgtcacaacgcgagtccaaagagtttgcagacagtattagcaaaggactgatggtgtatgccaaccaggtcgcttccgatatgatggtctctcttatgaagactctgaaggtccatagtagcgggaaacctattcccgcatccgttgtccttaagagagtgctgctgagacataccaaagaaatagttagcgatctgattgattcatgtatgaaaaacctccacaatattactggcgtgctaatgacggattcagacttcgtcagcgccgtgaaacggaacctgttcaaccagtggaaacagaacgcgaccgacatcatggaggccatgctgaaaagactggtctcagcacttataggagaagagaaggagactaaaagtcagagtctgtcatatgccagcctcaaagctggttcccatgatcccaaatgccggaatcagtctctggaattttcaacgatgaaagccgaaatgaaggaaagagataagggaaagatgaagtcagatccatgtaaatccctcactagtgcagaaaaggttggagagcacattctcaaagagggtttgaccatatggaaccagaagcaggggaacagttgcaaggtcgcaacgaaagcttgctcaaataaagacgaaaaaggcgagaagatcaacgcttccaccgactcgttggccaaagatctgattgtctctgccttaaagttgatacagtatcacctcacccagcaaaccaagggcaaggatacatgtgaggaggattgccccggctccacaatggggtacatggcacaatccacacagtatgaaaagtgtggaggcgggcagagtgctaaagctctttctgttaaacaactcgagtcccacagggctcccgggccctcaacttgtcagaaggagaaccagcacctcgatagtcagaagatggacatgagcaacatcgtcttgatgttaatccaaaagctgctgaacgagaatcctttcaagtgtgaagatccctgcgagggtgaaaacaaatgttcagagcctagagcctccaaagcagcatcaatgagtaatcgcagcgacaaagcagaagaacagtgccaagaacatcaggagcttgattgtacttcaggcatgaagcaggctaatggccagtttatcgataaactggttgagtcagttatgaagctctgcctaatcatggccaaatactcaaatgacggcgctgcccttgccgagctggaggagcaagcggcctccgccaataaaccgaacttcaggggtacaagatgcatccactctggagcaatgcctcagaattaccaagactccctgggccacgaggtgatcgtcaataatcagtgttcgaccaactcactccagaagcagctccaggctgtcctgcagtggatagcagcaagtcagttcaatgtgccaatgttatattttatgggagacaaggatggacagcttgagaagctgcctcaagtgtctgcaaaggctgccgagaaaggatatagcgtgggtggcctgctacaggaagtgatgaaatttgcaaaagaaaggcagcccgatgaggctgtaggaaaggtcgcccgcaaacagctgctcgactggctccttgcaaacctgtag

SEQ ID NO: 141731 - DNA, 2538 bp, Artificial Sequence
  derived and/or modified sequence
atgagtgatgacattgattggttgagaagccaccggggggtttgtaaggtggacctgtataatcccgagggtcagcaggatcaggacaggaaggtcatatgttttgtggacgtgagtacactgaacgtcgaggacaaagattacaaggatgcggcctcctcttccagcgagggaaatctgaatctggggtcactagaggagaaggaaataatcgtcatcaaggacaccgagaagaaagaccagagcaaaacagagggaagcgtgtgccttttcaagcaggcccccagcgaccccgtctctgtcctgaactggctcctgtccgatctgcagaagtatgctctgggattccagcacgctctatccccaagcacttctacctgtaagcacaaggtaggtgatacggaaggagagtatcatagggcttcttctgagaactgctatagcgtctacgctgatcaggtcaacatcgactatttgatgaaccgtccgcagaatctgcggctcgagatgaccgcggccaaaaacacaaataacaatcagagcccaagcgcaccacccgccaaaccaccctccacgcaaagggcagtaatcagccccgatggcgaatgttccatagatgatctcagcttttacgtgaaccggttaagctcgctggttatacagatggctcacaaagagattaaggaaaagctggagggtaaaagcaagtgtctacaccacagtatttgtccgagtcccggcaacaaagaaagaatctcaccacggacgcccgccagcaaaattgcctctgagatggcctacgaagccgttgagctaacagccgctgaaatgagaggcaccggggaggaaagtagggagggaggacagaaaagctttctatattccgaactgagcaataaatctaagtctggtgacaaacagatgagccagcgcgagagcaaagagtttgccgattccataagcaagggcctcatggtgtatgccaaccaggtagccagcgacatgatggtctcactgatgaagaccttaaaggtacactcctctgggaagccaattcctgcatccgtggtgcttaaacgggtgctgctgagacatacaaaggaaattgtgtcagatctcattgactcatgcatgaaaaatcttcacaacattactggagtgctgatgactgactcggacttcgtttccgccgtgaaacgaaatttgtttaaccagtggaagcagaacgcgaccgacatcatggaagctatgttaaaaaggcttgtttctgccctgattggcgaggaaaaagaaaccaagtcacagtctcttagctatgcctctttgaaggccggttcacatgatccgaaatgcagaaaccagagtctcgaattcagcactatgaaagccgagatgaaggaaagagacaaaggcaaaatgaagagcgacccgtgtaaaagtctgacgtccgccgagaaagtcggggagcacattttgaaggaggggttgaccatttggaaccagaagcaggggaactcctgcaaggtcgccacgaaagcatgctctaataaagatgagaaaggcgaaaagatcaacgcctctaccgattccttagccaaggatctcatcgtgagcgctcttaaactgatccaatatcacttgactcagcaaacaaaaggcaaagacacttgcgaggaagactgtccaggaagcacaatggggtacatggcccaaagcactcaatatgaaaagtgcggtggaggacaaagtgcgaaggcccttagtgtaaagcaactagagtctcacagggcccctggcccgtcaacctgtcagaaggagaaccagcacctcgactcccagaaaatggatatgagtaacattgtcctcatgctaatccaaaagctcctgaatgagaatcctttcaagtgtgaggatccttgcgaaggagagaataagtgttctgagcccagggcctccaaagccgccagcatgagcaaccgttcagataaggctgaagagcagtgtcaggaacatcaggagctagattgcacaagtggcatgaagcaagctaacggccagttcatcgataaactggtggaatccgtgatgaagctgtgtctgatcatggcaaaatactcaaatgacggtgccgcactcgcagagcttgaagaacaggccgctagtgccaataaacctaatttccgtggtactcggtgcatacactctggagcaatgccacagaactaccaggattctctcggacatgaggttatcgtcaacaatcagtgcagcacaaacagccttcagaagcagctccaggcggtattacagtggatcgcggctagtcaatttaatgttccgatgctttacttcatgggtgataaagatgggcaactggagaaactacctcaggtctccgccaaggctgctgagaagggatacagtgtgggcggtctcctgcaggaggttatgaagttcgccaaagaacggcagcccgacgaagctgtggggaaggttgcccgcaaacagctgctagattggctgctagccaatctgtag

SEQ ID NO: 141732 - DNA, 2538 bp, Artificial Sequence
  derived and/or modified sequence
atgtctgacgatatagactggctgagaagccatcggggggtctgcaaagtcgatttgtataatcctgaaggccagcaggatcaagatcggaaagtgatttgcttcgtggacgtctctactctgaacgtggaagacaaagactacaaggacgccgccagcagtagttcagaagggaatctgaatctgggaagcctggaggagaaagaaatcatcgttatcaaggatactgagaaaaaggatcaaagcaaaacggagggcagcgtctgtctctttaaacaagccccaagcgatccagtctctgtgctgaactggctcttgagcgatcttcagaaatatgccctgggatttcagcacgccctttccccctccacttctacctgtaagcataaagtgggcgataccgaaggggaatatcacagagcctcaagtgagaattgttacagcgtgtacgcggatcaggtgaatatcgactacctgatgaataggcctcaaaacctgcggctcgagatgactgccgccaagaatactaacaacaatcagagtcctagcgcaccccccgccaaacctcccagtactcagagagccgtgatctcccccgacggtgagtgctcaattgatgacctgtctttctatgtgaatcgcctgtcctctttggtcatccaaatggcccataaagaaattaaagagaagctggaagggaaatcaaagtgcctgcaccactccatctgcccttcccccgggaataaagaacgtattagtccaagaacacctgcctctaagatagcgtctgaaatggcctacgaagcagtggagctgacagcagcggaaatgcgaggcaccggcgaggagtcgagggagggcggccagaaatcctttctgtattccgaactgtctaacaaaagcaagtccggggataagcagatgtcccagcgggagtcgaaggagttcgccgatagtatttcaaagggcctaatggtatacgccaaccaggtagcgagcgacatgatggtgtccctgatgaaaacattaaaggttcacagtagcggaaagcccatcccagcatcagtcgtgttgaaacgggtgctgctacggcatacaaaagagattgtgtcagaccttatagacagctgcatgaagaacctgcacaatatcaccggtgttctgatgacggattccgacttcgtgtctgctgtaaaacggaacttattcaaccaatggaagcagaacgccactgacattatggaagcaatgttaaagagactggtttccgctctaattggtgaggaaaaagagaccaagtcacaatccctctcttacgcttctctgaaggccgggtcccacgacccgaagtgtcgcaaccagtcactggagtttagcactatgaaagctgaaatgaaagagagagacaaagggaagatgaaaagcgatccatgtaagagtttaaccagtgccgaaaaagttggcgagcatatcctgaaagaaggtctaacgatttggaaccaaaagcaaggaaactcttgcaaggtggccaccaaggcgtgttctaacaaagatgaaaagggagaaaaaatcaatgctagcactgattctctcgctaaggatctaatagtcagcgctctcaagctcattcagtatcaccttacacagcagacgaaaggtaaggatacgtgtgaagaagattgcccaggcagcactatggggtatatggctcaatctacacagtacgaaaaatgcggcggtgggcagtctgccaaggcattaagcgtcaaacagctcgagtcccaccgcgccccaggaccaagtacctgccagaaggagaaccaacacctggattcacaaaaaatggacatgtctaatatcgttctgatgttgattcagaagttgttgaacgaaaaccccttcaaatgtgaggatccctgtgagggggaaaacaagtgcagtgaacctcgggcttccaaagccgcatcaatgtccaatcgttctgataaggccgaggaacagtgccaggagcaccaggaattggactgcacctccggtatgaagcaagccaacgggcagtttatcgacaaactagtggaaagcgttatgaaactttgtttaattatggcgaaatactccaacgacggggcagcgttggcagagttggaagagcaagcggcctctgctaataagcctaatttcaggggcacgcgttgtatccatagcggcgcaatgccccagaactatcaggactcactcgggcatgaagtgatcgtaaacaatcagtgttcaacaaacagcctccagaaacaattacaggctgttctccaatggatagccgctagccagttcaacgttcctatgttatacttcatgggggacaaagacggacagctggaaaaattgccacaggtcagtgctaaggcagccgaaaaaggctactcggttggagggctcttgcaggaggtcatgaaattcgcaaaggaaaggcaacccgacgaagcggtagggaaagttgctagaaagcagctgcttgattggttgctggcaaacctgtag

SEQ ID NO: 141733 - DNA, 2565 bp, Artificial Sequence
  derived and/or modified sequence
atgatggcctacagcgacaccaccatgatgtctgatgacatcgactggctgcggagccaccggggcgtgtgcaaggtggacctgtacaaccctgagggccagcaggaccaggacaggaaggtgatctgctttgtggatgtgtccaccctgaatgtggaggacaaggactacaaggatgctgccagcagcagcagcgagggcaacctgaacctgggcagcctggaggagaaggagatcatcgtcatcaaggacacagagaagaaggaccagagcaagacagagggctctgtgtgcctcttcaagcaggcccccagcgaccctgtgtctgtgctgaactggctgctgagtgacctgcagaagtatgccctgggcttccagcacgccctgagccccagcaccagcacctgcaagcacaaggtgggggacacagaaggagagtaccaccgggccagcagcgagaactgctacagcgtgtatgctgaccaggtgaacatcgactacctgatgaaccggccccagaacctgcggctggagatgacagctgccaagaacaccaacaacaaccagagccccagcgcccccccagccaagccacccagcacccagagagctgtgatcagcccagatggagaatgttccattgatgacctgtccttctacgtgaaccggctgagcagcctggtgatccagatggcccacaaggagatcaaggagaagctggagggcaagagcaagtgcctgcaccacagcatctgccccagccctggcaacaaggagcgcatcagccccaggaccccagccagcaagatcgccagcgagatggcctatgaggccgtggagctgacagctgctgagatgaggggcactggagaggagagccgggagggcggccagaagagcttcctgtacagcgagctgagcaacaagagcaagagcggggacaagcagatgagccagcgggagagcaaggagtttgctgacagcatcagcaagggcctgatggtgtatgccaaccaggtggccagtgacatgatggtgtccctgatgaagaccctgaaggtgcacagcagcggcaagcccatcccagcctctgtggtgctgaagagggtgctgctgcggcacaccaaggagatcgtgtctgacctgattgacagctgcatgaagaacctgcacaacatcaccggggtgctgatgacagacagcgactttgtgtctgctgtgaagaggaacctcttcaaccagtggaagcagaatgccacagacatcatggaggccatgctgaagaggctggtgtctgccctgattggagaggagaaggagaccaagagccagagcctgtcctatgccagcctgaaggccggcagccatgaccccaagtgcaggaaccagagcctggagttcagcaccatgaaggccgagatgaaggagcgggacaagggcaagatgaagagtgacccctgcaagagcctgaccagcgctgagaaggtgggggagcacatcctgaaggagggcctgaccatctggaaccagaagcagggcaacagctgcaaggtggccaccaaggcctgcagcaacaaggatgagaagggggagaagatcaatgccagcacagacagcctggccaaggacctgattgtgtctgccctgaagctgatccagtaccacctgacccagcagaccaagggcaaggacacctgtgaggaggactgccccggcagcaccatgggctacatggcccagagcacccagtatgagaagtgtggcggcggccagagcgccaaggccctgtctgtgaagcagctggagagccaccgggcccctggccccagcacctgccagaaggagaaccagcacctggacagccagaagatggacatgagcaacatcgtgctgatgctgatccagaagctgctgaatgaaaaccccttcaagtgtgaggacccctgtgagggggagaacaagtgcagcgagccccgggccagcaaggccgcctccatgagcaacagaagtgacaaggccgaggagcagtgccaggagcaccaggagctggactgcaccagcggcatgaagcaggccaacggccagttcatcgacaagctggtggagagcgtgatgaagctgtgcctgatcatggccaagtacagcaatgatggagctgccctggccgagctggaggagcaggccgccagcgccaacaagcccaacttccggggcacccgctgcatccacagcggggccatgccccagaactaccaggacagcctgggccatgaagtcatcgtgaacaaccagtgcagcaccaacagcctgcagaagcagctgcaggccgtgctgcagtggattgctgccagccagttcaacgtgcccatgctgtacttcatgggagacaaggatggccagctggagaagctgccccaggtgtctgccaaggctgctgagaagggctacagcgtgggcggcctgctgcaggaggtgatgaagtttgccaaggagcggcagccagatgaagctgtgggcaaggtggccaggaagcagctgctggactggctgctggccaacctgtag

SEQ ID NO: 141734 - DNA, 2565 bp, Artificial Sequence
  derived and/or modified sequence
atgatggcctacagcgacaccaccatgatgagcgacgacatcgactggcttagatcccatcggggggtgtgcaaggtggacctctacaatcccgaggggcagcaagatcaggataggaaggtcatttgttttgtagacgtaagcactcttaatgtggaagacaaggattacaaagatgccgcgtcaagttctagtgagggtaacctgaacctgggatccctggaagaaaaggagattatcgtcatcaaggatacagagaaaaaggatcaaagtaagacagaggggtctgtttgcctctttaagcaggctcccagcgatccagtgtctgtactgaactggctcctttccgacctgcagaaatacgccctcggcttccagcacgccctcagcccttctacgagtacctgtaagcacaaagtcggcgacactgagggtgaataccatcgagctagctctgagaattgttattccgtgtacgcggatcaagtgaacattgactacttgatgaatcggccccagaacctgagactcgagatgaccgctgcaaaaaatacgaataataatcagagtccgtccgcccccccagccaagcctcctagcacccaacgggccgttatcagccctgatggggagtgcagcatagacgatcttagtttttatgtaaaccggctctctagtctggtgatccagatggcccataaggagataaaagagaagctcgagggcaagtccaagtgcctccatcactccatctgccccagccccggaaacaaagaacggatatccccccggacgcccgcaagcaaaattgctagcgagatggcttatgaggccgtagagctcactgcggctgagatgcgcggcacgggggaagagtcaagggagggcggccagaagtccttcctgtactctgagctgtctaataagagtaagtctggcgataaacagatgtcccagcgggagtccaaagaatttgctgactccatttccaaaggcctcatggtgtatgctaatcaagtcgcaagtgatatgatggtcagcttgatgaagacactgaaagtccactcttccggcaagcccatacctgccagcgtggttctgaagcgtgtgctcctccgacacaccaaagaaatcgtgtcagatctgattgacagttgtatgaaaaacctgcacaacatcaccggcgtattgatgactgatagtgacttcgtctctgcagtgaaacggaacctgttcaatcaatggaagcagaatgcaacagacatcatggaagccatgttgaagcgccttgtgagtgcacttatcggcgaagaaaaggaaacaaaatctcagtcactcagctatgccagtttgaaggccggatcacatgatcctaaatgccggaaccagtcactagaatttagcactatgaaggcagaaatgaaagaacgagataagggaaaaatgaagagcgatccatgcaagagcctgacaagcgctgaaaaggtgggtgaacacattttaaaggaggggttgaccatttggaaccagaaacagggcaatagctgcaaagtcgcaacgaaggcttgctccaataaggacgagaagggcgagaagattaacgcttcaacagactcacttgctaaagacctgatcgtgtctgcactgaaattaatccaatatcacctcactcagcagacaaagggaaaagatacatgcgaagaagattgtcctggctcgaccatgggatacatggcacagtctacacaatacgagaagtgcgggggcggtcagtctgctaaagcactgtctgttaaacagctggagtcccatagggcaccaggaccctccacttgccagaaagagaaccagcacttagactcccagaagatggacatgtctaatatcgttcttatgctcattcaaaaattgctcaatgaaaacccattcaagtgcgaggacccttgcgagggagaaaacaagtgttcagagcccagagcttctaaagctgcctctatgtctaaccgttccgataaggctgaagagcaatgccaggagcatcaggagctggactgcacctccggtatgaaacaggcgaatggacagttcatcgacaaattagtggagtctgtgatgaaactctgtctgatcatggcaaaatactccaatgatggggcggccctcgccgaacttgaggagcaggcggcgagcgccaacaagcccaacttccggggaactcgctgcatccactctggggccatgccccagaattaccaggacagcctgggccacgaggtgatagtcaataatcaatgcagcactaacagcctccagaagcagctccaagcggtcctgcagtggatcgcggccagccagttcaatgttccaatgctgtattttatgggggataaggatgggcaactggagaaattacctcaggtgtcagctaaggcggccgaaaagggatatagtgtgggagggctgctccaggaggttatgaagttcgctaaggaaagacagccagacgaagcggtgggcaaagtagctcggaaacagcttctggactggctgttggctaatctttag

SEQ ID NO: 141735 - DNA, 2538 bp, Artificial Sequence
  derived and/or modified sequence
atgagcgacgacatcgactggctgcggagccaccggggcgtgtgcaaggtcgatctgtacaatcctgaaggccagcaggatcaggaccgcaaggtaatctgctttgtcgatgtgagcactttaaatgtcgaagataaagattataaagatgccgcatcttcctcctcagagggcaacctgaacctggggtcccttgaggaaaaagaaataattgtcatcaaggacaccgagaaaaaagaccagtctaagacagagggatctgtctgtttgtttaagcaggccccctccgatcctgtctctgtgctcaactggctgctgtctgatttacaaaagtacgccctcgggtttcagcacgcactgtctccatccaccagcacctgcaagcataaggtgggggatactgaaggtgaataccatcgggcttcatccgagaattgttattcggtctacgctgatcaagtgaatatcgactacctgatgaacagaccccagaatttgagactcgagatgaccgccgccaaaaataccaataacaatcaaagtccgtctgctccgcctgcgaaacctccctctacccagcgagcagtaatatccccggacggagagtgcagcattgacgacttaagcttttacgtgaacaggctgtcgtcgctcgtaatccagatggcgcacaaggaaataaaggaaaaacttgagggtaagtctaagtgcctccaccacagcatttgtcccagccctggaaataaagaaaggatcagccctcgaacacctgcctctaagatcgcttccgaaatggcgtacgaagccgttgagcttacagctgccgagatgcggggaactggagaagagtcacgggagggcggacagaagagctttttgtactcagagttgagtaataagtctaagtctggcgataagcagatgtcgcagcgggagtccaaagagttcgcagatagtatttccaagggccttatggtctacgccaaccaggtggcctctgacatgatggtttctctcatgaaaaccctgaaagtgcacagcagtggaaagcccattcctgcctccgtggtcctgaaacgggtgctattaagacacacgaaagagatagtgagtgatctgatcgattcctgcatgaaaaacctgcacaatatcactggagtcttgatgacggattctgacttcgtgtctgctgtgaagcgcaacctcttcaatcagtggaagcaaaacgcgactgacatcatggaagccatgctgaaacgcctggttagcgctctgatcggtgaagaaaaagagacgaagagccagagtctttcatacgcttccttaaaagcggggtcacatgaccccaagtgccgcaaccagtctctggagtttagcaccatgaaggcagaaatgaaagagagggacaagggcaagatgaagtcggacccatgcaagtctctaacctccgctgagaaagtgggtgagcatatcctcaaggaggggcttacaatctggaaccagaaacagggcaatagctgtaaggtggcgaccaaggcctgcagcaacaaagacgagaagggcgagaagattaacgcttcaacagacagtttagctaaggacttgattgtgtctgcactgaagctgattcagtaccaccttacacagcagacgaagggcaaggatacctgcgaggaagactgcccaggtagcaccatgggttacatggctcagtctacccaatatgagaagtgcggcgggggacagagtgccaaagcactctcagtcaaacagttggagtctcacagggcacccggaccctccacctgccaaaaggagaaccagcatttggattcacagaagatggacatgtctaacatcgtgcttatgttgattcagaagctcctgaacgagaatccattcaagtgtgaggatccgtgcgagggggagaataaatgctccgaaccgcgcgccagcaaggcagcaagtatgtccaaccgctctgataaggctgaagaacagtgccaggaacatcaggagctggactgcaccagcggcatgaagcaggctaatgggcagtttattgataagctagttgaatccgtaatgaagctttgtctgatcatggctaagtacagcaatgatggggctgccctcgctgagctggaagaacaggcagcctccgccaacaaaccaaacttccggggaacacgctgtattcacagcggcgctatgccacagaattatcaggattccctgggacatgaagtcattgttaataaccaatgtagcacaaactcactccagaagcaactgcaagcggtcctgcagtggattgctgcaagccagtttaacgtgccaatgctttacttcatgggtgacaaagacggccagcttgagaaactgccccaggtctctgccaaggctgcggaaaagggttactccgtgggcggcctacttcaggaagtgatgaagttcgccaaagaaagacaacccgacgaggccgttggaaaggttgcccgtaaacagctactcgattggcttcttgccaatttatag

SEQ ID NO: 141736 - DNA, 2538 bp, Artificial Sequence
  derived and/or modified sequence
atgagcgacgacatcgactggctgcggagccaccggggcgtgtgcaaggtcgatctctataacccagagggacagcaggaccaagaccggaaagttatctgttttgtggacgtctccacactgaatgtagaggataaagattataaggatgccgccagctcctcctcagagggtaatctcaatcttggttccctcgaggagaaggagatcatcgtgataaaagacacagagaagaaagaccagtccaagaccgaggggtccgtctgtctgttcaagcaggctccctctgatccagtaagcgttctgaactggcttctgtcggatctgcagaagtacgcattagggtttcagcacgcactctcgccatccacatccacgtgcaaacacaaagtgggcgacactgagggagagtaccaccgcgcttcaagtgaaaactgctattccgtttacgcagatcaggttaatatcgattatctaatgaatcggccacagaacctaaggttggaaatgacggcggctaaaaatacaaacaacaaccagtccccgtccgctcctcccgcaaagccgccgtccacacagcgtgcagtgatcagccctgacggggagtgcagcatcgacgatctctctttttatgttaaccgtctcagctccctggttatccaaatggcccataaggagataaaagagaaactagagggcaaatccaaatgcctgcatcattcaatttgcccctctccaggcaacaaagagagaatctccccaagaactccagcatcaaagatcgcttccgagatggcctacgaagccgtcgagctcacagccgcagaaatgcggggtaccggagaggagagcagagagggcgggcagaaatcattcctctactctgaactcagcaacaaatctaagtctggcgacaagcaaatgtcgcagagagagagcaaggagttcgcggatagtatcagtaagggccttatggtttatgcgaaccaggttgcctctgatatgatggtgagtctgatgaaaaccctcaaggtccactcctcaggcaaaccgattcccgccagcgtggttctgaagagggtgcttctccggcatactaaggagattgtttccgacctgatcgactcatgtatgaagaatctgcataatatcacaggagtgctgatgacagattccgactttgtctccgctgtgaagaggaacctgtttaaccagtggaaacagaacgcaacggatatcatggaggctatgttaaaacgtctggtcagtgcactcatcggggaggagaaagaaactaagtcccagagcctgtcctacgcctccctgaaggctggttcccacgatccgaaatgcaggaatcaatccttagagttcagcactatgaaggctgagatgaaagagcgtgataagggtaagatgaagtccgacccttgtaaaagcctgactagcgccgaaaaggtcggggaacatattctgaaggaaggtctgactatttggaatcagaagcaggggaatagttgcaaagtcgcaacaaaggcatgctccaacaaggatgagaagggcgagaagatcaatgcctcgacagactcactcgcaaaagacctaatcgtgtcggccctgaaactgattcagtaccacctcacacagcagaccaagggaaaggatacctgcgaagaggattgccccggctctacgatgggatacatggcacagtccacccaatacgagaaatgcggcggagggcaatccgctaaggccttgagcgttaagcagctagaatcccaccgcgcacccggcccttctacttgccaaaaggagaatcagcacttggattcccagaagatggacatgtccaatatcgtgctcatgctgatacaaaaactgcttaatgagaatccctttaagtgcgaggacccgtgcgagggggagaataagtgctctgagcccagggccagtaaagcagcttccatgtctaatcgctcagataaggccgaggagcagtgccaggaacatcaggaactggactgcacgtctggaatgaaacaggctaacggccagtttatcgataaactggtagaatctgtgatgaaattgtgccttataatggcaaaatactctaacgacggtgctgctctggcggagttggaggagcaggccgcttccgccaataagcccaatttcagaggaacacggtgcatccattcgggcgcaatgcctcagaactaccaggacagcctggggcacgaggttatcgtgaacaaccaatgctcgaccaactcactgcagaagcagttgcaagcagtgctgcagtggattgccgctagccagtttaatgtaccaatgctttacttcatgggcgataaagacgggcagcttgaaaaactgccgcaagtgtcagctaaagccgcagaaaaagggtatagcgtggggggcctcctgcaggaggttatgaaatttgccaaagaacgacagccagacgaagctgtgggtaaagtggctcggaaacagctgctcgattggctgttagctaacctatag

SEQ ID NO: 141737 - DNA, 2565 bp, Artificial Sequence
  derived and/or modified sequence
atgatggcctatagtgatacaaccatgatgtctgacgatatcgactggctgcggagtcaccggggagtatgtaaagtggatttgtataaccctgagggccaacaggaccaggaccggaaggtgatatgttttgtggatgtaagtacgttgaacgtggaggacaaagattataaagatgcagcatcctcgtcctccgagggcaatttaaatttgggctctctcgaggagaaggaaattatcgtcatcaaggacacagagaaaaaggaccagtccaaaaccgagggatctgtctgcctcttcaagcaggctccgtctgatccagtgtcagttctcaactggctgctctctgatcttcaaaagtacgcactgggatttcagcacgccctgtccccttccaccagtacatgtaagcacaaggtgggagataccgaaggggaataccacagggcgtctagcgagaactgttactccgtttatgcggaccaagtgaatatcgactatctgatgaatagaccgcagaacctccgactcgagatgacagccgctaagaacaccaacaataaccagtctcctagcgctccccctgccaagcccccttccacccagcgcgctgttattagtcctgacggggagtgttcaattgacgacctgtctttttacgttaatcggttgtcctcactggtcatccaaatggcacataaagaaatcaaggagaagttagaggggaagtccaagtgcctccatcactcgatttgtccatctccaggcaataaagagagaatttctccccgaaccccagcttctaagatcgcctctgagatggcttacgaagccgtggaactgaccgcagccgagatgagggggaccggcgaggaaagccgagaagggggacagaagtcctttctttattccgaactgtctaataaatcgaaatctggcgacaaacagatgtcccagcgagagtctaaagagtttgcagattctatctctaagggtttgatggtctatgctaaccaggtggccagtgacatgatggtttccctaatgaagacactaaaggtgcatagctcaggaaaacccattccagccagcgtggtgctcaagcgcgtgctcctgagacataccaaggagatcgtgagtgatctcatagatagctgcatgaagaatctccacaacataacaggcgttctgatgaccgacagcgacttcgtgagtgctgtcaaacgaaacctcttcaatcagtggaagcagaacgcaaccgacattatggaggctatgctgaagagactggtcagcgctcttatcggagaggagaaggaaacaaagtcccaatctctatcatacgctagcctaaaggcaggctcgcatgatccgaaatgtcgaaaccagagtcttgagttctcgacgatgaaagccgagatgaaggagagggataaaggtaagatgaagagcgatccatgtaagagtttgaccagcgctgaaaaggtaggtgaacatatcctgaaggagggccttaccatttggaaccaaaagcaagggaactcctgcaaagttgccactaaggcctgctcaaacaaagacgagaaaggcgagaaaatcaacgctagcaccgactcgctggcgaaggacctgatcgtttccgccctgaagttgatacagtaccacttaactcaacaaaccaaagggaaagatacttgcgaggaggattgccccggttctacaatgggttacatggcacaatcaacccaatacgagaagtgtgggggaggccagtccgccaaagccttaagtgttaagcagttagaatctcacagagcccctggacccagcacatgtcagaaggagaaccagcaccttgattctcagaagatggacatgagcaatattgtgctcatgctgattcaaaaattgctcaatgagaaccctttcaagtgtgaggatccatgtgaaggcgaaaataaatgcagcgagccccgtgcttcaaaagctgcatcaatgtccaacagatccgataaagctgaagagcaatgccaagaacaccaggaactggattgcacgtcaggaatgaagcaagcaaatggtcagttcatcgacaagctggtagagtcagtgatgaaactgtgcctgattatggccaaatactctaacgatggggctgccctggccgaactggaagagcaggctgcatctgcaaacaagcctaactttaggggaacccggtgcattcactccggagctatgccccagaactaccaggacagtctcggccacgaggtgattgtgaacaaccagtgctccacaaactccctccagaagcagttgcaggcggtgctccaatggattgccgctagccagttcaacgtgccaatgttgtattttatgggcgacaaggacggccagctggagaaactcccccaggtatccgcaaaagccgcagaaaagggctattctgtggggggtctacttcaggaagtgatgaagttcgccaaggaacggcagccggacgaggccgtgggaaaagtggccaggaaacagctgctagactggttgctggcgaatttgtag

SEQ ID NO: 141738 - DNA, 2538 bp, Artificial Sequence
  derived and/or modified sequence
atgtccgacgatattgactggctaagatcccatcggggagtgtgcaaggtggacctgtacaaccccgagggccagcaggatcaggatcggaaagtcatctgtttcgtggacgtgtcaactctgaacgtggaagacaaggattataaagacgcagcttctagctcgagtgagggaaacctgaatttgggatccctggaagagaaagaaatcatcgtcatcaaagatactgaaaagaaggatcagagtaagactgaaggtagtgtgtgcttatttaaacaggcgccttcagaccctgtgagtgttctaaattggctcctttccgatctgcagaagtacgctctgggattccagcatgcactatctccttccacgtccacatgtaaacacaaagtaggcgacaccgagggagagtatcatcgtgccagcagcgaaaactgttattcggtgtacgcggaccaggtgaatatcgattaccttatgaatcgtccacagaatctaaggcttgagatgaccgccgctaagaataccaacaacaaccagagcccaagtgcccctccagcaaagcccccaagcactcagcgagccgtgatctcaccagatggagagtgctctattgacgatttgtcattctacgtcaaccgcctctcttcactcgtgatacagatggcccataaggagatcaaagagaaactggagggcaagtccaagtgtctgcaccacagcatctgtcccagcccaggaaataaagaaaggatctcgccccgaactccagcgtccaaaattgcatctgagatggcatatgaagcggttgagcttaccgccgcagaaatgcgaggaactggtgaagagtctcgagagggtggccagaaaagtttcctgtatagtgagctgagtaataagtctaagtctggtgataagcagatgagccagcgggagagcaaagaatttgccgatagcatctctaaggggcttatggtgtacgctaatcaagtggcctccgatatgatggtttcactgatgaagactttaaaggtgcacagcagcggcaagcctatccccgcatctgtggtgctgaagcgagtccttttgagacacacgaaggagattgtgagcgacctgatcgacagctgtatgaaaaacctgcacaacattactggggttctaatgaccgactccgatttcgtgtctgccgtcaaaaggaacctctttaaccagtggaagcaaaacgccaccgacattatggaggccatgctgaagcgactggtgtcagcgctgataggagaggagaaggaaactaagagtcagtcgttatcctacgcgtccctgaaggccggatcccacgacccgaaatgccggaatcagagcctggaattctctacaatgaaggccgagatgaaagagcgcgacaaaggcaaaatgaagtcagatccatgcaaaagtttgaccagcgctgagaaagtgggcgaacacatcctcaaggaaggtttgactatatggaaccagaagcagggtaactcctgtaaagtcgcaacaaaagcttgctctaacaaggacgaaaaaggggagaagatcaacgcctctacggactcactggccaaagacctcattgtttcagctctcaagctcattcaatatcatctgacacagcagacaaagggaaaggacacttgcgaagaggattgcccagggtctactatggggtatatggcccagagcacccagtatgagaaatgcggaggcggtcaatccgcaaaagctctttccgtaaagcagctggagagccacagagcccctgggccttcaacttgccagaaggaaaaccagcatcttgactctcaaaagatggacatgtccaacatcgtactgatgctaattcagaaactgttaaacgaaaatccattcaaatgcgaggatccatgtgaaggcgagaataaatgctccgagccgcgtgcgtctaaagccgcttcaatgtcaaatagaagcgacaaggctgaggagcagtgtcaggagcaccaggagctggattgtaccagtggaatgaaacaggctaacgggcaatttattgacaagctggtcgaatcagtgatgaagctgtgcctgattatggccaagtactcgaacgatggggctgccctagcagagctggaggaacaagccgcttccgcaaacaagcccaacttccgcggtacaagatgcatccatagcggcgcaatgcctcaaaactatcaggattctttgggccatgaggtgatcgtgaacaatcagtgtagtacaaacagccttcagaaacaactccaggctgtattgcagtggatcgccgctagccagtttaatgttccaatgctctactttatgggtgataaagacggccaactcgaaaagttgcctcaggtcagcgcaaaagcagctgaaaaggggtacagcgtgggaggcttattgcaggaagtaatgaagtttgctaaagagaggcaacctgatgaagcagtagggaaggtcgccagaaaacaactgctcgactggctgcttgccaacctgtag

SEQ ID NO: 141739 - DNA, 2538 bp, Artificial Sequence
  derived and/or modified sequence
atgtccgatgatatcgactggctaagatcccatcggggagtgtgcaaagtcgacctttataaccctgagggccagcaggatcaagatcggaaggttatatgcttcgtagacgtaagcactctcaatgtcgaggataaggactacaaggacgccgcatctagcagttctgagggaaacctcaatcttggctccctagaagaaaaagagattattgtcattaaggatactgagaaaaaagatcaatcaaaaaccgaaggctccgtctgtctgtttaaacaggcaccgagtgaccctgtgagtgtcctgaactggctgctgtccgacctacaaaaatatgccctgggattccagcatgccctttcaccctccacatccacttgcaaacacaaagttggggacactgaaggggaataccatcgggctagctccgagaactgctactcagtctacgccgaccaggtcaacattgattacctaatgaaccgcccacagaaccttaggcttgaaatgacggcggctaagaacactaacaacaatcaatctccttccgccccacccgcaaaaccacccagcacccagcgcgcagtgattagtccagacggagagtgctctatcgacgacctctcgttttacgtgaacagactctcttcactggtgatacagatggcccacaaagagatcaaggagaagttagaaggcaagtcaaaatgtctccatcactctatatgccctagtccagggaataaagagaggatatctcccagaacgcccgctagtaaaattgctagcgaaatggcctatgaagcagtggaactgaccgcagcagagatgcggggaaccggcgaggaaagccgggagggtgggcagaagagcttcttatattctgagctgtccaacaagagcaaatccggagacaaacaaatgagccagagggagagtaaagagttcgccgactccatatcgaagggactgatggtgtatgccaatcaagtggcatcggatatgatggtgagtctgatgaagaccctgaaggttcacagctctggaaagccaatccctgcctcagtcgttctgaagcgagtactgttaaggcataccaaggagattgtgtctgacctgatcgattcctgtatgaagaacttgcacaatatcacaggcgtcctgatgaccgatagtgatttcgtgagtgccgtgaaacgcaacctgtttaatcagtggaaacagaatgcaacagatattatggaggcgatgctcaaacgactggtgtccgctctaattggggaagaaaaagaaaccaaatcacaatccttgtcttacgcctctttgaaagccggaagccatgaccctaagtgcaggaatcaaagtctggaattctctacgatgaaggccgagatgaaagaaagggataagggcaagatgaaatctgacccctgcaagagtctgacaagtgcagaaaaggtaggtgagcacatactaaaagaggggctcactatctggaaccaaaaacaaggcaacagctgtaaggtcgcaacaaaagcatgctccaacaaagacgagaagggggagaaaattaatgctagcaccgatagtctggcgaaggatctgattgtgagcgctcttaagctgatccaatatcacctgactcagcaaactaagggcaaagatacttgcgaagaagactgtccaggctctacaatggggtatatggctcaaagcacccagtatgaaaagtgcggaggcggacagagcgctaaagcactgtccgtgaaacaactggagtcacacagagcccctggcccatctacatgtcagaaggagaaccagcacctcgacagtcagaagatggacatgagcaatatcgtgctgatgcttatacagaagttgctgaacgagaacccattcaaatgtgaggacccatgtgaaggtgaaaacaaatgcagtgagcctcgggcatctaaggccgcaagcatgtcaaaccgctccgacaaggcagaagagcagtgtcaggagcaccaggaactcgattgcacgtccgggatgaaacaggctaatgggcaatttattgacaaactggttgagagcgtcatgaagctgtgtctaattatggccaaatatagtaacgatggagcagccttagctgaactggaggaacaggcagctagtgccaataagccaaactttaggggcacaagatgcatccactccggagccatgccacagaactaccaggattcactcggacacgaggtgatcgtgaacaatcaatgttctaccaacagcctgcagaagcagctacaggcggtgctgcagtggatcgcagcctcgcagttcaatgttcccatgctttactttatgggggataaggacgggcagctggaaaagctacctcaggtcagtgcaaaggccgcagagaagggttactccgtgggaggattgctgcaagaggtcatgaagttcgctaaggaaaggcaacctgatgaggctgtggggaaggtggcacgcaagcaactcctggattggctgctggcaaatctctag

SEQ ID NO: 141740 - DNA, 2881 bp, Artificial Sequence
  derived and/or modified sequence
ccagctggcagtcaaggctgtaggagggcatggagagttgaagaaaaaagcagtatcttgaggcagactggaagagtcatcacagcatccaaatcaacaagaaaacatcattccagggtcctacatgatggcgtactctgatactacaatgatgtctgatgatattgactggttacgcagccacaggggtgtgtgcaaggtagatctctacaacccagaaggacagcaagatcaggaccggaaagtgatatgctttgtcgatgtgtccaccctgaatgtagaagataaagattacaaggatgctgctagttccagctcagaaggcaacttaaacctgggaagtctggaagaaaaagagattatcgtgatcaaggacactgagaagaaagaccagtctaagacagagggatctgtatgccttttcaaacaagctccctctgatcctgtaagtgtcctcaactggcttctcagtgatctccagaagtatgccttgggtttccaacatgcactgagcccctcaacctctacctgtaaacataaagtaggagacacagagggcgaatatcacagagcatcctctgagaactgctacagtgtctatgccgatcaagtgaacatagattatttgatgaacagacctcaaaacctacgtctagaaatgacagcagctaaaaacaccaacaataatcaaagtccttcagctcctccagccaaacctcctagcactcagagagcagtcatttcccctgatggagaatgttctatagatgacctttccttctacgtcaaccgactatcttctctggtaatccagatggcccataaggaaatcaaggagaagttggaaggtaaaagcaaatgccttcatcattcaatctgtccatcccctgggaacaaagagagaatcagtccccgaactcctgcgagcaagattgcttctgaaatggcctatgaagctgtggaactgacagctgcagaaatgcgtggcactggagaggagtccagggaaggtggccagaaaagctttctatatagcgaattatccaacaagagcaaaagtggagacaaacagatgtcccagagagagagcaaagaatttgcagattccatcagcaaggggctcatggtttatgcaaatcaggtggcatctgacatgatggtctctctcatgaagaccttgaaagtgcacagctctgggaagccaattccagcatctgtggtcctgaagagggtgttgctaaggcacaccaaggagattgtgtccgatttgattgattcttgcatgaagaacctgcataatattactggggtcctgatgactgactcagactttgtctcagctgtcaagagaaatctgttcaaccagtggaaacaaaatgctacagacatcatggaggccatgctgaagcgcttggtcagtgcccttataggtgaggagaaggagactaagtctcagagtctgtcatatgcatctttaaaagctgggtcccatgatcccaaatgcaggaatcagagtcttgaattctccaccatgaaagctgaaatgaaagagagggacaaaggcaaaatgaaatcagacccatgcaagtcactgactagtgctgagaaagtcggtgaacacattctcaaagagggcctaaccatctggaaccaaaagcaaggaaactcatgcaaggtggctaccaaagcatgcagcaataaagatgagaaaggagaaaagatcaatgcttccacagattcactggccaaggacctgattgtctctgcccttaagctgatccagtaccatctgacccagcagactaagggcaaagatacatgtgaagaagactgtcctggttccaccatgggctatatggctcagagtactcaatatgaaaagtgtggaggtggccaaagtgccaaagcactttcagtgaaacaactagaatctcacagagcccctggaccatccacctgtcaaaaggagaaccaacacctggactcccagaaaatggatatgtcaaacatcgttctaatgctgattcagaaactgcttaatgagaaccccttcaaatgtgaggatccatgcgaaggtgagaacaagtgttctgagcccagggcaagcaaagcagcttccatgtccaacagatctgacaaagcggaagaacaatgccaggagcatcaagaacttgactgtaccagtgggatgaagcaagcgaacgggcaatttatagataaactagtagaatctgtgatgaagctctgccttatcatggctaagtatagcaacgatggggcagcccttgctgagttggaagaacaagcagcctcggcaaataagcccaatttcaggggcaccagatgcattcacagtggtgcaatgccacagaactatcaagactctcttggacatgaagtaattgtcaataatcagtgctctacaaatagcttgcagaagcagctccaggctgtcctgcagtggattgcagcctcccagtttaacgtgcccatgctctacttcatgggagataaggatggacaactggaaaagcttcctcaggtttcagctaaagcagcagagaaggggtacagtgtaggaggtcttcttcaagaggtcatgaagtttgccaaggaacggcaaccagatgaagctgtgggaaaggtggccaggaaacagttgctggactggctgctcgctaacctgtgagctgatccttgactcctcttcatcttagcccccctagcagcattccatcccagccagagcacccccaccatcaggccagtcaactgcacaatacacaactgtatttcccaatacacttgagcagttgcctgtgaatgtaagaggtgtcaacaaactgggaaataaaataaaaaaaaataataataaatgtgt

SEQ ID NO: 141741 - DNA, 2886 bp, Artificial Sequence
  derived and/or modified sequence
ccagctggcagtcaaggctgtaggagggcatggagagttgaagaaaaaagcagtatcttgaggcagactggaagagtcatcacagcatccaaatcaacaagaaaacatcattccagggtcctacatgatggcgtactctgatactacaatgatgtctgatgatattgactggttacgcagccacaggggtgtgtgcaaggtagatctctacaacccagaaggacagcaagatcaggaccggaaagtgatatgctttgtcgatgtgtccaccctgaatgtagaagataaagattacaaggatgctgctagttccagctcagaaggcaacttaaacctgggaagtctggaagaaaaagagattatcgtgatcaaggacactgagaagaaagaccagtctaagacagagggatctgtatgccttttcaaacaagctccctctgatcctgtaagtgtcctcaactggcttctcagtgatctccagaagtatgccttgggtttccaacatgcactgagcccctcaacctctacctgtaaacataaagtaggagacacagagggcgaatatcacagagcatcctctgagaactgctacagtgtctatgccgatcaagtgaacatagattatttgatgaacagacctcaaaacctacgtctagaaatgacagcagctaaaaacaccaacaataatcaaagtccttcagctcctccagccaaacctcctagcactcagagagcagtcatttcccctgatggagaatgttctatagatgacctttccttctacgtcaaccgactatcttctctggtaatccagatggcccataaggaaatcaaggagaagttggaaggtaaaagcaaatgccttcatcattcaatctgtccatcccctgggaacaaagagagaatcagtccccgaactcctgcgagcaagattgcttctgaaatggcctatgaagctgtggaactgacagctgcagaaatgcgtggcactggagaggagtccagggaaggtggccagaaaagctttctatatagcgaattatccaacaagagcaaaagtggagacaaacagatgtcccagagagagagcaaagaatttgcagattccatcagcaaggggctcatggtttatgcaaatcaggtggcatctgacatgatggtctctctcatgaagaccttgaaagtgcacagctctgggaagccaattccagcatctgtggtcctgaagagggtgttgctaaggcacaccaaggagattgtgtccgatttgattgattcttgcatgaagaacctgcataatattactggggtcctgatgactgactcagactttgtctcagctgtcaagagaaatctgttcaaccagtggaaacaaaatgctacagacatcatggaggccatgctgaagcgcttggtcagtgcccttataggtgaggagaaggagactaagtctcagagtctgtcatatgcatctttaaaagctgggtcccatgatcccaaatgcaggaatcagagtcttgaattctccaccatgaaagctgaaatgaaagagagggacaaaggcaaaatgaaatcagacccatgcaagtcactgactagtgctgagaaagtcggtgaacacattctcaaagagggcctaaccatctggaaccaaaagcaaggaaactcatgcaaggtggctaccaaagcatgcagcaataaagatgagaaaggagaaaagatcaatgcttccacagattcactggccaaggacctgattgtctctgcccttaagctgatccagtaccatctgacccagcagactaagggcaaagatacatgtgaagaagactgtcctggttccaccatgggctatatggctcagagtactcaatatgaaaagtgtggaggtggccaaagtgccaaagcactttcagtgaaacaactagaatctcacagagcccctggaccatccacctgtcaaaaggagaaccaacacctggactcccagaaaatggatatgtcaaacatcgttctaatgctgattcagaaactgcttaatgagaaccccttcaaatgtgaggatccatgcgaaggtgagaacaagtgttctgagcccagggcaagcaaagcagcttccatgtccaacagatctgacaaagcggaagaacaatgccaggagcatcaagaacttgactgtaccagtgggatgaagcaagcgaacgggcaatttatagataaactagtagaatctgtgatgaagctctgccttatcatggctaagtatagcaacgatggggcagcccttgctgagttggaagaacaagcagcctcggcaaataagcccaatttcaggggcaccagatgcattcacagtggtgcaatgccacagaactatcaagactctcttggacatgaagtaattgtcaataatcagtgctctacaaatagcttgcagaagcagctccaggctgtcctgcagtggattgcagcctcccagtttaacgtgcccatgctctacttcatgggagataaggatggacaactggaaaagcttcctcaggtttcagctaaagcagcagagaaggggtacagtgtaggaggtcttcttcaagaggtcatgaagtttgccaaggaacggcaaccagatgaagctgtgggaaaggtggccaggaaacagttgctggactggctgctcgctaacctgtgagctgatccttgactcctcttcatcttagcccccctagcagcattccatcccagccagagcacccccaccatcaggccagtcaactgcacaatacacaactgtatttcccaatacacttgagcagttgcctgtgaatgtaagaggtgtcaacaaactgggaaataaaataaaaaaaaataataataaatgtgtcattg

SEQ ID NO: 141742 - DNA, 2565 bp, Artificial Sequence
  derived and/or modified sequence
atgatggcctacagcgacaccaccatgatgagcgacgacatcgactggctgagaagccacagaggcgtgtgcaaggtggacctgtacaaccccgagggccagcaggaccaggacagaaaggtgatctgcttcgtggacgtgagcaccctgaacgtggaggacaaggactacaaggacgccgccagcagcagcagcgagggcaacctgaacctgggcagcctggaggagaaggagatcatcgtgatcaaggacaccgagaagaaggaccagagcaagaccgagggcagcgtgtgcctgttcaagcaggcccccagcgaccccgtgagcgtgctgaactggctgctgagcgacctgcagaagtacgccctgggcttccagcacgccctgagccccagcaccagcacctgcaagcacaaggtgggcgacaccgagggcgagtaccacagagccagcagcgagaactgctacagcgtgtacgccgaccaggtgaacatcgactacctgatgaacagaccccagaacctgagactggagatgaccgccgccaagaacaccaacaacaaccagagccccagcgccccccccgccaagccccccagcacccagagagccgtgatcagccccgacggcgagtgcagcatcgacgacctgagcttctacgtgaacagactgagcagcctggtgatccagatggcccacaaggagatcaaggagaagctggagggcaagagcaagtgcctgcaccacagcatctgccccagccccggcaacaaggagagaatcagccccagaacccccgccagcaagatcgccagcgagatggcctacgaggccgtggagctgaccgccgccgagatgagaggcaccggcgaggagagcagagagggcggccagaagagcttcctgtacagcgagctgagcaacaagagcaagagcggcgacaagcagatgagccagagagagagcaaggagttcgccgacagcatcagcaagggcctgatggtgtacgccaaccaggtggccagcgacatgatggtgagcctgatgaagaccctgaaggtgcacagcagcggcaagcccatccccgccagcgtggtgctgaagagagtgctgctgagacacaccaaggagatcgtgagcgacctgatcgacagctgcatgaagaacctgcacaacatcaccggcgtgctgatgaccgacagcgacttcgtgagcgccgtgaagagaaacctgttcaaccagtggaagcagaacgccaccgacatcatggaggccatgctgaagagactggtgagcgccctgatcggcgaggagaaggagaccaagagccagagcctgagctacgccagcctgaaggccggcagccacgaccccaagtgcagaaaccagagcctggagttcagcaccatgaaggccgagatgaaggagagagacaagggcaagatgaagagcgacccctgcaagagcctgaccagcgccgagaaggtgggcgagcacatcctgaaggagggcctgaccatctggaaccagaagcagggcaacagctgcaaggtggccaccaaggcctgcagcaacaaggacgagaagggcgagaagatcaacgccagcaccgacagcctggccaaggacctgatcgtgagcgccctgaagctgatccagtaccacctgacccagcagaccaagggcaaggacacctgcgaggaggactgccccggcagcaccatgggctacatggcccagagcacccagtacgagaagtgcggcggcggccagagcgccaaggccctgagcgtgaagcagctggagagccacagagcccccggccccagcacctgccagaaggagaaccagcacctggacagccagaagatggacatgagcaacatcgtgctgatgctgatccagaagctgctgaacgagaaccccttcaagtgcgaggacccctgcgagggcgagaacaagtgcagcgagcccagagccagcaaggccgccagcatgagcaacagaagcgacaaggccgaggagcagtgccaggagcaccaggagctggactgcaccagcggcatgaagcaggccaacggccagttcatcgacaagctggtggagagcgtgatgaagctgtgcctgatcatggccaagtacagcaacgacggcgccgccctggccgagctggaggagcaggccgccagcgccaacaagcccaacttcagaggcaccagatgcatccacagcggcgccatgccccagaactaccaggacagcctgggccacgaggtgatcgtgaacaaccagtgcagcaccaacagcctgcagaagcagctgcaggccgtgctgcagtggatcgccgccagccagttcaacgtgcccatgctgtacttcatgggcgacaaggacggccagctggagaagctgccccaggtgagcgccaaggccgccgagaagggctacagcgtgggcggcctgctgcaggaggtgatgaagttcgccaaggagagacagcccgacgaggccgtgggcaaggtggccagaaagcagctgctggactggctgctggccaacctgtag

SEQ ID NO: 141743 - protein, 1006 aa, Artificial Sequence
  derived and/or modified sequence
MPDQISVSEFVAETHEDYKAPTASSFTTRTAQCRNTVAAIEEALDVDRMVLYKMKKSVKAINSSGLAHVENEEQYTQALEKFGGNCVCRDDPDLGSAFLKFSVFTKELTALFKNLIQNMNNIISFPLDSLLKGDLKGVKGDLKKPFDKAWKDYETKITKIEKEKKEHAKLHGMIRTEISGAEIAEEMEKERRFFQLQMCEYLLKVNEIKIKKGVDLLQNLIKYFHAQCNFFQDGLKAVESLKPSIETLSTDLHTIKQAQDEERRQLIQLRDILKSALQVEQKEDSQIRQSTAYSLHQPQGNKEHGTERNGSLYKKSDGIRKVWQKRKCSVKNGFLTISHGTANRPPAKLNLLTCQVKTNPEEKKCFDLISHDRTYHFQAEDEQECQIWMSVLQNSKEEALNNAFKGDDNTGENNIVQELTKEIISEVQRMTGNDVCCDCGAPDPTWLSTNLGILTCIECSGIHRELGVHYSRMQSLTLDVLGTSELLLAKNIGNAGFNEIMECCLPAEDSVKPNPGSDMNARKDYITAKYIERRYARKKHADNAAKLHSLCEAVKTRDIFGLLQAYADGVDLTEKIPLANGHEPDETALHLAVRSVDRTSLHIVDFLVQNSGNLDKQTGKGSTALHYCCLTDNAECLKLLLRGKASIEIANESGETPLDIAKRLKHEHCEELLTQALSGRFNSHVHVEYEWRLLHEDLDESDDDMDEKLQPSPNRREDRPISFYQLGSNQLQSNAVSLARDAANLAKEKQRAFMPSILQNETYGALLSGSPPPAQPAAPSTTSAPPLPPRNVGKVQTASSANTLWKTNSVSVDGGSRQRSSSDPPAVHPPLPPLRVTSTNPLTPTPPPPVAKTPSVMEALSQPSKPAPPGISQIRPPPLPPQPPSRLPQKKPAPGADKSTPLTNKGQPRGPVDLSATEALGPLSNAMVLQPPAPMPRKSQATKLKPKRVKALYNCVADNPDELTFSEGDVIIVDGEEDQEWWIGHIDGDPGRKGAFPVSFVHFIAD

SEQ ID NO: 141744 - DNA, 3021 bp, Artificial Sequence
  derived and/or modified sequence
atgcccgaccagatcagcgtgagcgagttcgtggccgagacccacgaggactacaaggcccccaccgccagcagcttcaccaccagaaccgcccagtgcagaaacaccgtggccgccatcgaggaggccctggacgtggacagaatggtgctgtacaagatgaagaagagcgtgaaggccatcaacagcagcggcctggcccacgtggagaacgaggagcagtacacccaggccctggagaagttcggcggcaactgcgtgtgcagagacgaccccgacctgggcagcgccttcctgaagttcagcgtgttcaccaaggagctgaccgccctgttcaagaacctgatccagaacatgaacaacatcatcagcttccccctggacagcctgctgaagggcgacctgaagggcgtgaagggcgacctgaagaagcccttcgacaaggcctggaaggactacgagaccaagatcaccaagatcgagaaggagaagaaggagcacgccaagctgcacggcatgatcagaaccgagatcagcggcgccgagatcgccgaggagatggagaaggagagaagattcttccagctgcagatgtgcgagtacctgctgaaggtgaacgagatcaagatcaagaagggcgtggacctgctgcagaacctgatcaagtacttccacgcccagtgcaacttcttccaggacggcctgaaggccgtggagagcctgaagcccagcatcgagaccctgagcaccgacctgcacaccatcaagcaggcccaggacgaggagagaagacagctgatccagctgagagacatcctgaagagcgccctgcaggtggagcagaaggaggacagccagatcagacagagcaccgcctacagcctgcaccagccccagggcaacaaggagcacggcaccgagagaaacggcagcctgtacaagaagagcgacggcatcagaaaggtgtggcagaagagaaagtgcagcgtgaagaacggcttcctgaccatcagccacggcaccgccaacagaccccccgccaagctgaacctgctgacctgccaggtgaagaccaaccccgaggagaagaagtgcttcgacctgatcagccacgacagaacctaccacttccaggccgaggacgagcaggagtgccagatctggatgagcgtgctgcagaacagcaaggaggaggccctgaacaacgccttcaagggcgacgacaacaccggcgagaacaacatcgtgcaggagctgaccaaggagatcatcagcgaggtgcagagaatgaccggcaacgacgtgtgctgcgactgcggcgcccccgaccccacctggctgagcaccaacctgggcatcctgacctgcatcgagtgcagcggcatccacagagagctgggcgtgcactacagcagaatgcagagcctgaccctggacgtgctgggcaccagcgagctgctgctggccaagaacatcggcaacgccggcttcaacgagatcatggagtgctgcctgcccgccgaggacagcgtgaagcccaaccccggcagcgacatgaacgccagaaaggactacatcaccgccaagtacatcgagagaagatacgccagaaagaagcacgccgacaacgccgccaagctgcacagcctgtgcgaggccgtgaagaccagagacatcttcggcctgctgcaggcctacgccgacggcgtggacctgaccgagaagatccccctggccaacggccacgagcccgacgagaccgccctgcacctggccgtgagaagcgtggacagaaccagcctgcacatcgtggacttcctggtgcagaacagcggcaacctggacaagcagaccggcaagggcagcaccgccctgcactactgctgcctgaccgacaacgccgagtgcctgaagctgctgctgagaggcaaggccagcatcgagatcgccaacgagagcggcgagacccccctggacatcgccaagagactgaagcacgagcactgcgaggagctgctgacccaggccctgagcggcagattcaacagccacgtgcacgtggagtacgagtggagactgctgcacgaggacctggacgagagcgacgacgacatggacgagaagctgcagcccagccccaacagaagagaggacagacccatcagcttctaccagctgggcagcaaccagctgcagagcaacgccgtgagcctggccagagacgccgccaacctggccaaggagaagcagagagccttcatgcccagcatcctgcagaacgagacctacggcgccctgctgagcggcagccccccccccgcccagcccgccgcccccagcaccaccagcgccccccccctgccccccagaaacgtgggcaaggtgcagaccgccagcagcgccaacaccctgtggaagaccaacagcgtgagcgtggacggcggcagcagacagagaagcagcagcgacccccccgccgtgcacccccccctgccccccctgagagtgaccagcaccaaccccctgacccccaccccccccccccccgtggccaagacccccagcgtgatggaggccctgagccagcccagcaagcccgccccccccggcatcagccagatcagacccccccccctgcccccccagccccccagcagactgccccagaagaagcccgcccccggcgccgacaagagcacccccctgaccaacaagggccagcccagaggccccgtggacctgagcgccaccgaggccctgggccccctgagcaacgccatggtgctgcagccccccgcccccatgcccagaaagagccaggccaccaagctgaagcccaagagagtgaaggccctgtacaactgcgtggccgacaaccccgacgagctgaccttcagcgagggcgacgtgatcatcgtggacggcgaggaggaccaggagtggtggatcggccacatcgacggcgaccccggcagaaagggcgccttccccgtgagcttcgtgcacttcatcgccgactag

SEQ ID NO: 141745 - DNA, 3021 bp, Artificial Sequence
  derived and/or modified sequence
atgccagaccagatctcagtctctgagttcgtggctgaaacacatgaagactataaagcacccacagcgagcagcttcactactcggaccgcgcagtgtcgcaatactgtggcagccatcgaagaggcactggacgtggatcgaatggtactttacaagatgaaaaaatctgtcaaagccatcaattcgagcggactggctcatgtggagaatgaggagcagtacactcaagccttagaaaaattcgggggaaactgtgtctgtagagacgatcccgatctggggagtgcctttctcaaattcagcgtctttacgaaggaactcacagcgctatttaagaacctgattcaaaatatgaacaatattatttccttccctttggactccctgctgaaaggtgacttaaaaggcgttaagggcgacttaaagaaaccatttgataaggcttggaaggattatgaaacaaaaataacgaaaatcgagaaagagaaaaaggagcatgctaaactccacggcatgatccgcacagagatctccggcgccgaaatagccgaggagatggagaaggagcggagatttttccagttgcagatgtgcgaatacctgctcaaagttaatgaaatcaaaatcaagaaaggggtggacttactccagaatctcattaagtacttccacgcacagtgtaatttttttcaggacggcttgaaggcagtggaatcgctcaagccttccatcgaaactctatctacggatctccacaccataaaacaagcccaggatgaggagaggagacagctgatccagctgcgcgacattctgaaatcggccctccaggtggaacagaaggaggactctcagatacgccaatccacagcttactctttacaccagccgcagggaaacaaagagcatgggaccgaaagaaacggcagcctgtacaagaagtccgacgggatacgtaaagtttggcaaaaacgcaagtgctctgtgaaaaatggtttcttgaccataagtcacggcacagcaaatagaccccccgcaaaactcaatctgctgacctgccaggttaaaactaatcccgaagagaagaagtgcttcgaccttattagtcacgaccgtacatatcattttcaggcagaagatgagcaagagtgtcaaatatggatgtctgtcctgcaaaattccaaggaggaagcactgaacaatgcattcaaaggagatgataacactggggagaataatatagtccaagaactcactaaagagattatcagtgaggtgcagagaatgactggcaacgacgtgtgttgtgattgcggagcccctgatccaacctggctgagtactaacctgggcattttaacatgtatcgaatgttctgggatccaccgcgagctcggggtccattacagccgtatgcaaagtctgacgctcgatgtgctaggaacttctgaactgctgctggccaaaaatatcggaaatgcggggtttaatgagattatggaatgctgcctgcccgccgaagactccgtgaagcccaatccgggcagtgatatgaacgcccgaaaggactatataaccgctaaatacatagagagaagatatgcccggaagaaacacgccgacaatgctgccaaactgcatagtctctgtgaagccgtcaagacacgggacatctttggccttctgcaagcctatgccgacggggtggacttaactgagaagatccccctcgccaacggacacgagccggatgaaactgcactccacctggcagtgagaagcgtggatcgaacctcccttcatatcgttgacttcctggtgcagaactctggaaatctggacaaacaaacagggaaaggttctaccgctctgcactattgctgcttgactgataacgctgaatgcctgaagcttctgctccgaggaaaagcgtcgattgagattgctaatgagtctggcgagactccgctggatatcgccaaaagactgaagcacgagcactgtgaggagctgctgactcaagcgctatctggcaggtttaattcccatgtccacgttgagtacgaatggcggctgcttcatgaggatctggacgaatctgatgatgacatggatgagaagctccagccatccccgaaccgaagagaagatcgccccatctcattctatcagttaggcagcaatcaactgcagtccaacgctgtcagcctggcccgagatgctgccaaccttgcgaaggagaagcagcgcgcctttatgccttccatcctgcagaacgagacctacggtgccctgctatctggatcccccccacctgcccagcctgcagctccatccaccacctccgcgcccccactgccgcctcgcaacgttggcaaggtacagacagcaagttcagccaacactctgtggaagaccaattcagtatcagtagacggtgggtcccgccaaagaagttcatcagaccctcccgctgtacatcccccgctgcctcccctgcgagtgacgtccactaacccccttacaccgacacctcccccacccgtggcaaaaactccctctgtgatggaggcactgtcacagccttccaagccggccccaccaggaatctcacagattaggccacctcccctgccgccacagcccccgagtcgactccctcagaagaagccagcaccaggggctgataaaagcacacctctaacaaataaaggtcaaccacgtggcccagtggacctgtcagctacagaggccttggggcctctgagcaacgccatggtactgcagccacctgccccgatgcccagaaagtctcaggccaccaagctgaaacctaagcgcgtgaaggctttgtataattgcgtcgccgataacccagacgaacttactttctcagagggggatgtcatcatcgtggatggagaggaagaccaagaatggtggattgggcatattgatggcgatcccggacggaaaggagcctttcccgtgtctttcgtacactttatcgctgactag

SEQ ID NO: 141746 - DNA, 3021 bp, Artificial Sequence
  derived and/or modified sequence
atgccagaccagatctctgtgtctgaatttgtggccgagacccatgaggactacaaggcccccacagccagcagcttcaccaccaggacagcccagtgcaggaacacagtggccgccatcgaggaggccctggatgtggacaggatggtgctgtacaagatgaagaagtctgtgaaggccatcaacagcagcggcctggcccacgtggagaatgaggagcagtacacccaggccctggagaagtttggaggcaactgtgtgtgcagagatgatcctgacctgggcagcgccttcctgaagttcagcgtcttcaccaaggagctgacagccctcttcaagaacctgatccagaacatgaacaacatcatctccttccccctggacagcctgctgaagggggacctgaagggcgtgaagggggacctgaagaagccctttgacaaggcctggaaggactatgagaccaagatcaccaagattgagaaggagaagaaggagcacgccaagctgcacggcatgatcagaacagagatctctggagctgagattgctgaggagatggagaaggagcggcgcttcttccagctgcagatgtgtgagtacctgctgaaggtgaatgagatcaagatcaagaagggcgtggacctgctgcagaacctgatcaagtacttccacgcccagtgcaacttcttccaggacggcctgaaggctgtggagagcctgaagcccagcattgagaccctgagcacagacctgcacaccatcaagcaggcccaggatgaggagcggcggcagctgatccagctgcgggacatcctgaagagcgccctgcaggtggagcagaaggaggacagccagatccggcagagcacagcctacagcctgcaccagccccagggcaacaaggagcacggcacagaaagaaatggcagcctgtacaagaagagtgatggcatcaggaaggtgtggcagaagaggaaatgttctgtgaagaatggcttcctgaccatcagccatggaacagccaacagacctccagccaagctgaacctgctgacctgccaggtgaagaccaaccctgaggagaagaagtgctttgacctgatcagccatgacaggacctaccacttccaggccgaggatgagcaggagtgccagatctggatgtctgtgctgcagaacagcaaggaggaggccctgaacaatgccttcaagggagatgacaacacaggagagaacaacatcgtgcaggagctgaccaaggagatcatcagcgaggtgcagaggatgactggaaatgatgtgtgctgtgactgtggggccccagaccccacctggctgagcaccaacctgggcatcctgacctgcatcgagtgcagcggcatccaccgggagctgggcgtgcactacagcaggatgcagagcctgaccctggatgtgctgggcaccagcgagctgctgctggccaagaacattggaaatgccggcttcaatgagatcatggagtgctgcctgcctgctgaggacagcgtgaagcccaaccctggcagtgacatgaatgccaggaaggactacatcacagccaagtacattgaaagaagatatgccaggaagaagcatgctgacaatgctgccaagctgcacagcctgtgtgaggccgtgaagacccgggacatcttcggcctgctgcaggcctatgcagatggagtggacctgacagagaagatccccctggccaacggccacgagccagatgaaacagccctgcacctggccgtgcgctctgtggacaggaccagcctgcacatcgtggacttcctggtgcagaacagcggcaacctggacaagcagacaggcaagggcagcacagccctgcactactgctgcctgacagacaatgcagaatgtctgaagctgctgctgcggggcaaggccagcattgaaattgccaatgaaagtggagagacccccctggacatcgccaagaggctgaagcatgagcactgtgaggagctgctgacccaggccctgagcggccgcttcaacagccacgtgcacgtggagtatgagtggaggctgctgcacgaggacctggatgaaagtgatgatgacatggatgagaagctgcagcccagccccaacagaagagaagatcggcccatctccttctaccagctgggcagcaaccagctgcagagcaatgctgtgtccctggccagagatgctgccaacctggccaaggagaagcagagggccttcatgcccagcatcctgcagaatgagacctatggagccctgctgagcggcagccccccaccagcccagcctgctgcccccagcaccaccagcgccccacccctgcccccaagaaatgtgggcaaggtgcagacagccagcagcgccaacaccctgtggaagaccaacagcgtgtctgtggatggcggcagccggcagaggagcagcagtgaccccccagctgtgcacccccccctgccccccctgcgggtgaccagcaccaaccccctgacccccaccccacctcctcctgtggccaagaccccatctgtgatggaggccctgagccagcccagcaagccagcccctcctggcatcagccagatccggcccccacccctgcccccccagccccccagccggctgccccagaagaagccagcccctggagctgacaagagcacccccctgaccaacaagggccagccccggggccctgtggacctgagcgccacagaggccctgggccccctgagcaatgccatggtgctgcagcccccagcccccatgcccaggaagagccaggccaccaagctgaagcccaagagggtgaaggccctgtacaactgtgtggccgacaacccagatgagctgaccttctctgaaggagatgtgatcatcgtggatggagaggaggaccaggagtggtggattggccacattgatggagaccccggcaggaaaggagccttccctgtgtcctttgtgcacttcatcgctgactag

SEQ ID NO: 141747 - DNA, 3021 bp, Artificial Sequence
  derived and/or modified sequence
atgcccgaccagatcagcgtgagcgagttcgtggccgagacccacgaggactataaggcgccaacagctagtagcttcacaacccgtaccgcccagtgcaggaatactgtggctgccattgaggaggcccttgacgtcgaccggatggtgctttataagatgaaaaaatctgtgaaagccattaacagtagcggtctggctcacgtggagaacgaggagcagtatacgcaggcgttggagaagtttgggggtaactgtgtttgtcgggacgacccagatctgggcagtgcatttttgaaattttcagtgttcaccaaggagctcactgctctgtttaaaaatctgattcagaatatgaacaacatcatctcattcccactcgacagcttgctgaagggtgacctcaagggtgtaaagggcgatcttaagaaaccttttgacaaggcttggaaggattacgagacgaagattacaaaaattgaaaaagaaaagaaggagcatgcaaagctacatggtatgatccgaaccgagattagcggcgccgagatcgctgaggagatggagaaggagcggcggttctttcagctgcagatgtgtgagtacctgcttaaagttaatgagataaagatcaagaaaggggtcgatcttctccaaaacttaattaagtattttcatgcacagtgtaactttttccaggacgggttgaaggcagtggaaagcttgaagcccagcatagagacgctctctactgacctgcacacaatcaaacaagcccaagatgaggagagaagacagctgattcaacttcgtgatatcctcaaaagtgccttacaagtggaacagaaagaagattcacagattaggcaatcaaccgcttactcgctgcaccagccacagggcaacaaagaacatggcactgagcgcaacggctccctgtacaagaaaagcgacggcatccgtaaagtctggcagaagaggaagtgtagcgtaaagaacggcttcttgactatctcccatggaaccgccaatcgcccaccagccaagctgaacctgcttacatgtcaggttaaaacgaacccagaagagaaaaaatgctttgacctgatctcccacgatagaacttaccacttccaggccgaggacgagcaggaatgtcagatctggatgtctgttctacaaaattcaaaggaggaggcacttaacaatgcctttaaaggcgacgataacacaggagagaataacatcgtacaggaattaaccaaagagattatctcagaggtgcagaggatgactggcaacgatgtttgttgcgattgcggagctccggatccgacctggttgagtaccaatctgggcatcctgacatgcatcgagtgcagtggtattcatagagaacttggtgtccattactcacgtatgcaatccctcacccttgacgttctgggcacctctgagcttcttctggcgaagaacatcggaaacgccggatttaacgaaatcatggagtgttgtttacccgcggaggattctgtcaagcccaatcctgggtctgatatgaacgctcgcaaggactatattacagccaagtacatcgaaagaaggtatgcaagaaagaagcacgcagacaacgccgctaagttgcactccctttgcgaggcggtgaagactagagatatcttcggcctactccaggcctacgcagatggcgtcgacctcacagagaaaattcccctagccaatggacacgaaccagatgagactgctctacaccttgccgtaagatccgtggatcgcaccagcctgcatatcgtagatttccttgtgcagaatagcgggaaccttgacaaacaaacaggcaagggctctacagctctgcactactgttgccttacggataatgccgagtgcctcaagcttctgctccggggtaaagctagcattgagatcgcaaacgaatcaggcgaaacccctctcgacattgctaagaggctgaagcacgagcactgtgaagagctgctgacacaggctctgtctggacgattcaatagccacgtgcatgtcgaatatgaatggaggctgctccacgaagatcttgatgaaagtgatgacgatatggatgagaagttgcagccaagccctaaccggagggaggatcgacctatatccttctatcagctgggcagcaatcaattacagagtaatgccgtttctctagcccgggatgctgccaatctcgccaaggaaaagcagagagcattcatgccgtctatcctccagaacgagacatatggggcgctcctgtcggggtctcctccccctgcccagcctgctgcgcccagcaccacatccgcgcccccgctccctcctaggaatgtcgggaaggtgcagaccgcttccagtgccaacactctatggaaaactaacagcgtttccgtcgatggcggatcaagacagaggtcctcaagtgaccctcccgccgtccaccccccacttccaccacttcgagttactagcacgaaccctttaacccccaccccccctcctcctgtggccaagacccctagcgtcatggaggcactgtctcagccctccaagcctgcgccacctggcatttctcaaatacgtccaccacccttaccaccgcagccaccatcaagactgccgcaaaaaaagccagccccaggggctgacaagagcactccactcaccaacaaaggccagcccaggggcccggtggacctctccgcaacagaggccctgggccccctcagcaacgctatggtgctgcaacctccagccccaatgcctaggaaaagccaggcaaccaagctgaagccaaaaagagtgaaagctttgtataactgtgtagcggataaccccgacgagttaacattttccgagggagacgtgattattgttgacggggaggaggaccaggaatggtggatcgggcacatagatggagatcctggtcggaagggagcctttcctgtgtctttcgtacactttattgcagactag

SEQ ID NO: 141748 - DNA, 5712 bp, Artificial Sequence
  derived and/or modified sequence
cgcccctctccgcgggaggcgtcggggcccgcggctgggtggcgggtagttcccgccggctgtgcgcgcccgcctcggggctcgctctgagaggacgcggcggcagcggactcggagccctcggcgcgcaggcgggcggaccggccgagctgcgcggggctgcgcgccgcccctgctccgccgccaggccccgcgcggctcccgcgcccggcgctcccctttgtccgcgggccggagcggcggcggcagcggcggtgtccgagcggcggtcggagcctgctgcggcagttgaggcggcggcgcccctgcggctgtgcgccagcgccctcgcgccgaggcgatgccggaccagatctccgtgtcggaattcgtggccgagacccatgaggactacaaggcgcccacggcctccagcttcaccacccgcacggcgcagtgccggaacactgtggcggccatcgaggaggctttggacgtggaccggatggttctttacaaaatgaagaaatccgtgaaagcaatcaacagctctgggctggctcacgtggaaaatgaagagcagtacacccaggctctggagaagtttggcggcaactgtgtatgcagagatgacccagatttaggaagtgcgttcctgaagttctcagtgtttacaaaggagttgacagcacttttcaaaaacctgattcagaatatgaacaacataatctccttccctttggacagtttgctgaagggggacctgaaaggagtgaaaggggatctgaaaaagccttttgataaagcttggaaggactatgaaacaaaaataaccaagatagaaaaggagaaaaaggaacacgccaagctccatgggatgattcggactgaaataagcggagcggaaattgccgaagagatggaaaaggagaggcgcttcttccagctacagatgtgcgagtatctgctgaaggtcaacgaaatcaagattaaaaagggagtagatttacttcagaatctgatcaaatactttcatgcccaatgcaatttttttcaggatggactcaaagccgtggaaagcctcaaaccttccattgaaacgctgtctacggatcttcacacgatcaaacaggcccaggatgaagaaagaaggcagttgatacagcttcgagatattttgaaatccgcattgcaggttgaacagaaagaggactcccaaattcgtcagagcacagcttatagcttacatcagcctcagggaaacaaggaacatgggaccgagcggaacggcagcctctacaagaagagtgacgggatccgaaaagtgtggcagaaaaggaaatgttcagttaaaaatggttttctgaccatatcccatggtaccgctaaccggcctcctgcaaagctcaacctgctaacctgccaggtgaagaccaaccctgaggagaagaagtgctttgacctcatttcacatgacagaacttaccactttcaagctgaagatgaacaggaatgtcaaatatggatgtctgtgctgcaaaatagcaaagaagaagctttaaacaatgcatttaagggggatgacaatactggagaaaataacatcgtccaagaactgacaaaggagatcatctcagaagtgcagaggatgacgggcaatgacgtctgctgtgactgtggggcgccagatcctacatggctttccaccaacctgggcatcctgacctgcatcgagtgttccggaatccaccgagagctgggggttcattattccaggatgcagtccctgaccttagatgtactgggaacatctgagctgctgctcgccaagaatattgggaatgcaggctttaatgagatcatggaatgttgcctaccagctgaggactcagtcaaacccaacccaggcagcgacatgaatgcaagaaaggactacatcacagccaagtacatcgagaggagatacgcaaggaagaagcacgcggataacgcggcgaagcttcacagtctttgcgaggccgtcaaaacgagagatatttttggattgctccaagcttatgctgatggtgtggatcttacggaaaaaatcccactggccaacggacatgagccggatgaaacggccctccaccttgcagtcagatccgtggatcgaacctctcttcacattgtagactttttagttcagaacagtgggaacctggataaacagacagggaaaggcagcacagccctgcactactgctgcctgaccgacaatgccgagtgcctcaagttgctcctgcgggggaaggcctccatcgagatagcaaacgagtcaggagagactccgctggacattgccaagcgcctcaagcacgagcactgtgaggagctgctgacccaagccttatctggaagatttaattctcacgttcacgttgaatatgaatggcgactactccacgaagacctggatgaaagtgatgacgacatggatgagaaattgcagcccagtcccaaccggcgggaagaccggcccatcagcttctaccagctgggctccaaccagcttcagtctaacgctgtatctttggccagagatgctgcaaaccttgccaaggagaagcagagggctttcatgcccagcatcttgcagaatgagacttacggagccctcctgagtggcagcccacctcccgcccagcctgcagcccccagcaccaccagcgcccccccgcttcctccacggaatgttggcaaagttcagacagcctcctctgctaacaccctgtggaagacaaactctgtaagtgtggacggtggaagccggcagcgatcttcgtcagatccgccagctgtccatccaccgctgccccctcttcgcgtgacatctaccaatcccctgacccccacgccgcccccacccgttgccaagacgcccagcgtaatggaagccttgagccagccgagcaagcctgccccgcctgggatctcacagatcaggcccccacctctgcccccacagccgcccagccgcctcccgcagaagaagcctgcgccgggggctgacaagtccaccccactgaccaacaaaggccaaccgagaggacctgtggatctctctgcaacggaagctctgggtcctctgtccaatgctatggtcctgcagccccctgcacccatgcctaggaagtcgcaggcaaccaagttgaagcctaagcgggtgaaagcgctctataactgtgtggctgacaaccccgatgagctcaccttctccgagggggatgtgatcatcgtggacggggaggaggaccaggagtggtggattggccacattgatggagatcctggtcgcaaaggcgcattcccggtgtcatttgtgcactttatcgctgactgaattgctactgaacaaaagcattaacagttatgttcctgtttcgttattggtaccaaaactcttgccagataaccagtttcatgaactgtttgtatggcagcccatgttctctaatgccactgctctgttttaaaaactcagaggcaatttttacatatcagtaattgtttttataatttgtggttttcatgaaacattgctatgcatttattaggaaaaactgaatttcccaacaggtgaactgaaaagttattttaactattatacataatcaagatcctgcctctacggaattagctaaacctaaaaatgtttgcattaatgaataaattcttcctgcattccttggcccagttctggagttggtgacctttatcacaattattattttaggcggccagtgaactgctgcttcagaagtccatagcccagctctgaactttctcgataaaatgccatcagttcacctttaaagacacacattcctttgaaatccacccagtgtttaaaaagcaacttggaaatttacacattagcattgtactttctagccctaatttgtgaggttgcagctatcattatattctgcatgtatgtataacctgttgtgaacaatcatacttaacaaaactactgatggtttatgacaacgtagggtaactacagttcattctgttccaggttatataaaactgcatttcctgaatttggttaaaaactaaggatgatggattgcaaaacagttcttttaaattagtttatatgctttaggtgttttggaatttgccttcttgaacttcctgagtcacacagaaagcaactgtacacagtagaattctgtggcgcagaccatgctgtattaacacatcacttgctgtttcctactgagtgtaccactgccttcccttctagcccaggagaatgtttactcagtttagtgtcttgtatttctataatactccaacaggaatggtagtcacactgtcttgaaattgaatctgtccatctgtttataatcaagaacatatcagaaatatataggtcccaggtaatactcccaaacatcccactttttactgtttcaggccatcatatcattcttaagctacttggggtggtagtagaggattaggttgtctattataaaaccaaaactcattcgtttaatgaacttgactgtcatacctctatttagtaattgcgagggtaagattcatagtaggaatattggaaattttggcactctgagaataaataggcatatgatacccacttggacttttaacaaaagtaaaggaataaatttgcatataggcttggaaagtgaggcagcaatgctgttaactgcatttgttgtgatggtgcatttgattgaagcagcttgtctttattatgcaagactgtgtagagttttttttttttttggcattgtactttttgtttttgttataaaggaagacagaacaaactggaatgttttatgatgttgtatagcaatcgctttttacctttcaaagttccgggtaaaaatgtgttatatctgtagttttttgtttttgtttttttttaaagcactacatctgttttcactaattgttaatttctgtttgaacccttcatttaattttctcatagatttaagtaaacagatgtattttgcacagtgcacttatgtctattttaacaatcctcctgcatctgtattttatagtcagccttttgaccacctggtgccagctatataaggaataaagttgattcatatcaacattagaactccagtcccaaactaatctgtcaggttcactggtacataaatacctaggaaatatttttccagtctacaatttggtgctattgtgcagtaactaatagtactcttaccagaggagaaattatattaacgaccctgctaatatcctttcttagttatttgctccttgcaaattaaaaaagcaactaagagaaagaaaaacattgtagatatctatttatatttaaagtttatgtttcatgaactgcagctgcaggattctggcattttgcatgccattctccatcagatctgggatgatggctcagaacatgtacacagactaagagtaactgtgtgatctgttaaggggtggataacataatatgcagcttaggatgctattttgagatgtatgatattcagttcattcacctgattactttggttgcagcacaactgtatatattgtataaccgaaattgattattttcattgtccttaatgcagtgatttataattagagcatgtttaataagtttactcttcttgttaactagtcatttgactggaaaaaaataaaatacttttaaatgga

SEQ ID NO: 141749 - DNA, 3021 bp, Artificial Sequence
  derived and/or modified sequence
atgcctgaccagatctccgtctcagagttcgtggccgaaacccatgaggattacaaggcaccgactgcttctagcttcacaacaagaacagcccagtgtaggaatacggtcgccgctattgaggaggccctggacgtcgaccggatggtactgtacaaaatgaaaaagtccgttaaagcaattaactcttccgggcttgctcatgttgagaatgaagaacaatacacccaggcacttgagaagttcggcggtaattgcgtctgtcgagacgacccagatctcggctccgcctttctgaagttttctgtgttcactaaagagttaactgccttatttaagaatctgatacaaaatatgaacaacatcatttccttccccctggatagcctgctgaaaggcgatctgaagggtgtcaaaggcgatctcaagaaaccctttgacaaagcctggaaagactatgaaacaaagattacgaagatcgaaaaagagaagaaggaacacgccaaactgcatggaatgattagaaccgagatctccggcgcagagatcgccgaagagatggagaaggaacgtaggttctttcaattacagatgtgtgaatacctgctcaaagtgaatgaaattaagatcaagaaaggcgtcgatctgcttcagaatcttatcaagtacttccacgcacaatgtaacttcttccaggatggactgaaagcggtggagagccttaagccgagcattgaaacactgagtacagacctccataccataaagcaagcccaggacgaggagcgacgccagctgatccaactgagggatatcttgaagagtgcactccaggtggaacagaaggaggattctcagattaggcagtccacggcgtacagtctgcaccagcctcaaggaaacaaggagcatggtactgaaaggaacggcagcctttacaaaaagtccgatggcatcaggaaggtgtggcagaagcgaaagtgctctgtaaagaatggattcctgacaataagtcacggcaccgccaacaggcccccagctaagctgaacctcctcacttgtcaggtgaagaccaacccagaggagaaaaagtgtttcgacttgattagccacgatcggacgtaccatttccaagctgaggatgaacaggagtgtcagatttggatgagtgtgctgcaaaatagcaaggaggaagcattaaacaatgctttcaagggggacgataacacgggggagaacaacattgtacaggagttgaccaaggagataatctccgaggtgcaacggatgactggcaacgacgtctgctgtgattgcggcgcaccagatcccacctggttatccacaaacttgggcattctaacttgtatcgaatgctctggcatccaccgcgagttgggcgtgcactatagtagaatgcagtccctgaccctggacgtgctgggaacctctgagctgctcctggcaaaaaacattggaaatgcgggattcaacgaaatcatggagtgctgtctgcctgccgaagactccgttaagccaaatccaggctccgatatgaacgcgaggaaggattacatcacagccaaatacatcgaaagaagatatgctcgcaagaaacacgcagacaatgccgcaaagctgcatagtctctgtgaggcggtgaagacacgggatatcttcggcctcctccaggcctacgcagacggcgtggaccttacggagaagatacccctggccaacggtcacgagcccgacgaaaccgctttgcacctcgccgtccgcagcgttgaccggacatcactccatattgtcgacttcctcgtccagaattcagggaatctggataagcaaacaggaaaaggcagcactgctctgcattattgttgtctgacagacaatgccgaatgtttgaaactactgctccggggtaaggctagcattgagattgccaacgagtctggggagacacccctcgatattgctaaacgacttaaacatgagcactgcgaagaactcctgacacaagccctgagtggaagattcaattcccatgtccatgtcgaatatgagtggcgcctgcttcatgaggacctcgatgagtctgacgatgacatggatgagaagcttcagccctcaccgaaccggagagaagatcgacccattagtttttatcagctgggctcaaatcaattacagagtaacgccgtgtctcttgcacgcgatgccgctaaccttgcaaaggaaaagcagagagcgtttatgccttccattctgcagaacgaaacatatggcgcactcctatccggaagccccccacccgctcaacctgccgcaccctcaacgacatctgcccctccacttccccctcggaacgtcggcaaggtccaaacagcaagttccgccaatactctgtggaagaccaactcggtcagcgttgatgggggatctagacagcgcagttccagcgacccccctgccgtccaccctcctttgccaccactgcgtgtgactagcacgaaccccctgactcccaccccccctcctcctgttgctaagactccttcagttatggaggccctctcccagccaagcaaacctgctcccccaggcatttctcagataagaccaccgccacttcccccacagccaccatcacgcctacctcagaaaaagccggcaccaggcgctgacaaatctactcctctgacgaataagggtcagcctcgtgggccagtggacttgtccgcgaccgaagccctcggaccactgagtaacgctatggtcctgcagccaccagcccctatgccaaggaaaagccaggccacaaagctgaagcccaagcgggtgaaagccctatataactgtgtcgccgataatccggatgaactgactttttctgagggcgatgttattatcgttgacggagaggaggaccaggaatggtggatcggccacatagatggagaccccggtcgcaagggggctttccccgtgtcatttgtccatttcatagccgactag

SEQ ID NO: 141750 - protein, 518 aa, Artificial Sequence
  derived and/or modified sequence
MTSSKIEMPGEVKADPAALMASLHLLPSPTPNLEIKYTKIFINNEWQNSESGRVFPVYNPATGEQVCEVQEADKADIDKAVQAARLAFSLGSVWRRMDASERGRLLDKLADLVERDRAVLATMESLNGGKPFLQAFYVDLQGVIKTFRYYAGWADKIHGMTIPVDGDYFTFTRHEPIGVCGQIIPWNFPLLMFAWKIAPALCCGNTVVIKPAEQTPLSALYMGALIKEAGFPPGVINILPGYGPTAGAAIASHIGIDKIAFTGSTEVGKLIQEAAGRSNLKRVTLELGGKSPNIIFADADLDYAVEQAHQGVFFNQGQCCTAGSRIFVEESIYEEFVRRSVERAKRRVVGSPFDPTTEQGPQIDKKQYNKILELIQSGVAEGAKLECGGKGLGRKGFFIEPTVFSNVTDDMRIAKEEIFGPVQEILRFKTMDEVIERANNSDFGLVAAVFTNDINKALTVSSAMQAGTVWINCYNALNAQSPFGGFKMSGNGREMGEFGLREYSEVKTVTVKIPQKNS

SEQ ID NO: 141751 - protein, 489 aa, Artificial Sequence
  derived and/or modified sequence
MKGKNCNDVKIFINNEWQNSESGRVFPVYNPATGEQVCEVQEADKADIDKAVQAARLAFSLGSVWRRMDASERGRLLDKLADLVERDRAVLATMESLNGGKPFLQAFYVDLQGVIKTFRYYAGWADKIHGMTIPVDGDYFTFTRHEPIGVCGQIIPWNFPLLMFAWKIAPALCCGNTVVIKPAEQTPLSALYMGALIKEAGFPPGVINILPGYGPTAGAAIASHIGIDKIAFTGSTEVGKLIQEAAGRSNLKRVTLELGGKSPNIIFADADLDYAVEQAHQGVFFNQGQCCTAGSRIFVEESIYEEFVRRSVERAKRRVVGSPFDPTTEQGPQIDKKQYNKILELIQSGVAEGAKLECGGKGLGRKGFFIEPTVFSNVTDDMRIAKEEIFGPVQEILRFKTMDEVIERANNSDFGLVAAVFTNDINKALTVSSAMQAGTVWINCYNALNAQSPFGGFKMSGNGREMGEFGLREYSEVKTVTVKIPQKNS

SEQ ID NO: 141752 - protein, 489 aa, Artificial Sequence
  derived and/or modified sequence
MKGRNWKTTKIFINNEWQNSESGRVFPVYNPATGEQVCEVQEADKADIDKAVQAARLAFSLGSVWRRMDASERGRLLDKLADLVERDRAVLATMESLNGGKPFLQAFYVDLQGVIKTFRYYAGWADKIHGMTIPVDGDYFTFTRHEPIGVCGQIIPWNFPLLMFAWKIAPALCCGNTVVIKPAEQTPLSALYMGALIKEAGFPPGVINILPGYGPTAGAAIASHIGIDKIAFTGSTEVGKLIQEAAGRSNLKRVTLELGGKSPNIIFADADLDYAVEQAHQGVFFNQGQCCTAGSRIFVEESIYEEFVRRSVERAKRRVVGSPFDPTTEQGPQIDKKQYNKILELIQSGVAEGAKLECGGKGLGRKGFFIEPTVFSNVTDDMRIAKEEIFGPVQEILRFKTMDEVIERANNSDFGLVAAVFTNDINKALTVSSAMQAGTVWINCYNALNAQSPFGGFKMSGNGREMGEFGLREYSEVKTVTVKIPQKNS

SEQ ID NO: 141753 - protein, 25 aa, Artificial Sequence
  derived and/or modified sequence
MDASERGRLLDKLADLVERDRAVLA

SEQ ID NO: 141754 - protein, 422 aa, Artificial Sequence
  derived and/or modified sequence
MDASERGRLLDKLADLVERDRAVLATMESLNGGKPFLQAFYVDLQGVIKTFRYYAGWADKIHGMTIPVDGDYFTFTRHEPIGVCGQIIPWNFPLLMFAWKIAPALCCGNTVVIKPAEQTPLSALYMGALIKEAGFPPGVINILPGYGPTAGAAIASHIGIDKIAFTGSTEVGKLIQEAAGRSNLKRVTLELGGKSPNIIFADADLDYAVEQAHQGVFFNQGQCCTAGSRIFVEESIYEEFVRRSVERAKRRVVGSPFDPTTEQGPQIDKKQYNKILELIQSGVAEGAKLECGGKGLGRKGFFIEPTVFSNVTDDMRIAKEEIFGPVQEILRFKTMDEVIERANNSDFGLVAAVFTNDINKALTVSSAMQAGTVWINCYNALNAQSPFGGFKMSGNGREMGEFGLREYSEVKTVTVKIPQKNS

SEQ ID NO: 141755 - DNA, 1557 bp, Artificial Sequence
  derived and/or modified sequence
atgaccagctcaaaaatcgagatgcctggagaggtcaaggctgaccctgcggccctaatggcaagcctacacctcctgccctctccaacacccaacctggaaatcaagtacacgaagatttttataaataatgaatggcaaaactctgagagcggtcgcgttttcccagtgtacaatcctgctaccggcgagcaagtttgtgaagttcaagaggccgacaaagctgacatcgacaaagctgttcaggccgccagattggccttttccctgggttccgtgtggaggcggatggacgcctcggaaaggggccgccttcttgataagctggctgatttagtggaaagggacagggctgtcctggcaaccatggagtctctcaatgggggaaagccttttctgcaagccttctacgtcgacctccagggcgtgatcaagacatttagatactacgctggctgggccgacaagattcatggcatgaccattcccgtggatggagactattttacctttacacgtcacgaaccaatcggggtttgtggtcagattatcccatggaacttccccctccttatgttcgcttggaaaatcgcccccgctttatgctgcggcaatacagtggtaattaaacccgctgagcaaacacccctttccgctctttatatgggggctttgatcaaagaggctggattcccaccgggagttatcaacatcctgcccgggtatggccccacagcaggagctgccatcgcatcccacattggaatcgataaaatagcttttacaggctcaactgaagtcggaaagctgatccaggaagcagctgggcgcagcaatttgaagagggtcaccctcgaactggggggtaagtcacccaacatcatatttgctgatgccgatcttgactacgctgtcgagcaagcccaccagggagtattttttaatcagggccaatgctgcactgccggcagccggatctttgtggaggagtccatttatgaagagttcgtgaggcggagcgtggagcgtgctaaaaggagagttgttggatcgcccttcgaccccaccaccgaacaagggcctcagatcgataagaaacaatataacaagattctggaactaatccagagcggcgtcgcggagggcgccaaattagagtgtgggggcaaggggctcgggcggaaaggattctttatagaacccaccgtgttctctaacgtgacagacgacatgagaatcgcaaaggaagagatctttgggccagtacaggagatccttaggtttaaaactatggacgaagtcatagaacgggcaaataactcagatttcggcttggtggctgccgtgtttaccaacgacatcaacaaagcattgaccgtgtcttcggctatgcaggctgggaccgtttggataaattgttacaacgctttgaatgctcagtcccccttcggaggattcaaaatgtccggcaatggccgcgaaatgggagaatttgggttgcgcgagtacagcgaggttaaaactgtgaccgtgaagatcccgcaaaagaactcttag

SEQ ID NO: 141756 - DNA, 1470 bp, Artificial Sequence
  derived and/or modified sequence
atgaagggcaagaattgcaatgatgtaaagatattcatcaataatgagtggcaaaattccgagagcgggagggtatttcccgtttataatccagcgaccggtgagcaggtatgcgaggtgcaggaagcagacaaggcggacatagacaaagccgttcaggcagccaggctggcgtttagcctcggctctgtatggagacggatggatgcatctgaaaggggaaggcttttggataagcttgctgacctggtcgaaagggatagggctgtgctggccaccatggaaagtcttaacggcggtaaaccttttctgcaagccttttatgtcgatctacagggtgtaataaaaacttttcgctactacgccggatgggcagacaaaatccacgggatgactatcccagtggatggcgattacttcacatttacaagacacgagcccattggagtctgtgggcagatcatcccatggaacttcccactgctcatgttcgcatggaaaattgcgcccgcgctgtgttgcggcaacaccgtggtgatcaagccagccgaacaaacacccctgagtgcgttgtacatgggagcccttattaaggaagccgggttcccccctggtgttatcaacattctaccaggatatggccccacagcaggggctgcaatcgccagccacattggtattgataagattgcatttacaggtagcacagaagtgggaaaactaatccaggaggcagcagggcgctcaaacctgaagcgggttacattagaactgggcggaaagagcccaaacatcattttcgctgacgcagatcttgactacgccgtagaacaggcgcatcagggagttttcttcaaccagggccagtgctgtactgccgggagcaggatttttgtcgaagaaagtatctatgaggagtttgtgagacgcagcgtggaaagagctaagcggagggttgttgggagtccctttgacccgaccacagaacagggccctcaaatagataagaagcagtacaataagatactggagctaattcagtctggagttgctgagggtgctaagctggaatgcggagggaagggccttgggagaaaaggtttctttatcgaacctaccgtgttctctaatgttactgatgacatgagaatcgccaaggaagaaatctttggtcctgtgcaggaaatcctccgctttaagaccatggacgaagtcatcgagcgggctaataacagtgacttcgggcttgtggctgctgtctttactaatgacattaacaaggccctgacggttagttcagccatgcaggccggtactgtgtggattaattgttacaacgccctcaacgcccagtcgccattcggcggattcaaaatgtccggcaacggaagagaaatgggcgaattcggcctgcgcgaatacagcgaggttaaaaccgtgactgtcaagatacctcagaaaaatagctag

SEQ ID NO: 141757 - DNA, 1470 bp, Artificial Sequence
  derived and/or modified sequence
atgaagggcaggaattggaaaactacaaagattttcattaacaatgaatggcagaattccgagtcagggcgcgtgtttcccgtgtacaatccagccacaggggagcaggtctgcgaggtgcaggaggcagacaaggccgacatcgataaggctgtacaggctgccaggctcgcctttagcctgggcagcgtgtggcggcggatggatgccagtgagcgaggtcgactgttggataagttggcagatcttgtcgagcgagaccgcgcagtacttgccactatggaaagcctcaacggggggaagccattcctccaggctttttacgtggatctgcagggcgtaataaagactttccgctactacgccggctgggcggacaagatacacggaatgaccatccctgtagacggcgattattttacgtttacacggcacgagcctatcggcgtgtgcggacagataattccttggaatttccccttactgatgttcgcctggaagatcgcacctgccctgtgttgcggcaacacggtggtaatcaaacctgctgagcaaacccccctgtcagcgctgtatatgggcgccctgatcaaagaagctgggttccccccaggggtgatcaacatactgcctggatacggtccaactgcaggagccgctattgcatcccatattggcattgacaagattgctttcaccgggagtaccgaggtagggaagctcattcaggaagctgctggccggagcaatctgaagagggtgacacttgaactggggggaaagtcccccaatataatttttgcagatgcggacctagattatgcagtggaacaggcccaccagggagtgttttttaaccagggccaatgttgtactgctggttctaggatctttgtcgaagagagcatctacgaggaatttgtgcgaagatcagtcgaacgcgctaagagaagagtggtaggaagcccattcgaccccactacagagcagggaccccagatcgacaaaaaacagtacaacaagattcttgaactaatccaaagtggagttgctgagggcgcaaagctggagtgcgggggcaaaggtctgggccgcaagggattctttattgagccaaccgtattctcaaacgttacggatgatatgagaatcgcgaaagaggaaatatttggccccgtgcaagagatcctgcgcttcaagaccatggatgaagtcattgaacgtgccaataattcagactttggactcgttgcagctgtgttcaccaatgacattaataaggctctgactgtaagtagtgcgatgcaggcaggcaccgtctggatcaattgttataatgccctaaacgcacaaagcccctttggcgggttcaaaatgtctgggaacgggcgagagatgggggagtttgggctgagagagtatagtgaggtgaaaacggtaacagtcaagatcccccagaagaattcgtag

SEQ ID NO: 141758 - DNA, 78 bp, Artificial Sequence
  derived and/or modified sequence
atggacgcctctgagaggggccgtttgctggataagctcgccgaccttgtagagagggatagagctgtcctcgcctag

SEQ ID NO: 141759 - DNA, 1557 bp, Artificial Sequence
  derived and/or modified sequence
atgaccagcagcaagattgagatgcctggagaggtgaaggctgaccctgctgccctgatggccagcctgcacctgctgcccagccccacccccaacctggagatcaagtacaccaagatcttcatcaacaatgagtggcagaacagcgagagcggccgggtcttccctgtgtacaacccagccaccggggagcaggtgtgtgaggtgcaggaggccgacaaggctgacatcgacaaggctgtgcaggccgcccggctggccttcagcctgggctctgtgtggaggaggatggatgccagcgagcggggccgcctgctggacaagctggccgacctggtggagcgggacagagctgtgctggccaccatggagagcctgaatggaggcaagcccttcctgcaggccttctacgtggacctgcagggcgtcatcaagaccttccgctactatgccggctgggccgacaagatccacggcatgaccatccctgtggatggagactacttcaccttcaccaggcatgagcccatcggcgtgtgtggccagatcatcccctggaacttccccctgctgatgtttgcctggaagatcgccccagccctgtgctgcggcaacacagtggtgatcaagccagctgagcagacccccctgagcgccctgtacatgggcgccctgatcaaggaggccggcttccccccaggagtcatcaacatcctgcccggctacggccccacagctggggccgccatcgccagccacatcggcatcgacaagatcgccttcaccggcagcacagaggtgggcaagctgatccaggaggccgccggccgcagcaacctgaagagggtgaccctggagctgggcggcaagagccccaacatcatctttgctgatgctgacctggactatgctgtggagcaggcccaccagggcgtcttcttcaaccagggccagtgctgcacagctggcagccgcatctttgtggaggagagcatctatgaggagtttgtgcggcgctctgtggagcgggccaagagaagagtggtgggcagcccctttgaccccaccacagagcagggcccccagattgacaagaagcagtacaacaagatcctggagctgatccagagcggcgtggccgagggcgccaagctggagtgtggcggcaagggcctgggcaggaagggcttcttcatcgagcccaccgtcttcagcaatgtgacagatgacatgagaattgccaaggaggagatctttggacctgtgcaggagatcctgcgcttcaagaccatggatgaggtgattgagcgggccaacaacagcgactttggcctggtggccgctgtgttcaccaatgacatcaacaaggccctgactgtgagcagcgccatgcaggccggcaccgtgtggatcaactgctacaatgccctgaatgcccagagcccctttggaggcttcaagatgtctggaaatggccgggagatgggagaatttggcctgcgggagtacagcgaggtgaagacagtgacagtgaagatcccccagaagaacagctag

SEQ ID NO: 141760 - DNA, 1470 bp, Artificial Sequence
  derived and/or modified sequence
atgaagggcaagaactgcaatgatgtgaagatcttcatcaacaatgagtggcagaacagcgagagcggccgggtcttccctgtgtacaacccagccactggagagcaggtgtgtgaggtgcaggaggccgacaaggctgacatcgacaaggctgtgcaggccgcccggctggccttcagcctgggctctgtgtggaggaggatggatgccagcgagcggggccgcctgctggacaagctggccgacctggtggagcgggacagagctgtgctggccaccatggagagcctgaatggaggcaagcccttcctgcaggccttctacgtggacctgcagggcgtcatcaagaccttccgctactatgccggctgggccgacaagatccacggcatgaccatccctgtggatggagactacttcaccttcaccaggcatgagcccatcggcgtgtgtggccagatcatcccctggaacttccccctgctgatgtttgcctggaagatcgccccagccctgtgctgcggcaacacagtggtgatcaagccagctgagcagacccccctgagcgccctgtacatgggcgccctgatcaaggaggccggcttccccccaggagtcatcaacatcctgcccggctacggccccacagctggagctgccatcgccagccacatcggcatcgacaagatcgccttcaccggcagcacagaggtgggcaagctgatccaggaggccgccggccgcagcaacctgaagagggtgaccctggagctgggcggcaagagccccaacatcatctttgctgatgctgacctggactatgctgtggagcaggcccaccagggcgtcttcttcaaccagggccagtgctgcacagctggcagccgcatctttgtggaggagagcatctatgaggagtttgtgagaagatctgtggagcgggccaagagaagagtggtgggcagcccctttgaccccaccacagagcagggcccccagattgacaagaagcagtacaacaagatcctggagctgatccagagcggcgtggccgagggcgccaagctggagtgtggcggcaagggcctgggcaggaagggcttcttcatcgagcccaccgtcttcagcaatgtgacagatgacatgagaattgccaaggaggagatcttcggccctgtgcaggagatcctgcgcttcaagaccatggatgaagtcatcgagcgggccaacaacagcgactttggcctggtggccgctgtgttcaccaatgacatcaacaaggccctgactgtgtcctctgccatgcaggccggcaccgtgtggatcaactgctacaatgccctgaatgcccagagcccctttggaggcttcaagatgtctggaaatggccgggagatgggagaatttggcctgcgggagtacagcgaggtgaagacagtgacagtgaagatcccccagaagaacagctag

SEQ ID NO: 141761 - DNA, 1470 bp, Artificial Sequence
  derived and/or modified sequence
atgaagggcaggaactggaagaccaccaagatcttcatcaacaatgagtggcagaacagcgagagcggccgggtcttccctgtgtacaacccagccactggagagcaggtgtgtgaggtgcaggaggccgacaaggctgacatcgacaaggctgtgcaggccgcccggctggccttcagcctgggctctgtgtggaggaggatggatgccagcgagcggggccgcctgctggacaagctggccgacctggtggagcgggacagagctgtgctggccaccatggagagcctgaatggaggcaagcccttcctgcaggccttctacgtggacctgcagggcgtcatcaagaccttccgctactatgccggctgggccgacaagatccacggcatgaccatccctgtggatggagactacttcaccttcaccaggcatgagcccatcggcgtgtgtggccagatcatcccctggaacttccccctgctgatgtttgcctggaagatcgccccagccctgtgctgcggcaacacagtggtgatcaagccagctgagcagacccccctgagcgccctgtacatgggcgccctgatcaaggaggccggcttccccccaggagtcatcaacatcctgcccggctacggccccacagctggagctgccatcgccagccacatcggcatcgacaagatcgccttcaccggcagcacagaggtgggcaagctgatccaggaggccgccggccgcagcaacctgaagagggtgaccctggagctgggcggcaagagccccaacatcatctttgctgatgctgacctggactatgctgtggagcaggcccaccagggcgtcttcttcaaccagggccagtgctgcacagctggcagccgcatctttgtggaggagagcatctatgaggagtttgtgagaagatctgtggagcgggccaagagaagagtggtgggcagcccctttgaccccaccacagagcagggcccccagattgacaagaagcagtacaacaagatcctggagctgatccagagcggcgtggccgagggcgccaagctggagtgtggcggcaagggcctgggcaggaagggcttcttcatcgagcccaccgtcttcagcaatgtgacagatgacatgagaattgccaaggaggagatcttcggccctgtgcaggagatcctgcgcttcaagaccatggatgaagtcatcgagcgggccaacaacagcgactttggcctggtggccgctgtgttcaccaatgacatcaacaaggccctgactgtgtcctctgccatgcaggccggcaccgtgtggatcaactgctacaatgccctgaatgcccagagcccctttggaggcttcaagatgtctggaaatggccgggagatgggagaatttggcctgcgggagtacagcgaggtgaagacagtgacagtgaagatcccccagaagaacagctag

SEQ ID NO: 141762 - DNA, 78 bp, Artificial Sequence
  derived and/or modified sequence
atggatgccagcgagcggggccgcctgctggacaagctggccgacctggtggagcgggacagagctgtgctggcctag

SEQ ID NO: 141763 - DNA, 4098 bp, Artificial Sequence
  derived and/or modified sequence
attctgagcccgaggcgagggggactcgcacccactgccacctctccctgaccctctggccaccatgcacctcggcccggctgaggggagtcggggggtcgggggagagggcgtagctgccgagagcctggcgcccctgcccggaggaggagaacggaggacgccctcccgggtctccggaaaggaagggggacggggttcggtgggtcctgggacggggatgggagggaacgtgggcgagctgggagccgccctccgcagcctggactttcctggcctttctctactccgaagcagcaccgggccgctccggtccccgccagcccctgccagctccgcttccgggggccacgaccctcgctcgacttcggccgctgtgcgcctcccgccgactctgacccagggacccggagaccaagtccggctggccgaggcccgcgggccgcggcgcaagttccgctcccaccgtcgaggactgtggaggcggcgtgggctggtctccgcggccggggggcgggagcgccgggcggacttgaccgtgggcgccaagcgtcccggccgcgcggcgcgggctttatgtaaatggaggctgcgccgggcgtcctaggtaggatggaccagccccccgcgcctcggccctcacgtccaataagaagagccccagcttgacacctgcctatatacaggcgagcgcgcccccgggccgcggaccgcgcgcacagcccgcactgccccacgccgcgggctagggacacccggcccgccaccatgacttccagcaagatagagatgcccggcgaggtgaaggccgaccccgccgccctcatggcgtcgctgcacctcctgccgtcgcccacgcccaatctcgaaattaagtacaccaagatctttataaacaacgagtggcagaactcagagagtgggagagtgttccctgtctataatccagccacaggagaacaggtgtgtgaagttcaagaagcagacaaggcagatatagacaaagcagtgcaggcagcccgcctggctttctctcttggttcagtgtggagaaggatggatgcttcagaaaggggacgtctgttggataagcttgcagacttggtggaacgggacagggcagttcttgcaaccatggaatccctaaatggtggcaaaccattcctgcaagctttttatgtggatttgcagggcgtcatcaaaacctttcgatattacgcaggctgggctgataaaattcatgggatgaccattcctgtagatggagactattttacctttacaagacatgaacccattggagtgtgtggacagatcatcccatggaacttccccctgctgatgtttgcctggaaaatagctccagctttgtgctgtggcaatacagtagttattaagccagcagagcaaacaccactcagtgcactctacatgggagccctcatcaaggaggctggctttcctcccggggtcatcaatattttgccaggatatgggccaacggctggggcagcaatagcttctcacattggcatagacaagattgcattcacagggtctactgaggttggaaagcttatccaagaagcagctggaagaagtaatttgaagagagtaactctggaacttggaggcaaaagtcctaatattatttttgctgatgctgacttggactatgctgtggagcaggcccaccagggtgtgttcttcaatcaaggtcagtgctgcactgcaggctctcgcatcttcgtggaggagtccatctatgaggagtttgtgagaagaagcgtggagcgggccaagaggcgcgtagtggggagtccctttgaccccaccactgagcagggtccccagattgataagaaacagtacaacaagatcttggaactcatccagagtggtgtggctgagggcgccaagctggaatgtggaggcaaaggactgggccgaaaggggtttttcattgagcccacagtgttttccaacgtcactgatgatatgcggattgccaaggaggagatctttggccctgttcaggaaattttgagatttaagacgatggatgaagttatcgaaagagccaataactcagactttggactcgtagcagctgtctttactaatgacatcaacaaggccctcacagtgtcttctgcaatgcaagctgggactgtttggatcaattgttacaatgccttaaatgcccagagcccctttgggggattcaagatgtctggaaatgggagagaaatgggagaatttggcttgcgggagtactcagaagttaagacggtgacagtaaagatcccccagaagaactcctaagaaggccaagaaggaggatgaagcccagcctgcacgtctgtccctctctgctttctctgtagggcccagctctcaggaatacaaagttgagccacggtccttacttaaagattgaaaagataacatgtaggccaggcaggtcactgcacaactaaagcaaaccagctgggtacagtttcttggcactctgtaaggggccaccttaatcataccaaatattggggaaagtgggataaagggaggaggaggagctagcagacacatccagtatctccttctggagcacaggatgaaataagggagctgtattatttcatgtctttgtcacaaagaactttcctctcaaggaaaggtgacctttctcctgtcttcattttcctccttccaggccctcctcgctcacccacccctccctctcttccaaggagatgtcagctgagctcattctggggcagatgtttgggccgggaacaatttttcaaggttgtaaagccaaattatcatttcatgttatccatttcttcaaagcaaaacatgaaatggttttagctagagtcagaccagaatgaaaatgccaggagctggtacactacagatgtagtaagaacctgggatattcctgacccaatctggttttcttttacccataaataacatgaatgaaaaaagattgggacaatagagactggaagtcatcatgtgcagttcaccgcttctgagcttgctgcagttttggggtgtgtgtgtattagattccttctcagttattctggaataaggcaaggagtgggttgtttttcatagctagataagatcttttccaaagtttttcttagaaccaaccaaaaaacaatccgagtaggcccaagaatttgataatgctggatgccttgcagacatcattcagtttctaatattgggcaacaattattattaaatgaattatttctgtagttggaatctgtaccttctgaacctctacaccaataactgctgcaggtgtgattttggtctgtcacactgtacatctatcataatgtgccctgtatctattggcagtgaccttggaaaatctggccaagcctaggggtttccttttccatttgccaagttccattgtgccaggactgccgtgctccactgagctcctctgtcacaccccattcttgcccctcactgggcaggccatggcctacagcttgcagggagtaaagcaggcccgcctccctttcttcccatccacatactcctcttctgctttccagtgactccaccagtttgatgtgggaagtgttagcttcctttccttcttccatcccttcttccatctttccagctgtcaaatccaatccagtctctaacctaaatgcagatcatttatttaaaagtaccaaacataacccagagtatgtggaatatgggcaacatatatatagccttctgtatttaacgatcttctgcttcttaaccgtaccagttttctatttataactcttatctatccatgatgttttaaagtctccacttgctgttatttacaaacgacagtgcattcagcagcccagtgccgtgagccctgacagatgccgtatttctgagtgcttccatgtgaatgctgccctcctgtagcatgtgtccaagtggacatagccactaaccaactagttacctttggactgcaacaaaaaatgtgaaaatgaagatttatttcttttaatttacttaaaaagaaacctctgtgctagcaataaagcatttatattgtgtactcct

SEQ ID NO: 141764 - DNA, 3237 bp, Artificial Sequence
  derived and/or modified sequence
atgaaaggtaagaactgtaatgatgttaaaatctttataaacaacgagtggcagaactcagagagtgggagagtgttccctgtctataatccagccacaggagaacaggtgtgtgaagttcaagaagcagacaaggcagatatagacaaagcagtgcaggcagcccgcctggctttctctcttggttcagtgtggagaaggatggatgcttcagaaaggggacgtctgttggataagcttgcagacttggtggaacgggacagggcagttcttgcaaccatggaatccctaaatggtggcaaaccattcctgcaagctttttatgtggatttgcagggcgtcatcaaaacctttcgatattacgcaggctgggctgataaaattcatgggatgaccattcctgtagatggagactattttacctttacaagacatgaacccattggagtgtgtggacagatcatcccatggaacttccccctgctgatgtttgcctggaaaatagctccagctttgtgctgtggcaatacagtagttattaagccagcagagcaaacaccactcagtgcactctacatgggagccctcatcaaggaggctggctttcctcccggggtcatcaatattttgccaggatatgggccaacggctggggcagcaatagcttctcacattggcatagacaagattgcattcacagggtctactgaggttggaaagcttatccaagaagcagctggaagaagtaatttgaagagagtaactctggaacttggaggcaaaagtcctaatattatttttgctgatgctgacttggactatgctgtggagcaggcccaccagggtgtgttcttcaatcaaggtcagtgctgcactgcaggctctcgcatcttcgtggaggagtccatctatgaggagtttgtgagaagaagcgtggagcgggccaagaggcgcgtagtggggagtccctttgaccccaccactgagcagggtccccagattgataagaaacagtacaacaagatcttggaactcatccagagtggtgtggctgagggcgccaagctggaatgtggaggcaaaggactgggccgaaaggggtttttcattgagcccacagtgttttccaacgtcactgatgatatgcggattgccaaggaggagatctttggccctgttcaggaaattttgagatttaagacgatggatgaagttatcgaaagagccaataactcagactttggactcgtagcagctgtctttactaatgacatcaacaaggccctcacagtgtcttctgcaatgcaagctgggactgtttggatcaattgttacaatgccttaaatgcccagagcccctttgggggattcaagatgtctggaaatgggagagaaatgggagaatttggcttgcgggagtactcagaagttaagacggtgacagtaaagatcccccagaagaactcctaagaaggccaagaaggaggatgaagcccagcctgcacgtctgtccctctctgctttctctgtagggcccagctctcaggaatacaaagttgagccacggtccttacttaaagattgaaaagataacatgtaggccaggcaggtcactgcacaactaaagcaaaccagctgggtacagtttcttggcactctgtaaggggccaccttaatcataccaaatattggggaaagtgggataaagggaggaggaggagctagcagacacatccagtatctccttctggagcacaggatgaaataagggagctgtattatttcatgtctttgtcacaaagaactttcctctcaaggaaaggtgacctttctcctgtcttcattttcctccttccaggccctcctcgctcacccacccctccctctcttccaaggagatgtcagctgagctcattctggggcagatgtttgggccgggaacaatttttcaaggttgtaaagccaaattatcatttcatgttatccatttcttcaaagcaaaacatgaaatggttttagctagagtcagaccagaatgaaaatgccaggagctggtacactacagatgtagtaagaacctgggatattcctgacccaatctggttttcttttacccataaataacatgaatgaaaaaagattgggacaatagagactggaagtcatcatgtgcagttcaccgcttctgagcttgctgcagttttggggtgtgtgtgtattagattccttctcagttattctggaataaggcaaggagtgggttgtttttcatagctagataagatcttttccaaagtttttcttagaaccaaccaaaaaacaatccgagtaggcccaagaatttgataatgctggatgccttgcagacatcattcagtttctaatattgggcaacaattattattaaatgaattatttctgtagttggaatctgtaccttctgaacctctacaccaataactgctgcaggtgtgattttggtctgtcacactgtacatctatcataatgtgccctgtatctattggcagtgaccttggaaaatctggccaagcctaggggtttccttttccatttgccaagttccattgtgccaggactgccgtgctccactgagctcctctgtcacaccccattcttgcccctcactgggcaggccatggcctacagcttgcagggagtaaagcaggcccgcctccctttcttcccatccacatactcctcttctgctttccagtgactccaccagtttgatgtgggaagtgttagcttcctttccttcttccatcccttcttccatctttccagctgtcaaatccaatccagtctctaacctaaatgcagatcatttatttaaaagtaccaaacataacccagagtatgtggaatatgggcaacatatatatagccttctgtatttaacgatcttctgcttcttaaccgtaccagttttctatttataactcttatctatccatgatgttttaaagtctccacttgctgttatttacaaacgacagtgcattcagcagcccagtgccgtgagccctgacagatgccgtatttctgagtgcttccatgtgaatgctgccctcctgtagcatgtgtccaagtggacatagccactaaccaactagttacctttggactgcaacaaaaaatgtgaaaatgaagatttatttcttttaatttacttaaaaagaaacctctgtgctagcaataaagcatttatattgtgt

SEQ ID NO: 141765 - DNA, 1664 bp, Artificial Sequence
  derived and/or modified sequence
agagcagcaggatggcacttggtgtctggatgcctttggagttgcacatacagcttctttatgaaaggaagaaactggaagacaacaaagatctttataaacaacgagtggcagaactcagagagtgggagagtgttccctgtctataatccagccacaggagaacaggtgtgtgaagttcaagaagcagacaaggcagatatagacaaagcagtgcaggcagcccgcctggctttctctcttggttcagtgtggagaaggatggatgcttcagaaaggggacgtctgttggataagcttgcagacttggtggaacgggacagggcagttcttgcaaccatggaatccctaaatggtggcaaaccattcctgcaagctttttatgtggatttgcagggcgtcatcaaaacctttcgatattacgcaggctgggctgataaaattcatgggatgaccattcctgtagatggagactattttacctttacaagacatgaacccattggagtgtgtggacagatcatcccatggaacttccccctgctgatgtttgcctggaaaatagctccagctttgtgctgtggcaatacagtagttattaagccagcagagcaaacaccactcagtgcactctacatgggagccctcatcaaggaggctggctttcctcccggggtcatcaatattttgccaggatatgggccaacggctggggcagcaatagcttctcacattggcatagacaagattgcattcacagggtctactgaggttggaaagcttatccaagaagcagctggaagaagtaatttgaagagagtaactctggaacttggaggcaaaagtcctaatattatttttgctgatgctgacttggactatgctgtggagcaggcccaccagggtgtgttcttcaatcaaggtcagtgctgcactgcaggctctcgcatcttcgtggaggagtccatctatgaggagtttgtgagaagaagcgtggagcgggccaagaggcgcgtagtggggagtccctttgaccccaccactgagcagggtccccagattgataagaaacagtacaacaagatcttggaactcatccagagtggtgtggctgagggcgccaagctggaatgtggaggcaaaggactgggccgaaaggggtttttcattgagcccacagtgttttccaacgtcactgatgatatgcggattgccaaggaggagatctttggccctgttcaggaaattttgagatttaagacgatggatgaagttatcgaaagagccaataactcagactttggactcgtagcagctgtctttactaatgacatcaacaaggccctcacagtgtcttctgcaatgcaagctgggactgtttggatcaattgttacaatgccttaaatgcccagagcccctttgggggattcaagatgtctggaaatgggagagaaatgggagaatttggcttgcgggagtactcagaagttaagacggtgacagtaaagatcccccagaagaactcctaagaaggccaagaaggaggatgaagcccagcctgcacgtctgtccctctctgctttctctgtagggcccagctctcaggaatacaaagttgagccacggtccttacttaaagattgaaaagataacatgtaggcca

SEQ ID NO: 141766 - DNA, 1468 bp, Artificial Sequence
  derived and/or modified sequence
agtacaccactacatgctcatgcttcacttttttcatgacagtggatggttcttcctttatttggagtgtttttcttcagttgtgcctcttcctctctaacaggcagatatagacaaagcagtgcaggcagcccgcctggctttctctcttggttcagtgtggagaaggatggatgcttcagaaaggggacgtctgttggataagcttgcagacttggtggaacgggacagggcagttcttgcaaccatggaatccctaaatggtggcaaaccattcctgcaagctttttatgtggatttgcagggcgtcatcaaaacctttcgatattacgcaggctgggctgataaaattcatgggatgaccattcctgtagatggagactattttacctttacaagacatgaacccattggagtgtgtggacagatcatcccatggaacttccccctgctgatgtttgcctggaaaatagctccagctttgtgctgtggcaatacagtagttattaagccagcagagcaaacaccactcagtgcactctacatgggagccctcatcaaggaggctggctttcctcccggggtcatcaatattttgccaggatatgggccaacggctggggcagcaatagcttctcacattggcatagacaagattgcattcacagggtctactgaggttggaaagcttatccaagaagcagctggaagaagtaatttgaagagagtaactctggaacttggaggcaaaagtcctaatattatttttgctgatgctgacttggactatgctgtggagcaggcccaccagggtgtgttcttcaatcaaggtcagtgctgcactgcaggctctcgcatcttcgtggaggagtccatctatgaggagtttgtgagaagaagcgtggagcgggccaagaggcgcgtagtggggagtccctttgaccccaccactgagcagggtccccagattgataagaaacagtacaacaagatcttggaactcatccagagtggtgtggctgagggcgccaagctggaatgtggaggcaaaggactgggccgaaaggggtttttcattgagcccacagtgttttccaacgtcactgatgatatgcggattgccaaggaggagatctttggccctgttcaggaaattttgagatttaagacgatggatgaagttatcgaaagagccaataactcagactttggactcgtagcagctgtctttactaatgacatcaacaaggccctcacagtgtcttctgcaatgcaagctgggactgtttggatcaattgttacaatgccttaaatgcccagagcccctttgggggattcaagatgtctggaaatgggagagaaatgggagaatttggcttgcgggagtactcagaagttaagacggtgacagtaaagatcccccagaagaactcctaagaaggccaagaaggaggatgaagcccagcc

SEQ ID NO: 141767 - DNA, 1557 bp, Artificial Sequence
  derived and/or modified sequence
atgaccagcagcaagatcgagatgcccggcgaggtgaaggccgaccccgccgccctgatggcatcactgcatctgctgccttccccaacgcctaacttagaaatcaaatacacgaagatcttcattaacaatgagtggcaaaattccgagtctggccgtgtcttcccggtctacaatcctgccaccggggaacaggtttgtgaagtgcaggaggctgacaaggccgatatcgataaagctgtgcaggctgccagattggcgttttctctcggcagtgtgtggcgacgaatggacgccagcgaaaggggacgcttgcttgacaaactggccgacctcgtggagcgcgatcgggccgtattggccacgatggagtcgttaaatggcggtaaaccctttctgcaggccttctatgtagatttacagggagttattaaaacatttaggtactacgcaggttgggcagacaagatccatggaatgacaattcctgtagacggagactacttcacctttacaaggcacgaacccattggggtgtgtggacaaataatcccttggaattttcctctgctgatgttcgcctggaaaattgcccctgccttgtgttgcggcaatacagtggtcatcaaaccagccgaacagacccccctgtccgccttatatatgggagctctgatcaaagaagctggattcccccccggcgtgataaacatcctccctgggtacggacccaccgctggggcggctatcgcttcccatatcggcatcgataagattgcatttactggcagtaccgaggtcggcaagctgatccaggaggccgctgggcggtctaacctgaagcgggtgaccctggagctcggcgggaaatctccaaatattattttcgctgacgccgacctcgattatgcagtcgagcaggcccaccagggcgtcttctttaatcaagggcagtgctgtactgcaggttctcgaatcttcgtcgaagaatccatctacgaggaattcgtgaggcgcagcgtggagcgcgcaaagcgacgggtggttgggtctccatttgatcccaccaccgagcagggtcctcagatagataaaaaacagtacaacaagatcctcgaactaattcagagtggcgtggccgaaggagccaagctagagtgtggtgggaaaggcctgggcagaaaaggcttcttcatcgagcctactgtcttcagtaacgtgactgatgacatgcgaatcgccaaggaagaaatattcggaccggtgcaagaaatcctaagattcaaaactatggacgaagtgatcgaacgagccaataacagtgacttcggcctagtggccgctgtcttcacaaatgacattaacaaggcacttactgtgtcatcagcgatgcaggctggaactgtgtggattaattgctataatgcccttaacgcccaaagcccctttggaggattcaagatgtctggtaacggaagagagatgggagagtttggactaagggagtactcagaagtgaagactgtgacggtcaagattcctcagaaaaactcttag

SEQ ID NO: 141768 - DNA, 1470 bp, Artificial Sequence
  derived and/or modified sequence
atgaagggcaagaactgcaacgacgtgaagatcttcatcaacaacgagtggcaaaacagtgagtccggccgcgttttccccgtatataaccctgctactggagaacaggtttgtgaggttcaagaggcagacaaagccgatattgacaaagccgttcaggccgcccggctggcgttttcgctgggttcagtctggagacgcatggacgcttccgagcgcggcagactgctggataagttggcggacctagtggagagggatagagcggtgcttgccactatggaaagtctgaatggtggcaaaccgtttctgcaggcattctacgtagatctacaaggtgtcattaaaacattccggtattatgccggatgggccgacaagatccatgggatgacgatcccggtggatggagattacttcactttcactcgacacgaaccgataggtgtctgtggacaaatcatcccatggaattttcccctactcatgttcgcatggaaaatagcccccgctttatgctgcggaaatactgtggtaatcaagcccgccgaacagaccccattatccgcattgtatatgggcgcactgatcaaggaggcagggtttcctcccggcgtgatcaatattctccctgggtacgggcccacagcgggcgccgccatagcatcacacattgggatcgataagatcgcttttacaggctccacagaggtgggtaagctcatccaggaggccgccggcagatctaacctgaagcgtgtgaccctggagctaggcggtaaatccccaaacatcattttcgctgacgctgatctggattatgcagtggaacaggcgcaccagggggtgttcttcaaccagggacagtgttgcacagctggatctagaattttcgtggaagagtctatctatgaggaattcgtgcgacgtagcgttgaaagagccaagagacgagtggtgggatccccatttgatcctaccactgagcaaggccctcagatagataaaaagcagtacaataaaatcctggagcttatacagtcaggcgtggctgaaggcgccaagctcgaatgcggagggaaaggactgggcagaaagggctttttcatcgagcccacggtgttctcaaatgtgaccgacgatatgaggattgctaaagaggagatctttggcccagtgcaagagatccttcgctttaaaaccatggacgaggtgattgagcgcgctaataacagcgatttcgggctggtcgctgcggtgttcaccaatgacatcaacaaggctctgaccgtcagctcagccatgcaggccgggacggtttggataaactgttataacgcactgaacgcccagtctccatttggcgggttcaagatgagcgggaatggacgtgaaatgggggagtttgggctcagagaatactctgaggtgaagacggtaacggtgaaaattccacagaagaactcgtag

SEQ ID NO: 141769 - DNA, 1470 bp, Artificial Sequence
  derived and/or modified sequence
atgaagggccggaactggaagaccaccaagatcttcatcaacaacgaatggcagaactcagagtccggaagggtgttccccgtgtacaaccccgcgacaggcgaacaggtttgcgaagtacaggaagcagacaaggcagacatcgacaaggctgtccaagccgcaaggttggcgttttcgctggggtcagtttggcggcgcatggacgcttcagagcgcggtcgcctgctagataagttggccgatctagtcgaaagagaccgcgcagtgctcgccacgatggagtcactgaatggtgggaaaccttttcttcaggctttctacgtcgacttgcagggcgttattaaaacattcagatactacgccggctgggccgacaaaatccatggaatgactatacccgtggacggggactattttacttttacacgacatgaacccatcggagtttgcgggcaaatcataccgtggaattttcccctactgatgtttgcttggaaaatcgcccccgccctctgttgcggaaacaccgtggtgatcaagcctgccgagcagacccccctttccgctttgtacatgggtgctttaataaaagaagccggctttccacccggcgtgattaatatcctcccaggctatggccctactgcaggagccgccatcgcctcccatataggcattgataaaatcgccttcacaggtagcactgaggttggcaaactaatccaggaagctgcaggtagatcgaatctgaagagggtgacattagagctggggggaaaatcaccaaacataattttcgctgatgccgatctggactatgctgttgaacaagcccaccagggggttttcttcaaccagggccagtgttgtacagctgggagcaggatcttcgtagaagagtccatatacgaagaattcgtcagacgatccgtggaacgggcgaaaagacgagtagttggctctccattcgatcccacaacagaacaaggcccacagattgataagaaacagtacaacaaaatacttgagctgatccaaagtggggtcgcagagggagccaagttggagtgcggtggcaaaggcctgggaaggaagggcttttttatcgagccaacagtcttttccaatgtgaccgacgacatgaggatagcgaaagaagagatctttggtcccgtgcaggagattctgcggtttaagaccatggacgaggtgattgagagagcgaataatagtgacttcggcttagtcgctgcggtgtttaccaacgacattaacaaagcattgactgtcagcagcgccatgcaggcagggaccgtctggatcaactgctacaacgccctcaacgctcagtctccgttcggtggttttaaaatgagcggaaacgggcgcgaaatgggcgaattcggcctgcgcgagtattcagaggttaaaacagtgacagtaaaaatcccccagaaaaactcatag

SEQ ID NO: 141770 - DNA, 78 bp, Artificial Sequence
  derived and/or modified sequence
atggacgccagcgagcggggccggctgctggacaagctggccgacctggtcgagcgcgatagagccgttctcgcctag

SEQ ID NO: 141771 - DNA, 1557 bp, Artificial Sequence
  derived and/or modified sequence
atgacatccagtaagatcgaaatgcctggggaggttaaggcagatccggcagccctcatggcctcactgcacctgctgccgtcccccacccccaatctcgagattaagtataccaaaatctttatcaataatgagtggcagaattcagaatctgggcgtgtgttccctgtgtacaatcctgcgaccggggaacaggtatgtgaggtccaggaggctgataaggcagacattgacaaggctgtgcaagctgcgcgtctggctttctcgctcggttccgtgtggcgacggatggacgctagcgagcgcggaaggttgttggataaactggccgatctcgtggagcgggaccgcgctgtattagccactatggagtctttgaacgggggaaagcctttcctccaggccttttacgttgacctccaaggcgtgatcaaaaccttcagatattacgctggatgggccgataagattcacgggatgacaattcctgtcgacggcgactactttactttcactcgacacgagccaatcggcgtgtgcggccagattattccttggaactttccgttgctgatgtttgcctggaagatcgccccagctctctgctgtgggaacaccgtggtgatcaagcccgcagaacagacaccactctcagccttgtatatgggcgctctgattaaggaagctggattcccccctggagtgattaacattctacccggatacggtccgactgctggcgcagccatcgcctcccatatcggcatcgataaaattgcttttactggatcgactgaggtgggcaagctgatccaggaggccgcaggtagatctaacctgaagcgcgttactttggaactcggtgggaagtccccgaatattatttttgccgatgccgatcttgactacgctgttgagcaggcccaccagggagtcttcttcaaccagggccagtgttgtactgccggttcccgaatcttcgtcgaggaatccatttatgaggaatttgtacgtcggagtgtcgaacgagcgaagaggagggttgtagggagccctttcgatccgacaaccgagcagggtccacagatcgataaaaagcagtataataagattctagaactgatacagtctggcgttgccgaaggcgctaagcttgagtgcggcggtaagggcctggggaggaagggcttctttatcgagccaaccgtgttcagcaatgtgaccgatgatatgaggatcgctaaagaggaaatatttggcccagtccaggagattctgcggtttaagacaatggatgaggttattgagcgggcaaacaacagcgacttcggcctggtggcagcagtgtttaccaacgacattaacaaggccctgaccgtcagctcggctatgcaggccggaaccgtgtggatcaactgttacaatgcgctgaacgcgcagtcaccatttgggggattcaagatgtctggtaatggcagggagatgggtgagttcgggctgcgggaatatagtgaggtcaagacggtgaccgtgaagatccctcagaaaaatagttag

SEQ ID NO: 141772 - DNA, 1470 bp, Artificial Sequence
  derived and/or modified sequence
atgaaaggtaagaattgtaacgacgttaaaatcttcatcaacaacgaatggcagaactcagagtcagggcgagtattccccgtgtacaatccagccaccggagaacaggtgtgtgaagtgcaggaggctgataaggctgatatagacaaagccgtgcaggccgcaaggctcgccttctccctcggtagcgtgtggcgcagaatggatgcttctgaacgcggacgactactggacaaactggccgacttggtggagcgggacagagctgttctggccaccatggagtctttaaacggcggtaaaccttttctgcaggccttttacgtggatctgcagggcgtgattaagacattcaggtactatgccggatgggcagacaagattcacggtatgacgattccggtcgatggcgattatttcacatttaccaggcacgagcctataggtgtgtgtgggcagattattccatggaatttccccctcctgatgtttgcatggaagatcgccccagccttatgttgtggcaatactgtggtgatcaaacccgcagagcagacacccctgtccgcactgtatatgggagcgctcatcaaagaggcgggtttcccacccggtgtcattaatatcctgccaggatatggaccaaccgccggagcagccatcgctagccacattggtattgataagatagctttcacgggctccactgaggtaggcaagttaattcaggaagccgctggtcgttccaatctcaagcgagtgacattggagctgggtggcaaatcgccaaatatcatctttgcagacgctgatctggattatgcagtcgagcaggctcaccagggggtcttcttcaatcagggccagtgttgtacagctgggtctcggatcttcgtggaagagagcatctatgaggagttcgtgcgccgatccgtagaaagagcaaagcgacgtgtggtgggatctccattcgatcctacaaccgagcagggaccacagatcgacaaaaagcagtacaataaaattttggaactgattcagtccggtgttgccgagggagcaaagctggagtgtggcggtaagggcctgggacggaagggatttttcattgaacctacagtgttcagcaatgtaactgacgacatgcgcatcgcaaaggaggaaatcttcggaccagtccaggagatactgagatttaaaaccatggacgaagtgattgaacgcgctaacaactccgactttggtctggtcgccgcagtgtttaccaatgacattaacaaggctcttactgtgtcatccgcaatgcaggcgggtaccgtatggataaattgttataatgctctcaacgcgcaaagtccattcggtgggtttaagatgtctggaaacggcagagagatgggagaattcggcctgagagaatattcagaggtgaaaaccgtgactgtgaagatccctcaaaagaactcctag

SEQ ID NO: 141773 - DNA, 1470 bp, Artificial Sequence
  derived and/or modified sequence
atgaaaggtaggaattggaagaccaccaagatttttattaacaacgagtggcagaacagcgagtccgggcgtgtgtttcctgtgtacaatccagccaccggagagcaagtgtgtgaggtccaggaagctgacaaggcagatatcgacaaggccgttcaagcagctcgcctggctttctccctcggctcggtgtggaggaggatggatgcctctgaacgcggtagactgctcgacaagctagctgacctggtggagagagatcgggctgtgttggcaaccatggagagcctgaacggtgggaaacccttcttgcaggccttctacgtggatttgcaaggcgtgatcaaaacttttcggtattatgcaggatgggcagataaaatccacggcatgacaatccccgtcgatggagattattttactttcaccaggcacgagccaataggggtctgcgggcagatcatcccttggaacttccctttgttgatgttcgcttggaagattgccccagctctgtgttgtggcaataccgtggtcatcaagcccgcagagcagacacctctgtccgccctttacatgggtgccctaatcaaagaggctggcttcccccctggcgtgatcaatatactccccggatacggaccaactgccggagccgcaatcgcgagccatataggcatcgataagatcgcctttacgggttcgactgaagtgggcaaactgatccaggaggctgccggtcgcagcaatctgaagcgggttactctggagctggggggaaagagccccaacataatattcgctgatgctgatctcgactacgccgtcgagcaggcccatcaaggggtgttctttaaccaggggcagtgctgcacagccggaagccgtatcttcgtggaggaatcaatctatgaggaatttgttaggcgaagtgtagaaagggccaaacggcgtgtagtgggatccccgttcgacccgaccaccgaacagggccctcaaattgacaaaaagcagtacaataaaatccttgagctgatccagagcggggtcgctgagggtgccaagttggaatgtgggggaaagggcttgggcagaaaagggttcttcatcgagcctacagtgttttcaaacgtgaccgatgatatgaggatcgcaaaggaggaaattttcggcccagtgcaggagatcctgagatttaaaaccatggacgaggtgattgagagagctaacaacagcgactttgggctggttgctgccgtgttcacaaatgatattaataaggcgctgacggtgtcaagcgccatgcaagcagggacagtctggattaattgctataatgccctgaacgcccagagcccctttggcggtttcaaaatgagcggtaacggccgagagatgggagagtttggcctgcgggagtacagtgaagtgaagacagtgaccgtcaaaatacctcagaaaaacagctag

SEQ ID NO: 141774 - DNA, 78 bp, Artificial Sequence
  derived and/or modified sequence
atggacgcctctgagagaggacgtctcctggataaactggccgacctagtggagagggacagggcagttctggcatag

SEQ ID NO: 141775 - DNA, 1557 bp, Artificial Sequence
  derived and/or modified sequence
atgaccagcagcaagatcgagatgcccggcgaggtgaaggccgaccccgccgccctgatggccagcctgcacctgctgcccagccccacccccaacctggagatcaagtacaccaagatcttcatcaacaacgagtggcagaacagcgagagcggcagagtgttccccgtgtacaaccccgccaccggcgagcaggtgtgcgaggtgcaggaggccgacaaggccgacatcgacaaggccgtgcaggccgccagactggccttcagcctgggcagcgtgtggagaagaatggacgccagcgagagaggcagactgctggacaagctggccgacctggtggagagagacagagccgtgctggccaccatggagagcctgaacggcggcaagcccttcctgcaggccttctacgtggacctgcagggcgtgatcaagaccttcagatactacgccggctgggccgacaagatccacggcatgaccatccccgtggacggcgactacttcaccttcaccagacacgagcccatcggcgtgtgcggccagatcatcccctggaacttccccctgctgatgttcgcctggaagatcgcccccgccctgtgctgcggcaacaccgtggtgatcaagcccgccgagcagacccccctgagcgccctgtacatgggcgccctgatcaaggaggccggcttcccccccggcgtgatcaacatcctgcccggctacggccccaccgccggcgccgccatcgccagccacatcggcatcgacaagatcgccttcaccggcagcaccgaggtgggcaagctgatccaggaggccgccggcagaagcaacctgaagagagtgaccctggagctgggcggcaagagccccaacatcatcttcgccgacgccgacctggactacgccgtggagcaggcccaccagggcgtgttcttcaaccagggccagtgctgcaccgccggcagcagaatcttcgtggaggagagcatctacgaggagttcgtgagaagaagcgtggagagagccaagagaagagtggtgggcagccccttcgaccccaccaccgagcagggcccccagatcgacaagaagcagtacaacaagatcctggagctgatccagagcggcgtggccgagggcgccaagctggagtgcggcggcaagggcctgggcagaaagggcttcttcatcgagcccaccgtgttcagcaacgtgaccgacgacatgagaatcgccaaggaggagatcttcggccccgtgcaggagatcctgagattcaagaccatggacgaggtgatcgagagagccaacaacagcgacttcggcctggtggccgccgtgttcaccaacgacatcaacaaggccctgaccgtgagcagcgccatgcaggccggcaccgtgtggatcaactgctacaacgccctgaacgcccagagccccttcggcggcttcaagatgagcggcaacggcagagagatgggcgagttcggcctgagagagtacagcgaggtgaagaccgtgaccgtgaagatcccccagaagaacagctag

SEQ ID NO: 141776 - DNA, 1470 bp, Artificial Sequence
  derived and/or modified sequence
atgaagggcaagaactgcaacgacgtgaagatcttcatcaacaacgagtggcagaacagcgagagcggcagagtgttccccgtgtacaaccccgccaccggcgagcaggtgtgcgaggtgcaggaggccgacaaggccgacatcgacaaggccgtgcaggccgccagactggccttcagcctgggcagcgtgtggagaagaatggacgccagcgagagaggcagactgctggacaagctggccgacctggtggagagagacagagccgtgctggccaccatggagagcctgaacggcggcaagcccttcctgcaggccttctacgtggacctgcagggcgtgatcaagaccttcagatactacgccggctgggccgacaagatccacggcatgaccatccccgtggacggcgactacttcaccttcaccagacacgagcccatcggcgtgtgcggccagatcatcccctggaacttccccctgctgatgttcgcctggaagatcgcccccgccctgtgctgcggcaacaccgtggtgatcaagcccgccgagcagacccccctgagcgccctgtacatgggcgccctgatcaaggaggccggcttcccccccggcgtgatcaacatcctgcccggctacggccccaccgccggcgccgccatcgccagccacatcggcatcgacaagatcgccttcaccggcagcaccgaggtgggcaagctgatccaggaggccgccggcagaagcaacctgaagagagtgaccctggagctgggcggcaagagccccaacatcatcttcgccgacgccgacctggactacgccgtggagcaggcccaccagggcgtgttcttcaaccagggccagtgctgcaccgccggcagcagaatcttcgtggaggagagcatctacgaggagttcgtgagaagaagcgtggagagagccaagagaagagtggtgggcagccccttcgaccccaccaccgagcagggcccccagatcgacaagaagcagtacaacaagatcctggagctgatccagagcggcgtggccgagggcgccaagctggagtgcggcggcaagggcctgggcagaaagggcttcttcatcgagcccaccgtgttcagcaacgtgaccgacgacatgagaatcgccaaggaggagatcttcggccccgtgcaggagatcctgagattcaagaccatggacgaggtgatcgagagagccaacaacagcgacttcggcctggtggccgccgtgttcaccaacgacatcaacaaggccctgaccgtgagcagcgccatgcaggccggcaccgtgtggatcaactgctacaacgccctgaacgcccagagccccttcggcggcttcaagatgagcggcaacggcagagagatgggcgagttcggcctgagagagtacagcgaggtgaagaccgtgaccgtgaagatcccccagaagaacagctag

SEQ ID NO: 141777 - DNA, 1470 bp, Artificial Sequence
  derived and/or modified sequence
atgaagggcagaaactggaagaccaccaagatcttcatcaacaacgagtggcagaacagcgagagcggcagagtgttccccgtgtacaaccccgccaccggcgagcaggtgtgcgaggtgcaggaggccgacaaggccgacatcgacaaggccgtgcaggccgccagactggccttcagcctgggcagcgtgtggagaagaatggacgccagcgagagaggcagactgctggacaagctggccgacctggtggagagagacagagccgtgctggccaccatggagagcctgaacggcggcaagcccttcctgcaggccttctacgtggacctgcagggcgtgatcaagaccttcagatactacgccggctgggccgacaagatccacggcatgaccatccccgtggacggcgactacttcaccttcaccagacacgagcccatcggcgtgtgcggccagatcatcccctggaacttccccctgctgatgttcgcctggaagatcgcccccgccctgtgctgcggcaacaccgtggtgatcaagcccgccgagcagacccccctgagcgccctgtacatgggcgccctgatcaaggaggccggcttcccccccggcgtgatcaacatcctgcccggctacggccccaccgccggcgccgccatcgccagccacatcggcatcgacaagatcgccttcaccggcagcaccgaggtgggcaagctgatccaggaggccgccggcagaagcaacctgaagagagtgaccctggagctgggcggcaagagccccaacatcatcttcgccgacgccgacctggactacgccgtggagcaggcccaccagggcgtgttcttcaaccagggccagtgctgcaccgccggcagcagaatcttcgtggaggagagcatctacgaggagttcgtgagaagaagcgtggagagagccaagagaagagtggtgggcagccccttcgaccccaccaccgagcagggcccccagatcgacaagaagcagtacaacaagatcctggagctgatccagagcggcgtggccgagggcgccaagctggagtgcggcggcaagggcctgggcagaaagggcttcttcatcgagcccaccgtgttcagcaacgtgaccgacgacatgagaatcgccaaggaggagatcttcggccccgtgcaggagatcctgagattcaagaccatggacgaggtgatcgagagagccaacaacagcgacttcggcctggtggccgccgtgttcaccaacgacatcaacaaggccctgaccgtgagcagcgccatgcaggccggcaccgtgtggatcaactgctacaacgccctgaacgcccagagccccttcggcggcttcaagatgagcggcaacggcagagagatgggcgagttcggcctgagagagtacagcgaggtgaagaccgtgaccgtgaagatcccccagaagaacagctag

SEQ ID NO: 141778 - DNA, 78 bp, Artificial Sequence
  derived and/or modified sequence
atggacgccagcgagagaggcagactgctggacaagctggccgacctggtggagagagacagagccgtgctggcctag

SEQ ID NO: 141779 - protein, 5405 aa, Artificial Sequence
  derived and/or modified sequence
MGALWSWWILWAGATLLWGLTQEASVDLKNTGREEFLTAFLQNYQLAYSKAYPRLLISSLSESPASVSILSQADNTSKKVTVRPGESVMVNISAKAEMIGSKIFQHAVVIHSDYAISVQALNAKPDTAELTLLRPIQALGTEYFVLTPPGTSARNVKEFAVVAGAAGASVSVTLKGSVTFNGKFYPAGDVLRVTLQPYNVAQLQSSVDLSGSKVTASSPVAVLSGHSCAQKHTTCNHVVEQLLPTSAWGTHYVVPTLASQSRYDLAFVVASQATKLTYNHGGITGSRGLQAGDVVEFEVRPSWPLYLSANVGIQVLLFGTGAIRNEVTYDPYLVLIPDVAAYCPAYVVKSVPGCEGVALVVAQTKAISGLTIDGHAVGAKLTWEAVPGSEFSYAEVELGTADMIHTAEATTNLGLLTFGLAKAIGYATAADCGRTVLSPVEPSCEGMQCAAGQRCQVVGGKAGCVAESTAVCRAQGDPHYTTFDGRRYDMMGTCSYTMVELCSEDDTLPAFSVEAKNEHRGSRRVSYVGLVTVRAYSHSVSLTRGEVGFVLVDNQRSRLPVSLSEGRLRVYQSGPRAVVELVFGLVVTYDWDCQLALSLPARFQDQVCGLCGNYNGDPADDFLTPDGALAPDAVEFASSWKLDDGDYLCEDGCQNNCPACTPGQAQHYEGDRLCGMLTKLDGPFAVCHDTLDPRPFLEQCVYDLCVVGGERLSLCRGLSAYAQACLELGISVGDWRSPANCPLSCPANSRYELCGPACPTSCNGAAAPSNCSGRPCVEGCVCLPGFVASGGACVPASSCGCTFQGLQLAPGQEVWADELCQRRCTCNGATHQVTCRDKQSCPAGERCSVQNGLLGCYPDRFGTCQGSGDPHYVSFDGRRFDFMGTCTYLLVGSCGQNAALPAFRVLVENEHRGSQTVSYTRAVRVEARGVKVAVRREYPGQVLVDDVLQYLPFQAADGQVQVFRQGRDAVVRTDFGLTVTYDWNARVTAKVPSSYAEALCGLCGNFNGDPADDLALRGGGQAANALAFGNSWQEETRPGCGATEPGDCPKLDSLVAQQLQSKNECGILADPKGPFRECHSKLDPQGAVRDCVYDRCLLPGQSGPLCDALATYAAACQAAGATVHPWRSEELCPLSCPPHSHYEACSYGCPLSCGDLPVPGGCGSECHEGCVCDEGFALSGESCLPLASCGCVHQGTYHPPGQTFYPGPGCDSLCHCQEGGLVSCESSSCGPHEACQPSGGSLGCVAVGSSTCQASGDPHYTTFDGRRFDFMGTCVYVLAQTCGTRPGLHRFAVLQENVAWGNGRVSVTRVITVQVANFTLRLEQRQWKVTVNGVDMKLPVVLANGQIRASQHGSDVVIETDFGLRVAYDLVYYVRVTVPGNYYQQMCGLCGNYNGDPKDDFQKPNGSQAGNANEFGNSWEEVVPDSPCLPPTPCPPGSEDCIPSHKCPPELEKKYQKEEFCGLLSSPTGPLSSCHKLVDPQGPLKDCIFDLCLGGGNLSILCSNIHAYVSACQAAGGHVEPWRTETFCPMECPPNSHYELCADTCSLGCSALSAPPQCQDGCAEGCQCDSGFLYNGQACVPIQQCGCYHNGVYYEPEQTVLIDNCRQQCTCHAGKGMVCQEHSCKPGQVCQPSGGILSCVTKDPCHGVTCRPQETCKEQGGQGVCLPNYEATCWLWGDPHYHSFDGRKFDFQGTCNYVLATTGCPGVSTQGLTPFTVTTKNQNRGNPAVSYVRVVTVAALGTNISIHKDEIGKVRVNGVLTALPVSVADGRISVTQGASKALLVADFGLQVSYDWNWRVDVTLPSSYHGAVCGLCGNMDRNPNNDQVFPNGTLAPSIPIWGGSWRAPGWDPLCWDECRGSCPTCPEDRLEQYEGPGFCGPLAPGTGGPFTTCHAHVPPESFFKGCVLDVCMGGGDRDILCKALASYVAACQAAGVVIEDWRAQVGCEITCPENSHYEVCGSPCPASCPSPAPLTTPAVCEGPCVEGCQCDAGFVLSADRCVPLNNGCGCWANGTYHEAGSEFWADGTCSQWCRCGPGGGSLVCTPASCGLGEVCGLLPSGQHGCQPVSTAECQAWGDPHYVTLDGHRFNFQGTCEYLLSAPCHGPPLGAENFTVTVANEHRGSQAVSYTRSVTLQIYNHSLTLSARWPRKLQVDGVFVTLPFQLDSLLHAHLSGADVVVTTTSGLSLAFDGDSFVRLRVPAAYAGSLCGLCGNYNQDPADDLKAVGGKPAGWQVGGAQGCGECVSKPCPSPCTPEQQESFGGPDACGVISATDGPLAPCHGLVPPAQYFQGCLLDACQVQGHPGGLCPAVATYVAACQAAGAQLREWRRPDFCPFQCPAHSHYELCGDSCPGSCPSLSAPEGCESACREGCVCDAGFVLSGDTCVPVGQCGCLHDDRYYPLGQTFYPGPGCDSLCRCREGGEVSCEPSSCGPHETCRPSGGSLGCVAVGSTTCQASGDPHYTTFDGRRFDFMGTCVYVLAQTCGTRPGLHRFAVLQENVAWGNGRVSVTRVITVQVANFTLRLEQRQWKVTVNGVDMKLPVVLANGQIRASQHGSDVVIETDFGLRVAYDLVYYVRVTVPGNYYQLMCGLCGNYNGDPKDDFQKPNGSQAGNANEFGNSWEEVVPDSPCLPPPTCPPGSEGCIPSEECPPELEKKYQKEEFCGLLSSPTGPLSSCHKLVDPQGPLKDCIFDLCLGGGNLSILCSNIHAYVSACQAAGGQVEPWRNETFCPMECPQNSHYELCADTCSLGCSALSAPLQCPDGCAEGCQCDSGFLYNGQACVPIQQCGCYHNGAYYEPEQTVLIDNCRQQCTCHVGKVVVCQEHSCKPGQVCQPSGGILSCVNKDPCHGVTCRPQETCKEQGGQGVCLPNYEATCWLWGDPHYHSFDGRKFDFQGTCNYVLATTGCPGVSTQGLTPFTVTTKNQNRGNPAVSYVRVVTVAALGTNISIHKDEIGKVRVNGVLTALPVSVADGRISVTQGASKALLVADFGLQVSYDWNWRVDVTLPSSYHGAVCGLCGNMDRNPNNDQVFPNGTLAPSIPIWGGSWRAPGWDPLCWDECRGSCPTCPEDRLEQYEGPGFCGPLAPGTGGPFTTCHAHVPPESFFKGCVLDVCMGGGDRDILCKALASYVAACQAAGVVIEDWRAQVGCEITCPENSHYEVCGPPCPASCPSPAPLTTPAVCEGPCVEGCQCDAGFVLSADRCVPLNNGCGCWANGTYHEAGSEFWADGTCSQWCRCGPGGGSLVCTPASCGLGEVCGLLPSGQHGCQPVSTAECQAWGDPHYVTLDGHRFDFQGTCEYLLSAPCHGPPLGAENFTVTVANEHRGSQAVSYTRSVTLQIYNHSLTLSARWPRKLQVDGVFVTLPFQLDSLLHAHLSGADVVVTTTSGLSLAFDGDSFVRLRVPAAYAGSLCGLCGNYNQDPADDLKAVGGKPAGWQVGGAQGCGECVSKPCPSPCTPEQQESFGGPDACGVISATDGPLAPCHGLVPPAQYFQGCLLDACQVQGHPGGLCPAVATYVAACQAAGAQLREWRRPDFCPFQCPAHSHYELCGDSCPGSCPSLSAPEGCESACREGCVCDAGFVLSGDTCVPVGQCGCLHDDRYYPLGQTFYPGPGCDSLCRCREGGEVSCEPSSCGPHETCRPSGGSLGCVAVGSTTCQASGDPHYTTFDGHRFDFMGTCVYVLAQTCGTRPGLHRFAVLQENVAWGNGRVSVTRVITVQVANFTLRLEQRQWKVTVNGVDMKLPVVLANGQIRASQHGSDVVIETDFGLRVAYDLVYYVRVTVPGNYYQLMCGLCGNYNGDPKDDFQKPNGSQAGNANEFGNSWEEVVPDSPCLPPPTCPPGSAGCIPSDKCPPELEKKYQKEEFCGLLSSPTGPLSSCHKLVDPQGPLKDCIFDLCLGGGNLSILCSNIHAYVSACQAAGGHVEPWRNETFCPMECPQNSHYELCADTCSLGCSALSAPLQCPDGCAEGCQCDSGFLYNGQACVPIQQCGCYHNGVYYEPEQTVLIDNCRQQCTCHVGKVVVCQEHSCKPGQVCQPSGGILSCVTKDPCHGVTCRPQETCKEQGGQGVCLPNYEATCWLWGDPHYHSFDGRKFDFQGTCNYVLATTGCPGVSTQGLTPFTVTTKNQNRGNPAVSYVRVVTVAALGTNISIHKDEIGKVRVNGVLTALPVSVADGRISVAQGASKALLVADFGLQVSYDWNWRVDVTLPSSYHGAVCGLCGNMDRNPNNDQVFPNGTLAPSIPIWGGSWRAPGWDPLCWDECRGSCPTCPEDRLEQYEGPGFCGPLSSGTGGPFTTCHAHVPPESFFKGCVLDVCMGGGDRDILCKALASYVAACQAAGVVIEDWRAQVGCEITCPENSHYEVCGPPCPASCPSPAPLTTPAVCEGPCVEGCQCDAGFVLSADRCVPLNNGCGCWANGTYHEAGSEFWADGTCSQWCRCGPGGGSLVCTPASCGLGEVCGLLPSGQHGCQPVSTAECQAWGDPHYVTLDGHRFDFQGTCEYLLSAPCHGPPLGAENFTVTVANEHRGSQAVSYTRSVTLQIYNHSLTLSARWPRKLQVDGVFVALPFQLDSLLHAHLSGADVVVTTTSGLSLAFDGDSFVRLRVPAAYAASLCGLCGNYNQDPADDLKAVGGKPAGWQVGGAQGCGECVSKPCPSPCTPEQQESFGGPDACGVISATDGPLAPCHGLVPPAQYFQGCLLDACQVQGHPGGLCPAVATYVAACQAAGAQLGEWRRPDFCPLQCPAHSHYELCGDSCPVSCPSLSAPEGCESACREGCVCDAGFVLSGDTCVPVGQCGCLHDGRYYPLGEVFYPGPECERRCECGPGGHVTCQEGAACGPHEECRLEDGVQACHATGCGRCLANGGIHYITLDGRVYDLHGSCSYVLAQVCHPKPGDEDFSIVLEKNAAGDLQRLLVTVAGQVVSLAQGQQVTVDGEAVALPVAVGRVRVTAEGRNMVLQTTKGLRLLFDGDAHLLMSIPSPFRGRLCGLCGNFNGNWSDDFVLPNGSAASSVETFGAAWRAPGSSKGCGEGCGPQGCPVCLAEETAPYESNEACGQLRNPQGPFATCQAVLSPSEYFRQCVYDLCAQKGDKAFLCRSLAAYTAACQAAGVAVKPWRTDSFCPLHCPAHSHYSICTRTCQGSCAALSGLTGCTTRCFEGCECDDRFLLSQGVCIPVQDCGCTHNGRYLPVNSSLLTSDCSERCSCSSSSGLTCQAAGCPPGRVCEVKAEARNCWATRGLCVLSVGANLTTFDGARGATTSPGVYELSSRCPGLQNTIPWYRVVAEVQICHGKTEAVGQVHIFFQDGMVTLTPNKGVWVNGLRVDLPAEKLASVSVSRTPDGSLLVRQKAGVQVWLGANGKVAVIVSNDHAGKLCGACGNFDGDQTNDWHDSQEKPAMEKWRAQDFSPCYG

SEQ ID NO: 141780 - protein, 148 aa, Artificial Sequence
  derived and/or modified sequence
MDCVPPIQCSCSMGGRYHHPAGEAFWTGERCEQFCHCQASTHAVCCSPSSCGPGQRCETLRGIFGCHPLSPGIYQATMHSHVASFDRKSVEFPGTCASAFTKSCGSSSSLRLFKVEIGKEKQVQQSHCVHFKDVGSWDPGLSAERAPT

SEQ ID NO: 141781 - DNA, 16218 bp, Artificial Sequence
  derived and/or modified sequence
atgggcgccctgtggagctggtggatcctgtgggccggcgccaccctgctgtggggcctgacccaggaggccagcgtggacctgaagaacaccggcagagaggagttcctgaccgccttcctgcagaactaccagctggcctacagcaaggcctaccccagactgctgatcagcagcctgagcgagagccccgccagcgtgagcatcctgagccaggccgacaacaccagcaagaaggtgaccgtgagacccggcgagagcgtgatggtgaacatcagcgccaaggccgagatgatcggcagcaagatcttccagcacgccgtggtgatccacagcgactacgccatcagcgtgcaggccctgaacgccaagcccgacaccgccgagctgaccctgctgagacccatccaggccctgggcaccgagtacttcgtgctgaccccccccggcaccagcgccagaaacgtgaaggagttcgccgtggtggccggcgccgccggcgccagcgtgagcgtgaccctgaagggcagcgtgaccttcaacggcaagttctaccccgccggcgacgtgctgagagtgaccctgcagccctacaacgtggcccagctgcagagcagcgtggacctgagcggcagcaaggtgaccgccagcagccccgtggccgtgctgagcggccacagctgcgcccagaagcacaccacctgcaaccacgtggtggagcagctgctgcccaccagcgcctggggcacccactacgtggtgcccaccctggccagccagagcagatacgacctggccttcgtggtggccagccaggccaccaagctgacctacaaccacggcggcatcaccggcagcagaggcctgcaggccggcgacgtggtggagttcgaggtgagacccagctggcccctgtacctgagcgccaacgtgggcatccaggtgctgctgttcggcaccggcgccatcagaaacgaggtgacctacgacccctacctggtgctgatccccgacgtggccgcctactgccccgcctacgtggtgaagagcgtgcccggctgcgagggcgtggccctggtggtggcccagaccaaggccatcagcggcctgaccatcgacggccacgccgtgggcgccaagctgacctgggaggccgtgcccggcagcgagttcagctacgccgaggtggagctgggcaccgccgacatgatccacaccgccgaggccaccaccaacctgggcctgctgaccttcggcctggccaaggccatcggctacgccaccgccgccgactgcggcagaaccgtgctgagccccgtggagcccagctgcgagggcatgcagtgcgccgccggccagagatgccaggtggtgggcggcaaggccggctgcgtggccgagagcaccgccgtgtgcagagcccagggcgacccccactacaccaccttcgacggcagaagatacgacatgatgggcacctgcagctacaccatggtggagctgtgcagcgaggacgacaccctgcccgccttcagcgtggaggccaagaacgagcacagaggcagcagaagagtgagctacgtgggcctggtgaccgtgagagcctacagccacagcgtgagcctgaccagaggcgaggtgggcttcgtgctggtggacaaccagagaagcagactgcccgtgagcctgagcgagggcagactgagagtgtaccagagcggccccagagccgtggtggagctggtgttcggcctggtggtgacctacgactgggactgccagctggccctgagcctgcccgccagattccaggaccaggtgtgcggcctgtgcggcaactacaacggcgaccccgccgacgacttcctgacccccgacggcgccctggcccccgacgccgtggagttcgccagcagctggaagctggacgacggcgactacctgtgcgaggacggctgccagaacaactgccccgcctgcacccccggccaggcccagcactacgagggcgacagactgtgcggcatgctgaccaagctggacggccccttcgccgtgtgccacgacaccctggaccccagacccttcctggagcagtgcgtgtacgacctgtgcgtggtgggcggcgagagactgagcctgtgcagaggcctgagcgcctacgcccaggcctgcctggagctgggcatcagcgtgggcgactggagaagccccgccaactgccccctgagctgccccgccaacagcagatacgagctgtgcggccccgcctgccccaccagctgcaacggcgccgccgcccccagcaactgcagcggcagaccctgcgtggagggctgcgtgtgcctgcccggcttcgtggccagcggcggcgcctgcgtgcccgccagcagctgcggctgcaccttccagggcctgcagctggcccccggccaggaggtgtgggccgacgagctgtgccagagaagatgcacctgcaacggcgccacccaccaggtgacctgcagagacaagcagagctgccccgccggcgagagatgcagcgtgcagaacggcctgctgggctgctaccccgacagattcggcacctgccagggcagcggcgacccccactacgtgagcttcgacggcagaagattcgacttcatgggcacctgcacctacctgctggtgggcagctgcggccagaacgccgccctgcccgccttcagagtgctggtggagaacgagcacagaggcagccagaccgtgagctacaccagagccgtgagagtggaggccagaggcgtgaaggtggccgtgagaagagagtaccccggccaggtgctggtggacgacgtgctgcagtacctgcccttccaggccgccgacggccaggtgcaggtgttcagacagggcagagacgccgtggtgagaaccgacttcggcctgaccgtgacctacgactggaacgccagagtgaccgccaaggtgcccagcagctacgccgaggccctgtgcggcctgtgcggcaacttcaacggcgaccccgccgacgacctggccctgagaggcggcggccaggccgccaacgccctggccttcggcaacagctggcaggaggagaccagacccggctgcggcgccaccgagcccggcgactgccccaagctggacagcctggtggcccagcagctgcagagcaagaacgagtgcggcatcctggccgaccccaagggccccttcagagagtgccacagcaagctggacccccagggcgccgtgagagactgcgtgtacgacagatgcctgctgcccggccagagcggccccctgtgcgacgccctggccacctacgccgccgcctgccaggccgccggcgccaccgtgcacccctggagaagcgaggagctgtgccccctgagctgccccccccacagccactacgaggcctgcagctacggctgccccctgagctgcggcgacctgcccgtgcccggcggctgcggcagcgagtgccacgagggctgcgtgtgcgacgagggcttcgccctgagcggcgagagctgcctgcccctggccagctgcggctgcgtgcaccagggcacctaccacccccccggccagaccttctaccccggccccggctgcgacagcctgtgccactgccaggagggcggcctggtgagctgcgagagcagcagctgcggcccccacgaggcctgccagcccagcggcggcagcctgggctgcgtggccgtgggcagcagcacctgccaggccagcggcgacccccactacaccaccttcgacggcagaagattcgacttcatgggcacctgcgtgtacgtgctggcccagacctgcggcaccagacccggcctgcacagattcgccgtgctgcaggagaacgtggcctggggcaacggcagagtgagcgtgaccagagtgatcaccgtgcaggtggccaacttcaccctgagactggagcagagacagtggaaggtgaccgtgaacggcgtggacatgaagctgcccgtggtgctggccaacggccagatcagagccagccagcacggcagcgacgtggtgatcgagaccgacttcggcctgagagtggcctacgacctggtgtactacgtgagagtgaccgtgcccggcaactactaccagcagatgtgcggcctgtgcggcaactacaacggcgaccccaaggacgacttccagaagcccaacggcagccaggccggcaacgccaacgagttcggcaacagctgggaggaggtggtgcccgacagcccctgcctgccccccaccccctgcccccccggcagcgaggactgcatccccagccacaagtgcccccccgagctggagaagaagtaccagaaggaggagttctgcggcctgctgagcagccccaccggccccctgagcagctgccacaagctggtggacccccagggccccctgaaggactgcatcttcgacctgtgcctgggcggcggcaacctgagcatcctgtgcagcaacatccacgcctacgtgagcgcctgccaggccgccggcggccacgtggagccctggagaaccgagaccttctgccccatggagtgcccccccaacagccactacgagctgtgcgccgacacctgcagcctgggctgcagcgccctgagcgcccccccccagtgccaggacggctgcgccgagggctgccagtgcgacagcggcttcctgtacaacggccaggcctgcgtgcccatccagcagtgcggctgctaccacaacggcgtgtactacgagcccgagcagaccgtgctgatcgacaactgcagacagcagtgcacctgccacgccggcaagggcatggtgtgccaggagcacagctgcaagcccggccaggtgtgccagcccagcggcggcatcctgagctgcgtgaccaaggacccctgccacggcgtgacctgcagaccccaggagacctgcaaggagcagggcggccagggcgtgtgcctgcccaactacgaggccacctgctggctgtggggcgacccccactaccacagcttcgacggcagaaagttcgacttccagggcacctgcaactacgtgctggccaccaccggctgccccggcgtgagcacccagggcctgacccccttcaccgtgaccaccaagaaccagaacagaggcaaccccgccgtgagctacgtgagagtggtgaccgtggccgccctgggcaccaacatcagcatccacaaggacgagatcggcaaggtgagagtgaacggcgtgctgaccgccctgcccgtgagcgtggccgacggcagaatcagcgtgacccagggcgccagcaaggccctgctggtggccgacttcggcctgcaggtgagctacgactggaactggagagtggacgtgaccctgcccagcagctaccacggcgccgtgtgcggcctgtgcggcaacatggacagaaaccccaacaacgaccaggtgttccccaacggcaccctggcccccagcatccccatctggggcggcagctggagagcccccggctgggaccccctgtgctgggacgagtgcagaggcagctgccccacctgccccgaggacagactggagcagtacgagggccccggcttctgcggccccctggcccccggcaccggcggccccttcaccacctgccacgcccacgtgccccccgagagcttcttcaagggctgcgtgctggacgtgtgcatgggcggcggcgacagagacatcctgtgcaaggccctggccagctacgtggccgcctgccaggccgccggcgtggtgatcgaggactggagagcccaggtgggctgcgagatcacctgccccgagaacagccactacgaggtgtgcggcagcccctgccccgccagctgccccagccccgcccccctgaccacccccgccgtgtgcgagggcccctgcgtggagggctgccagtgcgacgccggcttcgtgctgagcgccgacagatgcgtgcccctgaacaacggctgcggctgctgggccaacggcacctaccacgaggccggcagcgagttctgggccgacggcacctgcagccagtggtgcagatgcggccccggcggcggcagcctggtgtgcacccccgccagctgcggcctgggcgaggtgtgcggcctgctgcccagcggccagcacggctgccagcccgtgagcaccgccgagtgccaggcctggggcgacccccactacgtgaccctggacggccacagattcaacttccagggcacctgcgagtacctgctgagcgccccctgccacggcccccccctgggcgccgagaacttcaccgtgaccgtggccaacgagcacagaggcagccaggccgtgagctacaccagaagcgtgaccctgcagatctacaaccacagcctgaccctgagcgccagatggcccagaaagctgcaggtggacggcgtgttcgtgaccctgcccttccagctggacagcctgctgcacgcccacctgagcggcgccgacgtggtggtgaccaccaccagcggcctgagcctggccttcgacggcgacagcttcgtgagactgagagtgcccgccgcctacgccggcagcctgtgcggcctgtgcggcaactacaaccaggaccccgccgacgacctgaaggccgtgggcggcaagcccgccggctggcaggtgggcggcgcccagggctgcggcgagtgcgtgagcaagccctgccccagcccctgcacccccgagcagcaggagagcttcggcggccccgacgcctgcggcgtgatcagcgccaccgacggccccctggccccctgccacggcctggtgccccccgcccagtacttccagggctgcctgctggacgcctgccaggtgcagggccaccccggcggcctgtgccccgccgtggccacctacgtggccgcctgccaggccgccggcgcccagctgagagagtggagaagacccgacttctgccccttccagtgccccgcccacagccactacgagctgtgcggcgacagctgccccggcagctgccccagcctgagcgcccccgagggctgcgagagcgcctgcagagagggctgcgtgtgcgacgccggcttcgtgctgagcggcgacacctgcgtgcccgtgggccagtgcggctgcctgcacgacgacagatactaccccctgggccagaccttctaccccggccccggctgcgacagcctgtgcagatgcagagagggcggcgaggtgagctgcgagcccagcagctgcggcccccacgagacctgcagacccagcggcggcagcctgggctgcgtggccgtgggcagcaccacctgccaggccagcggcgacccccactacaccaccttcgacggcagaagattcgacttcatgggcacctgcgtgtacgtgctggcccagacctgcggcaccagacccggcctgcacagattcgccgtgctgcaggagaacgtggcctggggcaacggcagagtgagcgtgaccagagtgatcaccgtgcaggtggccaacttcaccctgagactggagcagagacagtggaaggtgaccgtgaacggcgtggacatgaagctgcccgtggtgctggccaacggccagatcagagccagccagcacggcagcgacgtggtgatcgagaccgacttcggcctgagagtggcctacgacctggtgtactacgtgagagtgaccgtgcccggcaactactaccagctgatgtgcggcctgtgcggcaactacaacggcgaccccaaggacgacttccagaagcccaacggcagccaggccggcaacgccaacgagttcggcaacagctgggaggaggtggtgcccgacagcccctgcctgcccccccccacctgcccccccggcagcgagggctgcatccccagcgaggagtgcccccccgagctggagaagaagtaccagaaggaggagttctgcggcctgctgagcagccccaccggccccctgagcagctgccacaagctggtggacccccagggccccctgaaggactgcatcttcgacctgtgcctgggcggcggcaacctgagcatcctgtgcagcaacatccacgcctacgtgagcgcctgccaggccgccggcggccaggtggagccctggagaaacgagaccttctgccccatggagtgcccccagaacagccactacgagctgtgcgccgacacctgcagcctgggctgcagcgccctgagcgcccccctgcagtgccccgacggctgcgccgagggctgccagtgcgacagcggcttcctgtacaacggccaggcctgcgtgcccatccagcagtgcggctgctaccacaacggcgcctactacgagcccgagcagaccgtgctgatcgacaactgcagacagcagtgcacctgccacgtgggcaaggtggtggtgtgccaggagcacagctgcaagcccggccaggtgtgccagcccagcggcggcatcctgagctgcgtgaacaaggacccctgccacggcgtgacctgcagaccccaggagacctgcaaggagcagggcggccagggcgtgtgcctgcccaactacgaggccacctgctggctgtggggcgacccccactaccacagcttcgacggcagaaagttcgacttccagggcacctgcaactacgtgctggccaccaccggctgccccggcgtgagcacccagggcctgacccccttcaccgtgaccaccaagaaccagaacagaggcaaccccgccgtgagctacgtgagagtggtgaccgtggccgccctgggcaccaacatcagcatccacaaggacgagatcggcaaggtgagagtgaacggcgtgctgaccgccctgcccgtgagcgtggccgacggcagaatcagcgtgacccagggcgccagcaaggccctgctggtggccgacttcggcctgcaggtgagctacgactggaactggagagtggacgtgaccctgcccagcagctaccacggcgccgtgtgcggcctgtgcggcaacatggacagaaaccccaacaacgaccaggtgttccccaacggcaccctggcccccagcatccccatctggggcggcagctggagagcccccggctgggaccccctgtgctgggacgagtgcagaggcagctgccccacctgccccgaggacagactggagcagtacgagggccccggcttctgcggccccctggcccccggcaccggcggccccttcaccacctgccacgcccacgtgccccccgagagcttcttcaagggctgcgtgctggacgtgtgcatgggcggcggcgacagagacatcctgtgcaaggccctggccagctacgtggccgcctgccaggccgccggcgtggtgatcgaggactggagagcccaggtgggctgcgagatcacctgccccgagaacagccactacgaggtgtgcggccccccctgccccgccagctgccccagccccgcccccctgaccacccccgccgtgtgcgagggcccctgcgtggagggctgccagtgcgacgccggcttcgtgctgagcgccgacagatgcgtgcccctgaacaacggctgcggctgctgggccaacggcacctaccacgaggccggcagcgagttctgggccgacggcacctgcagccagtggtgcagatgcggccccggcggcggcagcctggtgtgcacccccgccagctgcggcctgggcgaggtgtgcggcctgctgcccagcggccagcacggctgccagcccgtgagcaccgccgagtgccaggcctggggcgacccccactacgtgaccctggacggccacagattcgacttccagggcacctgcgagtacctgctgagcgccccctgccacggcccccccctgggcgccgagaacttcaccgtgaccgtggccaacgagcacagaggcagccaggccgtgagctacaccagaagcgtgaccctgcagatctacaaccacagcctgaccctgagcgccagatggcccagaaagctgcaggtggacggcgtgttcgtgaccctgcccttccagctggacagcctgctgcacgcccacctgagcggcgccgacgtggtggtgaccaccaccagcggcctgagcctggccttcgacggcgacagcttcgtgagactgagagtgcccgccgcctacgccggcagcctgtgcggcctgtgcggcaactacaaccaggaccccgccgacgacctgaaggccgtgggcggcaagcccgccggctggcaggtgggcggcgcccagggctgcggcgagtgcgtgagcaagccctgccccagcccctgcacccccgagcagcaggagagcttcggcggccccgacgcctgcggcgtgatcagcgccaccgacggccccctggccccctgccacggcctggtgccccccgcccagtacttccagggctgcctgctggacgcctgccaggtgcagggccaccccggcggcctgtgccccgccgtggccacctacgtggccgcctgccaggccgccggcgcccagctgagagagtggagaagacccgacttctgccccttccagtgccccgcccacagccactacgagctgtgcggcgacagctgccccggcagctgccccagcctgagcgcccccgagggctgcgagagcgcctgcagagagggctgcgtgtgcgacgccggcttcgtgctgagcggcgacacctgcgtgcccgtgggccagtgcggctgcctgcacgacgacagatactaccccctgggccagaccttctaccccggccccggctgcgacagcctgtgcagatgcagagagggcggcgaggtgagctgcgagcccagcagctgcggcccccacgagacctgcagacccagcggcggcagcctgggctgcgtggccgtgggcagcaccacctgccaggccagcggcgacccccactacaccaccttcgacggccacagattcgacttcatgggcacctgcgtgtacgtgctggcccagacctgcggcaccagacccggcctgcacagattcgccgtgctgcaggagaacgtggcctggggcaacggcagagtgagcgtgaccagagtgatcaccgtgcaggtggccaacttcaccctgagactggagcagagacagtggaaggtgaccgtgaacggcgtggacatgaagctgcccgtggtgctggccaacggccagatcagagccagccagcacggcagcgacgtggtgatcgagaccgacttcggcctgagagtggcctacgacctggtgtactacgtgagagtgaccgtgcccggcaactactaccagctgatgtgcggcctgtgcggcaactacaacggcgaccccaaggacgacttccagaagcccaacggcagccaggccggcaacgccaacgagttcggcaacagctgggaggaggtggtgcccgacagcccctgcctgcccccccccacctgcccccccggcagcgccggctgcatccccagcgacaagtgcccccccgagctggagaagaagtaccagaaggaggagttctgcggcctgctgagcagccccaccggccccctgagcagctgccacaagctggtggacccccagggccccctgaaggactgcatcttcgacctgtgcctgggcggcggcaacctgagcatcctgtgcagcaacatccacgcctacgtgagcgcctgccaggccgccggcggccacgtggagccctggagaaacgagaccttctgccccatggagtgcccccagaacagccactacgagctgtgcgccgacacctgcagcctgggctgcagcgccctgagcgcccccctgcagtgccccgacggctgcgccgagggctgccagtgcgacagcggcttcctgtacaacggccaggcctgcgtgcccatccagcagtgcggctgctaccacaacggcgtgtactacgagcccgagcagaccgtgctgatcgacaactgcagacagcagtgcacctgccacgtgggcaaggtggtggtgtgccaggagcacagctgcaagcccggccaggtgtgccagcccagcggcggcatcctgagctgcgtgaccaaggacccctgccacggcgtgacctgcagaccccaggagacctgcaaggagcagggcggccagggcgtgtgcctgcccaactacgaggccacctgctggctgtggggcgacccccactaccacagcttcgacggcagaaagttcgacttccagggcacctgcaactacgtgctggccaccaccggctgccccggcgtgagcacccagggcctgacccccttcaccgtgaccaccaagaaccagaacagaggcaaccccgccgtgagctacgtgagagtggtgaccgtggccgccctgggcaccaacatcagcatccacaaggacgagatcggcaaggtgagagtgaacggcgtgctgaccgccctgcccgtgagcgtggccgacggcagaatcagcgtggcccagggcgccagcaaggccctgctggtggccgacttcggcctgcaggtgagctacgactggaactggagagtggacgtgaccctgcccagcagctaccacggcgccgtgtgcggcctgtgcggcaacatggacagaaaccccaacaacgaccaggtgttccccaacggcaccctggcccccagcatccccatctggggcggcagctggagagcccccggctgggaccccctgtgctgggacgagtgcagaggcagctgccccacctgccccgaggacagactggagcagtacgagggccccggcttctgcggccccctgagcagcggcaccggcggccccttcaccacctgccacgcccacgtgccccccgagagcttcttcaagggctgcgtgctggacgtgtgcatgggcggcggcgacagagacatcctgtgcaaggccctggccagctacgtggccgcctgccaggccgccggcgtggtgatcgaggactggagagcccaggtgggctgcgagatcacctgccccgagaacagccactacgaggtgtgcggccccccctgccccgccagctgccccagccccgcccccctgaccacccccgccgtgtgcgagggcccctgcgtggagggctgccagtgcgacgccggcttcgtgctgagcgccgacagatgcgtgcccctgaacaacggctgcggctgctgggccaacggcacctaccacgaggccggcagcgagttctgggccgacggcacctgcagccagtggtgcagatgcggccccggcggcggcagcctggtgtgcacccccgccagctgcggcctgggcgaggtgtgcggcctgctgcccagcggccagcacggctgccagcccgtgagcaccgccgagtgccaggcctggggcgacccccactacgtgaccctggacggccacagattcgacttccagggcacctgcgagtacctgctgagcgccccctgccacggcccccccctgggcgccgagaacttcaccgtgaccgtggccaacgagcacagaggcagccaggccgtgagctacaccagaagcgtgaccctgcagatctacaaccacagcctgaccctgagcgccagatggcccagaaagctgcaggtggacggcgtgttcgtggccctgcccttccagctggacagcctgctgcacgcccacctgagcggcgccgacgtggtggtgaccaccaccagcggcctgagcctggccttcgacggcgacagcttcgtgagactgagagtgcccgccgcctacgccgccagcctgtgcggcctgtgcggcaactacaaccaggaccccgccgacgacctgaaggccgtgggcggcaagcccgccggctggcaggtgggcggcgcccagggctgcggcgagtgcgtgagcaagccctgccccagcccctgcacccccgagcagcaggagagcttcggcggccccgacgcctgcggcgtgatcagcgccaccgacggccccctggccccctgccacggcctggtgccccccgcccagtacttccagggctgcctgctggacgcctgccaggtgcagggccaccccggcggcctgtgccccgccgtggccacctacgtggccgcctgccaggccgccggcgcccagctgggcgagtggagaagacccgacttctgccccctgcagtgccccgcccacagccactacgagctgtgcggcgacagctgccccgtgagctgccccagcctgagcgcccccgagggctgcgagagcgcctgcagagagggctgcgtgtgcgacgccggcttcgtgctgagcggcgacacctgcgtgcccgtgggccagtgcggctgcctgcacgacggcagatactaccccctgggcgaggtgttctaccccggccccgagtgcgagagaagatgcgagtgcggccccggcggccacgtgacctgccaggagggcgccgcctgcggcccccacgaggagtgcagactggaggacggcgtgcaggcctgccacgccaccggctgcggcagatgcctggccaacggcggcatccactacatcaccctggacggcagagtgtacgacctgcacggcagctgcagctacgtgctggcccaggtgtgccaccccaagcccggcgacgaggacttcagcatcgtgctggagaagaacgccgccggcgacctgcagagactgctggtgaccgtggccggccaggtggtgagcctggcccagggccagcaggtgaccgtggacggcgaggccgtggccctgcccgtggccgtgggcagagtgagagtgaccgccgagggcagaaacatggtgctgcagaccaccaagggcctgagactgctgttcgacggcgacgcccacctgctgatgagcatccccagccccttcagaggcagactgtgcggcctgtgcggcaacttcaacggcaactggagcgacgacttcgtgctgcccaacggcagcgccgccagcagcgtggagaccttcggcgccgcctggagagcccccggcagcagcaagggctgcggcgagggctgcggcccccagggctgccccgtgtgcctggccgaggagaccgccccctacgagagcaacgaggcctgcggccagctgagaaacccccagggccccttcgccacctgccaggccgtgctgagccccagcgagtacttcagacagtgcgtgtacgacctgtgcgcccagaagggcgacaaggccttcctgtgcagaagcctggccgcctacaccgccgcctgccaggccgccggcgtggccgtgaagccctggagaaccgacagcttctgccccctgcactgccccgcccacagccactacagcatctgcaccagaacctgccagggcagctgcgccgccctgagcggcctgaccggctgcaccaccagatgcttcgagggctgcgagtgcgacgacagattcctgctgagccagggcgtgtgcatccccgtgcaggactgcggctgcacccacaacggcagatacctgcccgtgaacagcagcctgctgaccagcgactgcagcgagagatgcagctgcagcagcagcagcggcctgacctgccaggccgccggctgcccccccggcagagtgtgcgaggtgaaggccgaggccagaaactgctgggccaccagaggcctgtgcgtgctgagcgtgggcgccaacctgaccaccttcgacggcgccagaggcgccaccaccagccccggcgtgtacgagctgagcagcagatgccccggcctgcagaacaccatcccctggtacagagtggtggccgaggtgcagatctgccacggcaagaccgaggccgtgggccaggtgcacatcttcttccaggacggcatggtgaccctgacccccaacaagggcgtgtgggtgaacggcctgagagtggacctgcccgccgagaagctggccagcgtgagcgtgagcagaacccccgacggcagcctgctggtgagacagaaggccggcgtgcaggtgtggctgggcgccaacggcaaggtggccgtgatcgtgagcaacgaccacgccggcaagctgtgcggcgcctgcggcaacttcgacggcgaccagaccaacgactggcacgacagccaggagaagcccgccatggagaagtggagagcccaggacttcagcccctgctacggctag

SEQ ID NO: 141782 - DNA, 16218 bp, Artificial Sequence
  derived and/or modified sequence
atgggggcgctgtggtcatggtggatcctgtgggcaggcgccacccttctttgggggttgacacaagaggcctccgtcgacttgaagaatactggtcgggaggaatttctgacagctttcctccagaattaccagttggcgtatagcaaggcgtaccccagactgctgatcagctccctatctgagtcccccgcttccgtctccattctatcacaggccgacaatacctctaaaaaggttacagtgcgccctggggagtcagtgatggtgaatattagtgcaaaagccgagatgataggtagtaagatctttcaacatgccgtggtgatacattctgattacgccatatccgttcaggcgctgaatgccaagcctgataccgccgagttgacactcctcagaccaatacaggcgcttggtaccgaatacttcgtcttgacgcctcccgggactagtgccagaaatgtgaaagagtttgcggtcgtggccggtgctgctggcgcctctgtatcagtgacactgaaaggaagtgttacatttaatgggaagttctaccccgcaggtgatgtccttagggtgaccctgcagccatacaacgtggctcagctgcagagtagcgtggatctttccgggtctaaagtgaccgccagcagtcccgtggcagtcctgtcagggcattcctgcgcccagaagcatacaacatgcaatcacgtagttgagcagctgcttcccactagtgcttggggcacccattacgtggttcccaccctagcatctcagtcgaggtatgatctagcattcgtggtggcttcccaggccactaaactaacgtacaaccatggcgggatcacaggctctagaggcctgcaggccggcgacgtggttgaatttgaagtgaggccgtcctggcccctctacctcagtgctaacgttggcatccaggtgcttttatttggcacgggtgctatccgcaacgaagtcacttatgatccatacctggtgttgatcccggatgtagctgcttactgcccagcctacgtggtgaagagcgtccctgggtgcgagggcgttgctttagtggttgctcagaccaaagcaataagcggcctgacaattgatggtcacgctgtaggagcaaaactcacctgggaagccgtgccgggcagtgagttctcttacgctgaggttgagttaggaacggcggatatgatacacacagccgaagctaccacaaacctgggccttttaacattcggcctcgctaaggccatcggctatgctaccgcagcagattgcggacgaacagtactgagccctgttgaaccctcctgtgagggcatgcagtgcgctgccggacagcgatgtcaagtcgtggggggtaaagctgggtgcgtcgcggagtccacagctgtatgccgggcacagggcgatcctcactataccaccttcgatgggagacggtacgacatgatgggcacctgctcctacactatggttgaactctgctctgaagatgacacccttccagcgttctcggtggaagcaaagaatgaacacagaggtagcagacgtgtgtcttatgttggcctggttacagttagagcatacagtcatagtgtgagcttgacccggggagaggtgggatttgtacttgttgataaccagagaagtagacttcctgtgtccctctctgaaggtagactccgcgtatatcaatcaggacctagagcagtggtggaactcgtatttgggcttgtggtcacatacgattgggactgccaactcgcgctgagccttccagctcgctttcaggaccaggtctgtggactctgtggcaactacaatggtgaccctgctgacgattttctgaccccagatggcgctctggcaccggacgcagtggagttcgcttcttcttggaagctggatgacggcgattatctttgcgaggatgggtgccagaacaactgcccagcctgcacccctggacaggctcagcattatgagggggaccggctgtgcggtatgctgacaaagctggatgggccattcgctgtctgccacgatacactcgaccccagaccattcctggaacaatgtgtctacgatctgtgcgtggtggggggggaacgccttagtttgtgtcgcggcctttccgcctacgcacaggcttgtctggagcttggtatttctgttggcgactggcgctctccagccaattgcccattgtcttgtcccgccaactctcgctatgagttgtgcggacccgcatgtccgacttcttgcaatggggcggctgcaccgtctaattgttcaggccgcccatgcgtagagggatgtgtttgtctgcccggattcgtcgccagcgggggtgcctgtgtgccggcttccagctgcggctgtacattccagggcctgcaattagcccctgggcaagaagtgtgggccgacgagctctgtcaaagacgctgtacatgtaacggtgctacccaccaggtcacttgtagggataaacagagctgccctgccggcgagaggtgctcagtgcaaaacggactgcttggttgctatcctgaccgtttcgggacgtgccagggatccggcgacccccattatgtcagtttcgacgggagacgcttcgacttcatggggacatgcacctatctgctagtgggctcctgcgggcagaatgccgccctccccgcattccgcgttctcgtggaaaacgaacaccgtggctctcagacggtgagctacaccagagccgtgagggtagaggccaggggggtgaaagttgcagtgcgtcgggaatatcccggacaggtgttggtagatgacgtgctacagtacctccccttccaggccgccgatggtcaagtccaggtatttcggcagggacgggatgctgtggtgcgaaccgatttcggacttacagtcacctacgattggaatgcaagagtgaccgctaaggtccccagtagctacgcagaggcactctgcgggctatgtggaaactttaatggggaccccgctgacgatttggcactgcgcggaggtggccaagccgccaacgcactcgcgttcggcaacagctggcaggaagagacacgcccagggtgcggtgcaaccgagcctggcgactgccctaagttggactctctggtcgcacagcagctacagtctaaaaacgaatgtggaatcctcgcagatcccaagggtccatttcgcgagtgtcacagtaaacttgacccgcagggagccgtacgggactgcgtgtacgataggtgtctgctgcctggacagtctgggcctctgtgcgacgccttggccacctacgcggctgcgtgccaggccgccggggctactgtccacccctggcgaagtgaggagctctgcccattgagctgtcctccccactcgcactatgaagcttgtagctacgggtgcccgctaagctgcggagacctacccgtgcctggcggttgcggcagcgagtgtcacgagggctgcgtgtgcgacgagggatttgccctgagcggcgaaagttgcctacctttggcctcctgtggctgtgtgcatcagggcacttatcacccacccgggcagacattctatccagggccaggatgcgactcattgtgtcattgccaagagggagggcttgtgtcatgcgaaagctcttcatgtggccctcacgaagcatgtcaaccatctggaggttcactcggttgtgtggctgtgggaagtagcacctgtcaagcatccggtgacccacactacactacattcgatggcaggcgctttgattttatgggcacgtgtgtctacgtcctcgcccagacttgtgggaccagaccagggctgcatcgttttgcggtactccaggagaatgtggcctggggaaatggtcgggtgtccgtgactcgcgtgatcaccgtgcaggtggcaaacttcactcttagacttgaacagcgccagtggaaggtgactgtgaatggcgtagacatgaagttacccgtcgtgcttgcaaatgggcagataagggcgagtcaacatggctccgacgtggtgatcgagacagattttggattacgggtagcctatgacctggtgtactacgtcagagtgacggtgccgggcaattactatcaacagatgtgcggactctgcggaaattataatggcgatccaaaggatgactttcagaaacccaacggctctcaagcaggcaacgcaaacgagtttgggaattcatgggaggaggtcgtccctgattctccgtgtctgcccccgacaccgtgcccacccggcagtgaggactgtattcccagccataagtgcccaccagaactggaaaagaagtatcaaaaggaggaattctgtggtcttctttcctccccaactggcccgctgtcatcatgtcacaaattagtggacccccaggggccactgaaggattgtatatttgatctgtgtctcggggggggcaacctcagcatcctgtgtagtaatattcacgcctacgtaagtgcatgtcaggccgctggcggtcatgtggagccctggcgaaccgaaaccttctgcccgatggaatgtccccctaactcacattatgaattatgcgccgatacttgctcccttggctgttcggctctgagcgcgccgccacagtgccaagatggatgtgctgaggggtgtcagtgtgatagcgggtttttgtacaacggtcaggcctgtgtccctatccaacagtgcgggtgctatcataacggcgtgtactacgagcctgaacagacagtccttatcgacaattgtaggcagcaatgtacctgtcatgccggtaaggggatggtttgtcaagaacattcttgtaagccaggccaggtatgtcagcccagcggggggatactcagctgcgtgaccaaggacccttgccacggcgtaacctgccggccgcaggaaacgtgcaaggaacagggagggcagggagtctgtcttcccaactatgaagctacgtgttggctctggggggatccgcactaccatagctttgatggaagaaagtttgattttcaaggaacgtgcaactatgtgttggcgacaaccggctgccctggagtcagtactcagggactgacacccttcactgtgacgaccaaaaatcagaataggggaaatccagccgtgtcctacgtgagggttgttacagtggcagccctaggtacaaacattagcattcacaaagacgagattggtaaggtgagggtcaacggggtactgaccgcactgcccgttagtgtggccgatgggcgcatatctgttacccaaggagcgtccaaggctctgcttgtcgccgattttggattgcaggtgagttacgactggaactggagagtggatgtcaccctcccaagctcctatcatggggcagtgtgtggcctgtgcggaaacatggaccgcaacccaaataatgatcaggtgtttcctaacgggacacttgcaccatccattccaatctgggggggaagttggcgagcaccaggctgggaccccctctgctgggacgagtgtcgcggaagctgcccaacttgcccagaggataggctggagcagtacgaggggcccggcttctgtggccctcttgctcccggtaccggcggcccctttactacttgccacgctcacgtgcccccagagtccttctttaagggatgtgtcttggacgtgtgtatgggcggcggagatcgggacattctttgcaaagccctagccagctacgtagctgcatgccaggcggccggagtcgtgattgaagactggcgcgcgcaagtgggctgtgagattacgtgtccagaaaatagccattacgaggtgtgcggaagcccctgccccgcctcatgccccagccctgcgccactgactacccctgctgtgtgcgagggaccttgtgtagaagggtgtcagtgcgacgcaggcttcgtgttgtctgctgatcggtgtgtgccactgaataatggttgcggctgctgggctaacggcacttatcacgaagccggttccgaattttgggccgacggaacatgcagccagtggtgccgctgcggcccgggaggagggtccctagtgtgtacccccgccagttgcggactgggtgaggtgtgcgggcttttgccgagtgggcagcatggatgtcagcccgtgtccacagccgagtgtcaagcctggggcgacccacattatgtgactctggatggccatagattcaatttccagggtacatgcgagtacttattgagcgccccttgccatggcccccctctgggcgccgaaaattttacagttaccgtagccaatgaacacagagggtcccaggcagtgtcctatactagatctgtcacactacaaatttacaatcacagcctgacactgagtgcccgatggccccgtaagctgcaagtcgacggggtcttcgttactctcccattccaactggattctctcctgcacgcccatctcagtggcgccgatgtggtggtgaccactacgagcggtctcagcttggccttcgatggggattctttcgtgaggctgagagtacccgcagcctatgctggatccctgtgtgggttgtgtggaaattacaaccaggatcctgctgacgacctgaaggcggttggaggtaagccggcagggtggcaggttgggggtgcacaagggtgcggagaatgtgtgagcaagccttgcccctccccttgcacaccggagcagcaggagtcattcggcgggccagacgcctgtggggtcatcagcgcaaccgacggaccactcgctccgtgccacggtctggtgccccctgcccagtatttccaggggtgcctacttgatgcatgtcaagtgcagggtcaccctggcggactgtgtcccgccgtggctacctatgtcgctgcatgccaagccgccggagctcagctccgcgagtggcggcgacctgatttttgccccttccagtgccccgcccacagccactacgagctgtgtggcgacagttgtcctgggtcctgccccagtctttccgctccagaaggctgtgagtccgcttgcagggaaggctgcgtgtgcgacgccgggtttgtgcttagtggcgatacttgcgtaccagtgggccaatgcggttgtcttcacgacgaccggtattatcctctgggccagacgttctaccctggccccggatgtgacagcctctgtcggtgcagagaaggtggggaagtgtcttgtgagccaagctcatgcgggccacatgagacatgtcgtccatccggtggatcgttgggctgcgtcgccgtaggaagtaccacctgtcaggcatccggagatccacactacaccactttcgatggccgaagattcgacttcatgggcacgtgtgtatacgtgctggcccaaacatgcgggaccaggcctgggctgcaccgattcgcagtcctccaagagaacgtggcctgggggaacggtcgcgtgtctgtaactcgtgtcatcactgtgcaagttgccaactttactctacgcctcgaacagagacagtggaaagtaactgtgaacggtgtcgacatgaagcttcccgtcgttctggcaaatggacaaatccgtgcaagtcagcatgggtctgatgtagtgattgaaactgactttggcttgcgagtggcgtacgacctggtctactacgtccgcgtgacagttcctgggaattattaccagctgatgtgcggtctctgcggcaactataacggcgacccaaaagacgatttccaaaagccgaatggttctcaggccggcaacgccaacgaatttggcaattcttgggaagaagtggtccccgacagcccatgtctgccccccccgacttgcccacccgggtctgaaggttgcatacctagcgaggagtgtccacccgaactggaaaagaagtatcagaaagaagaattttgcgggctgctgagctcacccacaggcccactttcttcttgtcataagctcgtggaccctcaaggccctctgaaagattgcatatttgacttgtgtctgggcggaggcaacctcagcatcctatgttcaaacatccacgcttacgtgtccgcctgtcaggctgctggaggccaggtggaaccctggcggaacgagaccttctgtcccatggagtgcccacaaaattctcactatgagctctgcgctgatacctgcagtttggggtgttctgcgttatcagcccccctccaatgcccagacggttgtgctgagggatgtcagtgcgattctggcttcctatacaatggccaggcatgtgtccctattcaacagtgcggatgttaccataatggggcctactatgaaccagaacaaaccgtgctaatcgacaattgcaggcaacagtgtacttgtcatgtcggcaaggtggttgtgtgtcaagaacattcttgtaaaccggggcaggtgtgccagccatctggaggaatcctgtcttgcgtgaataaagatccctgtcacggcgttacctgtcggcctcaggaaacatgcaaagagcagggaggccaaggcgtgtgtctacctaactatgaggcaacctgttggttgtggggagatccgcactaccattctttcgacggccgaaagtttgacttccagggcacatgtaactacgtactggcaacgacaggctgtcctggggtgtccacacagggtcttaccccgttcaccgtgaccactaagaatcagaataggggtaaccccgcggtgtcatacgtgcgtgtcgttacggtcgcagccctcggaaccaatatcagcattcataaagatgaaattggaaaggtgagggtgaatggagtcctcaccgccctcccagtatctgtggcagacggaaggatatccgttacacagggagcatctaaggctcttctggttgctgattttgggctccaagttagctatgattggaactggagagttgatgtgacgcttccttccagctaccacggggctgtctgtgggctgtgcgggaacatggaccgaaaccctaataatgaccaagtcttcccaaacgggaccctagcaccgtccatccccatttggggcgggtcatggagagcccccggctgggaccccctgtgttgggatgagtgcagggggtcttgtcccacatgtcctgaggacaggctcgagcaatacgaagggcctggtttctgtggccctctggcgccgggcacgggtgggccctttacaacctgccacgctcatgtgcctccagagagcttttttaaaggatgtgtgctggatgtctgcatggggggcggggaccgcgacatcctctgcaaggccctggcaagttatgtggcagcatgtcaggcagctggcgttgtcatcgaggactggagggcgcaagtgggctgcgagataacatgccccgaaaactcacactacgaagtttgtggacccccttgtccagccagctgcccatcaccagcgcctcttactactcccgctgtgtgtgagggcccttgcgtcgaaggatgccaatgcgatgcgggattcgttctgtctgccgatcgctgtgtccccctgaataacggctgtgggtgctgggcaaacggaacttaccacgaggccggctcagaattctgggcagacggcacatgcagccagtggtgtagatgcgggcccggaggagggtccctcgtgtgcactcccgcgtcatgcggtcttggggaggtctgtgggcttttaccaagcggtcaacatggttgtcagccagtgtccacagcagaatgccaggcttggggggatccccattatgtgaccctggacggacacagattcgactttcagggcacctgtgagtacctcctgtcagccccctgccacgggccaccattgggcgcagaaaacttcacagtgaccgtcgccaatgaacaccggggcagtcaggccgtcagttacacccgcagcgtcaccttgcagatctacaatcactctctgactctgtctgcccggtggcccaggaaactccaggtggacggagtgttcgttacccttccttttcagctggattcgcttttacatgcccacctctcaggcgcagacgttgtagtgactacaaccagtggattaagccttgcttttgacggtgattcttttgtcagactgcgggtccctgccgcatacgcagggtctttatgcggcctttgcggcaattacaatcaggatccggctgatgatctcaaggctgtcggaggaaaacccgccggctggcaggtcgggggcgcgcagggctgcggcgaatgtgtcagtaagccgtgcccctccccttgtacacccgagcagcaggagtcctttgggggtcccgacgcatgcggagtgatctcagcaactgacgggcccctggcaccttgtcacggacttgtgccccctgctcaatactttcagggatgcttgcttgatgcttgtcaggtccagggccaccccggaggcctgtgccctgcagtcgcaacatatgttgctgcttgtcaggccgcaggagctcagctgagggaatggaggcgccccgacttctgtccttttcaatgtccagcccacagtcattacgagctgtgtggagactcatgccccgggtcatgtccttctttgagtgcccccgaggggtgcgagagcgcgtgcagagaaggctgtgtctgcgacgccggcttcgtgcttagtggtgacacctgcgtcccggtaggtcaatgtggctgcctgcacgatgaccggtactacccactgggccagactttttacccaggaccaggctgcgacagcctgtgccgctgcagggaagggggggaggtgtcctgtgagccctccagctgtggacctcatgagacttgccggccatctggaggctcccttgggtgtgtggctgtcggatcaaccacctgccaggcctcaggtgatccccactatacaaccttcgacggccaccggttcgactttatgggaacttgcgtttacgtattagcacagacatgtgggacaaggcccggcctacataggttcgcagtcctgcaggaaaacgtggcctggggaaatggaagagtgtcggtgacacgcgtaattaccgttcaagtcgctaactttactcttcgtttggaacagcggcagtggaaggtgactgtgaatggagttgacatgaagctcccagtggttctggcaaatggacagattcgggccagtcagcacgggtctgatgtagtaattgaaacagactttgggctgagagtggcgtatgacttggtgtactatgtgcgggttaccgtgccaggtaactactatcagctgatgtgcggcctatgcggaaattacaatggcgacccaaaggacgatttccagaagcctaacggatcgcaggctggaaacgctaatgaatttgggaattcctgggaagaggtcgtgcctgactccccctgtctacctcctcccacatgtccccccggcagcgccgggtgcatcccctccgataagtgcccacctgagctcgaaaaaaagtatcaaaaggaggagttctgcggcttactgagctctcccaccggaccattgtcctcatgccataagcttgttgaccctcaaggaccactgaaggactgtatcttcgatctatgtctcgggggaggaaatctgagtatcctctgttccaatatacacgcatacgtatccgcgtgtcaggcggcaggcgggcacgtagaaccttggaggaacgaaacgttttgcccaatggagtgtccccaaaactcccactatgagttatgcgcagacacgtgtagcttagggtgcagcgccctctctgctccgttgcagtgtcccgacggatgcgcggagggatgtcagtgcgactcaggctttttatacaacggacaagcctgtgtacctatacagcagtgtggctgctatcacaatggcgtctattatgagcctgagcagactgtcctcattgataattgtcgacagcagtgtacctgtcatgtgggaaaggttgtggtgtgccaggaacatagttgcaagccgggccaggtctgccagccttctggtggcattctaagttgcgttaccaaggacccctgccacggagtaacctgtcgcccccaagaaacctgcaaggaacagggaggacagggagtgtgccttccaaattatgaagctacctgttggctgtggggcgatcctcactatcactcctttgatggacgcaagttcgattttcagggaacctgcaattatgtcctcgctacaacaggatgtccgggcgtctcaacccagggtctgacgcctttcaccgtgaccaccaaaaaccagaatcggggcaaccccgcggtcagctacgtccgggttgtaactgtagcagctctgggcaccaacatttccatccacaaagacgaaatcggaaaggtgagagtgaatggagtgctgacagccttgcctgtaagtgtggcggacggtaggatctcagtcgcccagggcgcaagcaaggccctgttagttgccgattttggccttcaggtatcttacgattggaactggcgagtcgatgtgactctgccctcttcctatcacggagcggtttgtggactgtgcgggaatatggaccgcaatccaaacaatgaccaggtcttccctaatggaacactagctccttccatcccaatttgggggggtagttggcgcgcacctgggtgggaccctctctgttgggacgaatgtagagggtcttgtcccacctgccccgaggatcggctcgagcagtacgaggggccgggtttttgcggtccattatccagtgggaccggggggccgttcacaacatgtcatgcccacgttccgccggagtcttttttcaagggatgcgttcttgacgtgtgtatggggggcggcgaccgcgatattttatgcaaagctctggcttcatatgtcgcggcatgtcaggcagccggagtcgtgatagaggattggcgtgcgcaggtcggatgtgagattacttgccccgaaaattcccattacgaagtgtgcggacctccctgtcccgccagctgcccttcaccagccccactcacaaccccggctgtgtgcgaaggcccctgtgtggaaggatgccagtgcgatgccgggtttgtgctgagcgccgaccggtgtgtccccctaaataacggttgcggatgctgggccaatgggacataccacgaggctggttcagaattttgggctgacggcacatgttctcagtggtgcaggtgcggcccagggggcggaagcctcgtgtgcactccagccagttgcggactcggcgaagtgtgcgggcttctgccgtccggccagcatggctgccagcccgtgagtaccgccgaatgccaggcttggggagaccctcactatgttactctggatggccatcggtttgatttccaaggtacctgtgagtatttgctgagtgccccctgtcacggcccccccctgggtgccgagaactttacagtgacggtcgctaacgaacaccggggtagccaagctgtttcgtatactaggagtgtcaccttgcaaatctacaaccactccctgactctgtctgcacggtggccaagaaaacttcaggttgacggcgtgtttgttgcactgccattccaacttgactctcttcttcatgcccacctatcgggtgccgacgtggtggtcaccaccacctcagggctttcacttgcgttcgacggcgacagctttgtcaggttgagagtgcctgcggcgtatgccgcctccctttgcgggctgtgcggcaactataaccaagaccctgcagatgacctcaaggctgtgggaggcaaacccgccggctggcaggtgggaggtgcccagggttgcggagaatgcgtcagtaaaccatgtccctccccctgcactcccgaacaacaggagagctttggtgggccggatgcctgcggagtgattagtgcaaccgatggtccccttgcaccctgccatggcttggtgccacctgcccaatacttccagggttgtttattagatgcgtgtcaagtgcagggacatcctggaggcctctgtccggcagtcgcaacttacgttgccgcctgtcaggccgcaggtgcccagctgggtgagtggagaagacccgatttttgtccattgcagtgtcctgcacactcacactatgaactgtgtggagattcttgccccgtcagttgtccaagcctgagcgcccccgaggggtgtgagtcagcttgcagggaaggctgcgtttgcgacgctggcttcgtgcttagcggagacacctgcgtaccagttggccagtgcggttgcctgcacgacgggaggtactacccattgggcgaagtcttctacccgggaccagagtgtgaaaggagatgtgagtgtggtcctgggggccacgttacatgtcaggaaggcgcggcgtgcgggcctcatgaggagtgtagactcgaggatggcgtacaggcttgtcacgccactggttgtgggcgatgtctggccaacggaggcatccattatataacattggatggtcgggtatacgatctgcatggatcgtgtagctatgtcttggctcaagtgtgccaccctaaaccgggcgatgaggacttctcgattgtgctggagaaaaacgccgccggtgatttacagcgtcttctggtcacagttgccgggcaggtagtctctctggcgcagggccagcaggtgactgtggatggcgaggccgtagccctgcctgtggctgtcgggcgggtccgcgtgacagccgagggacgaaacatggtcctgcagacgactaaggggttaaggctgttatttgatggagatgctcacctattaatgagtataccttctccattccggggaaggctgtgcggactttgtgggaattttaacgggaactggtctgatgatttcgtactccccaacggatctgcggctagttcagtagagacattcggggccgcctggcgcgcgccaggtagttccaaaggctgtggagagggatgtggcccccagggatgccctgtgtgccttgctgaggaaaccgccccatatgaaagtaacgaagcatgtggccaactacggaaccctcagggaccatttgccacatgtcaagcagtattgtctccctccgagtattttaggcagtgcgtgtacgacctctgtgctcagaagggcgacaaggcttttctttgccggtctttggcagcctacactgccgcttgccaggcagccggggttgctgtaaaaccctggcggaccgactccttctgtccactccactgtcccgcccactcccactattcgatctgcacccggacttgtcagggttcttgtgccgccctctcaggtttaaccgggtgcactacaaggtgttttgagggttgtgaatgtgatgatcgcttcctgctgagccagggtgtgtgtatacctgtgcaggactgtggctgcacccataacgggcgctacctccccgtcaattcgagcctgctcacctcagattgcagtgagcgctgttcttgcagctcatctagtggcctgacttgccaggccgccggatgtccaccagggcgggtatgtgaggtgaaagctgaggcccgtaactgttgggctacccgcggtctttgtgtcctgagtgtcggcgctaatttaacgactttcgacggggccagaggggccacgacgtctccaggagtttatgaactatcgtccagatgtccggggctgcagaataccattccttggtaccgggtcgttgcagaagtgcagatctgtcatggaaagaccgaggcagtcggacaggtccacattttctttcaagatggtatggtaacactcacaccgaataaaggagtctgggtcaatggcctgagagtggacctgcctgctgagaagctcgcttccgtaagcgtttctcgtacgcctgatggttcgctcctggtacggcagaaagctggcgtgcaagtgtggctgggagctaatggcaaagtggctgtaatcgtgtcaaacgaccacgctggcaagctttgcggtgcctgcgggaactttgacggggatcaaaccaacgactggcatgactcccaggagaagcctgcaatggaaaagtggcgggctcaggacttctccccttgctatgggtag

SEQ ID NO: 141783 - DNA, 16218 bp, Artificial Sequence
  derived and/or modified sequence
atgggcgccctgtggagctggtggatcctgtgggccggggccaccctgctgtggggcctgacccaggaggcctctgtggacctgaagaacacaggccgggaggagttcctgacagccttcctgcagaactaccagctggcctacagcaaggcctacccccggctgctgatcagcagcctgtctgagagccctgcctctgtgtccatcctgagccaggccgacaacaccagcaagaaggtgacagtgcggcctggagagagcgtgatggtgaacatcagcgccaaggccgagatgattggcagcaagatcttccagcacgctgtggtgatccacagcgactatgccatctctgtgcaggccctgaatgccaagccagacacagctgagctgaccctgctgcggcccatccaggccctgggcacagagtactttgtgctgaccccacctggcaccagcgccagaaatgtgaaggagtttgctgtggtggccggggccgccggggcctctgtgtctgtgaccctgaagggctctgtgaccttcaacgggaagttctacccagctggagatgtgctgcgggtgaccctgcagccctacaacgtggcccagctgcagagctctgtggacctgagcggcagcaaggtgacagccagcagccctgtggccgtgctgagcggccacagctgtgcccagaagcacaccacctgcaaccacgtggtggagcagctgctgcccaccagcgcctggggcacccactacgtggtgcccaccctggccagccagagccgctatgacctggcctttgtggtggccagccaggccaccaagctgacctacaaccacggcggcatcaccggcagccggggcctgcaggccggagatgtggtggagtttgaggtgcggcccagctggcccctgtacctgagcgccaacgtgggcatccaggtgctgctgtttggcaccggggccatcagaaatgaggtgacctatgacccctacctggtgctgatcccagatgtggccgcctactgcccagcctacgtggtgaagtctgtgcccggctgtgagggcgtggccctggtggtggcccagaccaaggccatcagcggcctgaccattgatggccatgctgtgggcgccaagctgacctgggaggccgtgcccggcagcgagttctcctatgcagaggtggagctgggcacagctgacatgatccacacagctgaggccaccaccaacctgggcctgctgaccttcggcctggccaaggccatcggctacgccacagctgctgactgtggccgcacagtgctgagccctgtggagcccagctgtgagggcatgcagtgtgccgccggccagcgctgccaggtggtgggcggcaaggccggctgtgtggccgagagcacagctgtgtgccgggcccagggcgacccccactacaccacctttgatggccgccgctatgacatgatgggcacctgcagctacaccatggtggagctgtgcagtgaagatgacaccctgcctgccttctctgtggaggccaagaatgagcaccggggcagcagaagagtgtcctatgtgggcctggtgacagtgcgggcctacagccacagcgtgtccctgaccagaggagaggtgggctttgtgctggtggacaaccagaggagccggctgcctgtgtccctgtctgagggccgcctgcgggtgtaccagagcggccccagggctgtggtggagctggtgtttggcctggtggtgacctatgactgggactgccagctggccctgagcctgcctgcccgcttccaggaccaggtgtgtggcctgtgtggcaactacaatggagaccctgcagatgacttcctgaccccagatggagccctggccccagatgctgtggagtttgccagctcctggaagctggatgatggagactacctgtgtgaagatggctgccagaacaactgcccagcctgcaccccaggccaggcccagcactatgaaggagaccggctgtgtggcatgctgaccaagctggatggcccctttgctgtgtgccacgacaccctggacccccggcccttcctggagcagtgtgtgtatgacctgtgtgtggtgggcggggagcggctgagcctgtgccggggcctgagcgcctatgcccaggcctgcctggagctgggcatctctgtgggggactggaggagccctgccaactgccccctgagctgcccagccaacagccgctatgagctgtgtggccctgcctgccccaccagctgcaatggagctgctgcccccagcaactgcagcggccggccctgtgtggagggctgtgtgtgcctgcccggctttgtggccagcggcggggcctgtgtgcctgccagcagctgtggctgcaccttccagggcctgcagctggcccctggccaggaggtgtgggcagatgagctgtgccagaggcgctgcacctgcaatggagccacccaccaggtgacctgccgggacaagcagagctgcccagctggggagcgctgcagcgtgcagaatggcctgctgggctgctacccagacagatttggcacctgccagggcagcggggacccccactacgtgtcctttgatggccgccgctttgacttcatgggcacctgcacctacctgctggtgggcagctgtggccagaatgctgccctgcctgccttccgggtgctggtggagaatgagcaccggggcagccagacagtgtcctacaccagggctgtgcgggtggaggcccggggcgtgaaggtggccgtgagaagagagtacccaggccaggtgctggtggatgatgtgctgcagtacctgcccttccaggccgcagatggccaggtgcaggtgttccggcagggcagagatgctgtggtgaggacagactttggcctgactgtgacctatgactggaatgcccgggtgacagccaaggtgcccagcagctatgcagaggccctgtgtggcctgtgtggcaacttcaatggagaccctgcagatgacctggccctgcggggcggcggccaggccgccaatgccctggccttcggcaacagctggcaggaggagacccggcccggctgtggggccacagagcccggggactgccccaagctggacagcctggtggcccagcagctgcagagcaagaatgaatgtggcatcctggccgaccccaagggccccttccgggagtgccacagcaagctggacccccagggcgctgtgcgggactgtgtgtatgaccgctgcctgctgcccggccagagcggccccctgtgtgatgccctggccacctatgctgctgcctgccaggccgccggggccaccgtgcacccctggaggtctgaggagctgtgccccctgagctgccccccccacagccactatgaggcctgcagctatggctgccccctgagctgtggggacctgcctgtgcctgggggctgcggctctgaatgtcatgagggctgtgtgtgtgatgagggctttgccctgtctggagagagctgcctgcccctggccagctgtggctgtgtgcaccagggcacctaccaccccccaggccagaccttctacccaggccctggctgtgacagcctgtgccactgccaggagggcggcctggtgtcctgtgagagcagcagctgtggcccccatgaggcctgccagcccagcggcggcagcctgggctgtgtggccgtgggcagcagcacctgccaggccagcggggacccccactacaccacctttgatggccgccgctttgacttcatgggcacctgtgtgtatgtgctggcccagacctgtggcacccggcccggcctgcacagatttgctgtgctgcaggagaatgtggcctggggcaatggccgggtgtctgtgaccagggtcatcaccgtgcaggtggccaacttcaccctgcggctggagcagaggcagtggaaggtgacagtgaatggagtggacatgaagctgcctgtggtgctggccaacggccagatccgggccagccagcacggcagtgatgtggtgattgaaacagactttggcctgcgggtggcctatgacctggtgtactacgtgcgggtgacagtgcccggcaactactaccagcagatgtgtggcctgtgtggcaactacaacggggaccccaaggatgacttccagaagcccaacggcagccaggccggaaatgccaatgaatttggaaacagctgggaggaggtggtgcctgacagcccctgcctgccccccaccccctgccccccaggcagcgaggactgcatccccagccacaagtgccccccagagctggagaagaagtaccagaaggaggagttctgtggcctgctgagcagccccaccggccccctgagcagctgccacaagctggtggacccccagggccccctgaaggactgcatctttgacctgtgcctgggcggcggcaacctgagcatcctgtgcagcaacatccacgcctacgtgtctgcctgccaggccgccggcggccacgtggagccctggaggacagagaccttctgccccatggagtgcccccccaacagccactatgagctgtgtgccgacacctgcagcctgggctgcagcgccctgagcgccccaccccagtgccaggacggctgtgccgagggctgccagtgtgacagcggcttcctgtacaacggccaggcctgtgtgcccatccagcagtgtggctgctaccacaacggggtgtactatgagcctgagcagacagtgctgattgacaactgccggcagcagtgcacctgccacgccggcaagggcatggtgtgccaggagcacagctgcaagccaggccaggtgtgccagcccagcggcggcatcctgagctgtgtgaccaaggacccctgccacggcgtgacctgccggccccaggagacctgcaaggagcagggcggccagggcgtgtgcctgcccaactatgaggccacctgctggctgtggggagacccccactaccacagctttgatggcaggaagtttgacttccagggcacctgcaactacgtgctggccaccaccggctgccctggggtgtccacccagggcctgacccccttcaccgtgaccaccaagaaccagaacagaggcaacccagctgtgtcctatgtgcgggtggtgacagtggccgccctgggcaccaacatcagcatccacaaggatgaaattggcaaggtgcgggtgaatggagtgctgacagccctgcctgtgtctgtggctgatggccgcatctctgtgacccagggcgccagcaaggccctgctggtggccgactttggcctgcaggtgtcctatgactggaactggagggtggatgtgaccctgcccagcagctaccacggggctgtgtgtggcctgtgtggcaacatggacaggaaccccaacaatgaccaggtgttccccaacggcaccctggcccccagcatccccatctggggcggctcctggagggcccctggctgggaccccctgtgctgggatgagtgccggggcagctgccccacctgcccagaggaccggctggagcagtatgagggccctggcttctgtggccccctggcccctggcactggaggccccttcaccacctgccacgcccacgtgcccccagagagcttcttcaagggctgtgtgctggatgtgtgcatgggcggcggggaccgggacatcctgtgcaaggccctggccagctatgtggccgcctgccaggccgccggcgtggtgattgaggactggagggcccaggtgggctgtgagatcacctgcccagagaacagccactatgaggtgtgtggcagcccctgcccagccagctgccccagccctgcccccctgaccaccccagctgtgtgtgagggcccctgtgtggagggctgccagtgtgatgctggctttgtgctgtctgctgacagatgtgtgcccctgaacaacggctgcggctgctgggccaacggcacctaccacgaggccggcagcgagttctgggcagatggcacctgcagccagtggtgccgctgtggccctgggggcggcagcctggtgtgcaccccagccagctgtggcctgggggaggtgtgtggcctgctgcccagcggccagcacggctgccagcctgtgtccacagctgagtgccaggcctggggagacccccactacgtgaccctggatggccaccgcttcaacttccagggcacctgtgagtacctgctgagcgccccctgccacggcccccccctgggcgctgagaacttcaccgtgacagtggccaatgagcaccggggcagccaggccgtgtcctacaccaggtctgtgaccctgcagatctacaaccacagcctgaccctgagcgcccgctggcccaggaagctgcaggtggatggagtgtttgtgaccctgcccttccagctggacagcctgctgcacgcccacctgtctggagcagatgtggtggtgaccaccaccagcggcctgagcctggcctttgatggagacagctttgtgcggctgcgggtgcctgctgcctatgccggcagcctgtgtggcctgtgtggcaactacaaccaggaccctgcagatgacctgaaggctgtgggcggcaagccagctggctggcaggtgggcggggcccagggctgtggggagtgtgtgtccaagccctgccccagcccctgcaccccagagcagcaggagagctttggaggcccagatgcctgtggggtcatcagcgccacagatggccccctggccccctgccacggcctggtgcccccagcccagtacttccagggctgcctgctggatgcctgccaggtgcagggccaccctgggggcctgtgcccagctgtggccacctacgtggccgcctgccaggccgccggggcccagctgcgggagtggaggaggccagacttctgccccttccagtgcccagcccacagccactatgagctgtgtggggacagctgccccggcagctgccccagcctgagcgcccctgagggctgtgagagcgcctgccgggagggctgtgtgtgtgatgctggctttgtgctgagcggggacacctgtgtgcctgtgggccagtgtggctgcctgcatgatgaccgctactaccccctgggccagaccttctacccaggccctggctgtgacagcctgtgccgctgccgggagggcggggaggtgtcctgtgagcccagcagctgtggcccccatgagacctgccggcccagcggcggcagcctgggctgtgtggccgtgggcagcaccacctgccaggccagcggggacccccactacaccacctttgatggaagaagatttgacttcatgggcacctgtgtgtatgtgctggcccagacctgtggcaccaggcctggcctgcacagatttgctgtgctgcaggagaatgtggcctggggcaatggccgggtgtctgtgaccagggtcatcaccgtgcaggtggccaacttcaccctgcggctggagcagaggcagtggaaggtgacagtgaatggagtggacatgaagctgcctgtggtgctggccaacggccagatccgggccagccagcacggcagtgatgtggtgattgaaacagactttggcctgcgggtggcctatgacctggtgtactacgtgcgggtgacagtgcccggcaactactaccagctgatgtgtggcctgtgtggcaactacaatggagaccccaaggatgacttccagaagcccaacggcagccaggccggaaatgccaatgaatttggaaacagctgggaggaggtggtgcctgacagcccctgcctgcccccacccacctgccccccaggcagcgagggctgcatccccagtgaagaatgtcctcctgagctggagaagaagtaccagaaggaggagttctgtggcctgctgagcagccccaccggccccctgagcagctgccacaagctggtggacccccagggccccctgaaggactgcatctttgacctgtgcctgggcggcggcaacctgagcatcctgtgcagcaacatccacgcctacgtgtctgcctgccaggccgccggcggccaggtggagccctggagaaatgagaccttctgccccatggagtgcccccagaacagccactatgagctgtgtgccgacacctgcagcctgggctgcagcgccctgagcgcccccctgcagtgcccagatggctgtgccgagggctgccagtgtgacagcggcttcctgtacaacggccaggcctgtgtgcccatccagcagtgtggctgctaccacaatggagcctactatgagcctgagcagacagtgctgattgacaactgccggcagcagtgcacctgccacgtgggcaaggtggtggtgtgccaggagcacagctgcaagccaggccaggtgtgccagcccagcggcggcatcctgagctgtgtgaacaaggacccctgccacggcgtgacctgccggccccaggagacctgcaaggagcagggcggccagggcgtgtgcctgcccaactatgaggccacctgctggctgtggggagacccccactaccacagctttgatggcaggaagtttgacttccagggcacctgcaactacgtgctggccaccaccggctgccctggggtgtccacccagggcctgacccccttcaccgtgaccaccaagaaccagaacagaggcaacccagctgtgtcctatgtgcgggtggtgacagtggccgccctgggcaccaacatcagcatccacaaggatgagatcggcaaggtgcgggtgaatggagtgctgacagccctgcctgtgtctgtggctgatggccgcatctctgtgacccagggcgccagcaaggccctgctggtggccgactttggcctgcaggtgtcctatgactggaactggagggtggatgtgaccctgcccagcagctaccatggagctgtgtgtggcctgtgtggcaacatggacaggaaccccaacaatgaccaggtgttccccaacggcaccctggcccccagcatccccatctggggcggctcctggagggcccctggctgggaccccctgtgctgggatgaatgtcggggcagctgccccacctgcccagaagatcggctggagcagtatgagggccctggcttctgtggccccctggcccctggcaccggcggccccttcaccacctgccacgcccacgtgcccccagagagcttcttcaagggctgtgtgctggatgtgtgcatgggcggcggggaccgggacatcctgtgcaaggccctggccagctatgtggccgcctgccaggccgccggcgtggtgattgaggactggagggcccaggtgggctgtgagatcacctgcccagagaacagccactatgaggtgtgtggccccccctgcccagccagctgccccagccctgcccccctgaccaccccagctgtgtgtgagggcccctgtgtggagggctgccagtgtgatgctggctttgtgctgtctgctgacagatgtgtgcccctgaacaacggctgcggctgctgggccaacggcacctaccatgaagctggcagcgagttctgggcagatggcacctgcagccagtggtgccgctgtggccctgggggcggcagcctggtgtgcaccccagccagctgtggcctgggggaggtgtgtggcctgctgcccagcggccagcacggctgccagcctgtgtccacagctgagtgccaggcctggggagacccccactacgtgaccctggatggccacagatttgacttccagggcacctgtgagtacctgctgagcgccccctgccacggcccccccctgggcgctgagaacttcaccgtgacagtggccaatgagcaccggggcagccaggccgtgtcctacaccaggtctgtgaccctgcagatctacaaccacagcctgaccctgagcgcccgctggcccaggaagctgcaggtggatggagtgtttgtgaccctgcccttccagctggacagcctgctgcacgcccacctgagcggggctgatgtggtggtgaccaccaccagcggcctgagcctggcctttgatggagacagctttgtgcggctgcgggtgcctgctgcctatgccggcagcctgtgtggcctgtgtggcaactacaaccaggaccctgcagatgacctgaaggctgtgggcggcaagccagctggctggcaggtgggcggggcccagggctgtggagaatgtgtgtccaagccctgccccagcccctgcaccccagagcagcaggagagctttggaggcccagatgcctgtggggtcatcagcgccacagatggccccctggccccctgccacggcctggtgcccccagcccagtacttccagggctgcctgctggatgcctgccaggtgcagggccaccctgggggcctgtgcccagctgtggccacctacgtggccgcctgccaggccgccggggcccagctgcgggagtggaggaggccagacttctgccccttccagtgcccagcccacagccactatgagctgtgtggggacagctgccccggcagctgccccagcctgagcgcccctgagggctgtgagagcgcctgccgggagggctgtgtgtgtgatgctggctttgtgctgagcggggacacctgtgtgcctgtgggccagtgtggctgcctgcatgatgaccgctactaccccctgggccagaccttctacccaggccctggctgtgacagcctgtgccgctgccgggagggcggggaggtgtcctgtgagcccagcagctgtggcccccatgagacctgccggcccagcggcggcagcctgggctgtgtggccgtgggcagcaccacctgccaggccagcggggacccccactacaccacctttgatggccacagatttgacttcatgggcacctgtgtgtatgtgctggcccagacctgtggcacccggcccggcctgcacagatttgctgtgctgcaggagaatgtggcctggggcaatggccgggtgtctgtgaccagggtcatcaccgtgcaggtggccaacttcaccctgcggctggagcagaggcagtggaaggtgacagtgaatggagtggacatgaagctgcctgtggtgctggccaacggccagatccgggccagccagcacggcagtgatgtggtgattgaaacagactttggcctgcgggtggcctatgacctggtgtactacgtgcgggtgacagtgcccggcaactactaccagctgatgtgtggcctgtgtggcaactacaacggggaccccaaggatgacttccagaagcccaacggcagccaggccggaaatgccaatgaatttggaaacagctgggaggaggtggtgcctgacagcccctgcctgcccccacccacctgccccccaggcagcgctggctgcatccccagcgacaagtgccccccagagctggagaagaagtaccagaaggaggagttctgtggcctgctgagcagccccaccggccccctgagcagctgccacaagctggtggacccccagggccccctgaaggactgcatctttgacctgtgcctgggcggcggcaacctgagcatcctgtgcagcaacatccacgcctacgtgtctgcctgccaggccgccggcggccacgtggagccctggagaaatgagaccttctgccccatggagtgcccccagaacagccactatgagctgtgtgccgacacctgcagcctgggctgcagcgccctgagcgcccccctgcagtgcccagatggctgtgccgagggctgccagtgtgacagcggcttcctgtacaacggccaggcctgtgtgcccatccagcagtgtggctgctaccacaacggggtgtactatgagcctgagcagacagtgctgattgacaactgccggcagcagtgcacctgccacgtgggcaaggtggtggtgtgccaggagcacagctgcaagccaggccaggtgtgccagcccagcggcggcatcctgagctgtgtgaccaaggacccctgccacggcgtgacctgccggccccaggagacctgcaaggagcagggcggccagggcgtgtgcctgcccaactatgaggccacctgctggctgtggggagacccccactaccacagctttgatggcaggaagtttgacttccagggcacctgcaactacgtgctggccaccaccggctgccctggggtgtccacccagggcctgacccccttcaccgtgaccaccaagaaccagaacagaggcaacccagctgtgtcctatgtgcgggtggtgacagtggccgccctgggcaccaacatcagcatccacaaggatgaaattggcaaggtgcgggtgaatggagtgctgacagccctgcctgtgtctgtggctgatggccgcatctctgtggcccagggcgccagcaaggccctgctggtggccgactttggcctgcaggtgtcctatgactggaactggagggtggatgtgaccctgcccagcagctaccacggggctgtgtgtggcctgtgtggcaacatggacaggaaccccaacaatgaccaggtgttccccaacggcaccctggcccccagcatccccatctggggcggctcctggagggcccctggctgggaccccctgtgctgggatgagtgccggggcagctgccccacctgcccagaggaccggctggagcagtatgagggccctggcttctgtggccccctgagcagcggcactggaggccccttcaccacctgccacgcccacgtgcccccagagagcttcttcaagggctgtgtgctggatgtgtgcatgggcggcggggaccgggacatcctgtgcaaggccctggccagctatgtggccgcctgccaggccgccggcgtggtgattgaggactggagggcccaggtgggctgtgagatcacctgcccagagaacagccactatgaggtgtgtggccccccctgcccagccagctgccccagccctgcccccctgaccaccccagctgtgtgtgagggcccctgtgtggagggctgccagtgtgatgctggctttgtgctgtctgctgacagatgtgtgcccctgaacaacggctgcggctgctgggccaacggcacctaccacgaggccggcagcgagttctgggcagatggcacctgcagccagtggtgccgctgtggccctgggggcggcagcctggtgtgcaccccagccagctgtggcctgggggaggtgtgtggcctgctgcccagcggccagcacggctgccagcctgtgtccacagctgagtgccaggcctggggagacccccactacgtgaccctggatggccacagatttgacttccagggcacctgtgagtacctgctgagcgccccctgccacggcccccccctgggcgctgagaacttcaccgtgacagtggccaatgagcaccggggcagccaggccgtgtcctacaccaggtctgtgaccctgcagatctacaaccacagcctgaccctgagcgcccgctggcccaggaagctgcaggtggatggagtgtttgtggccctgcccttccagctggacagcctgctgcacgcccacctgtctggagcagatgtggtggtgaccaccaccagcggcctgagcctggcctttgatggagacagctttgtgcggctgcgggtgcctgctgcctatgctgccagcctgtgtggcctgtgtggcaactacaaccaggaccctgcagatgacctgaaggctgtgggcggcaagccagctggctggcaggtgggcggggcccagggctgtggggagtgtgtgtccaagccctgccccagcccctgcaccccagagcagcaggagagctttggaggcccagatgcctgtggggtcatcagcgccacagatggccccctggccccctgccacggcctggtgcccccagcccagtacttccagggctgcctgctggatgcctgccaggtgcagggccaccctgggggcctgtgcccagctgtggccacctacgtggccgcctgccaggccgccggggcccagctgggggagtggaggaggccagacttctgccccctgcagtgcccagcccacagccactatgagctgtgtggggacagctgccctgtgtcctgccccagcctgagcgcccctgagggctgtgagagcgcctgccgggagggctgtgtgtgtgatgctggctttgtgctgagcggggacacctgtgtgcctgtgggccagtgtggctgcctgcatgatggccgctactaccccctgggggaggtgttctacccaggcccagaatgtgaaagaagatgtgaatgtggccctgggggccacgtgacctgccaggagggcgccgcctgtggcccccatgaggagtgccgcctggaggatggagtgcaggcctgccacgccaccggctgcggccgctgcctggccaatggaggcatccactacatcaccctggatggccgggtgtatgacctgcacggcagctgcagctatgtgctggcccaggtgtgccaccccaagccaggagatgaggacttcagcatcgtgctggagaagaatgctgctggggacctgcagaggctgctggtgacagtggccggccaggtggtgtccctggcccagggccagcaggtgacagtggatggagaggccgtggccctgcctgtggccgtgggccgggtgcgggtgacagctgagggcaggaacatggtgctgcagaccaccaagggcctgcggctgctgtttgatggagatgcccacctgctgatgagcatccccagccccttccggggccgcctgtgtggcctgtgtggcaacttcaacggcaactggagcgatgactttgtgctgcccaatggatctgctgccagctctgtggagacctttggagctgcctggagggcccctggcagcagcaagggctgtggggagggctgcggcccccagggctgccctgtgtgcctggccgaggagacagccccctatgagagcaatgaggcctgtggccagctgaggaacccccagggcccctttgccacctgccaggccgtgctgagccccagcgagtacttccggcagtgtgtgtatgacctgtgtgcccagaagggggacaaggccttcctgtgccgcagcctggccgcctacacagctgcctgccaggccgccggcgtggccgtgaagccctggaggacagacagcttctgccccctgcactgcccagcccacagccactacagcatctgcaccaggacctgccagggcagctgtgccgccctgagcggcctgaccggctgcaccacccgctgctttgagggctgtgaatgtgatgaccgcttcctgctgagccagggcgtgtgcatccctgtgcaggactgtggctgcacccacaacggccgctacctgcctgtgaacagcagcctgctgaccagtgactgcagcgagcgctgcagctgcagcagcagcagcggcctgacctgccaggccgccggctgccccccaggccgggtgtgtgaggtgaaggccgaggccaggaactgctgggccacccggggcctgtgtgtgctgtctgtgggcgccaacctgaccacctttgatggagcccggggggccaccaccagccctggggtgtatgagctgagcagccgctgccccggcctgcagaacaccatcccctggtacagagtggtggccgaggtgcagatctgccacggcaagacagaggccgtgggccaggtgcacatcttcttccaggacggcatggtgaccctgacccccaacaagggcgtgtgggtgaatggcctgcgggtggacctgcctgctgagaagctggcctctgtgtctgtgtccaggaccccagatggcagcctgctggtgcggcagaaggccggcgtgcaggtgtggctgggcgccaacgggaaggtggccgtgattgtgtccaatgaccatgctgggaagctgtgtggggcctgtggcaactttgatggagaccagaccaatgactggcatgacagccaggagaagccagccatggagaagtggagggcccaggacttcagcccctgctacggctag

SEQ ID NO: 141784 - DNA, 16218 bp, Artificial Sequence
  derived and/or modified sequence
atgggcgccctgtggagctggtggatcctgtgggccggcgccaccctgttatggggcctaacacaggaagcgtcagtggacctgaagaataccggaagggaagagtttctgaccgccttcctgcagaactaccagctggcgtattccaaagcttacccccggctcctgatctcctcccttagcgaatccccagcctcagtctctattctttcacaggccgataacacttctaaaaaagttacagttcgtcctggggagagcgtgatggtcaatattagcgctaaggcagaaatgatcggatcaaagatctttcagcatgcggtggtgatccatagcgactatgcaatctctgtccaggccctcaatgctaagccggatacagctgagctgaccctgctaaggcccattcaggccctggggaccgaatacttcgttcttacgccacccgggacaagcgcacgtaatgtgaaagagtttgctgtggtggccggcgccgcaggagcgagcgtgtccgtgaccctgaagggcagcgtcacctttaatggaaaattttatcccgcgggggatgtgctgagggtaactctgcaaccttataacgtggcccagcttcaatccagcgtagacctgtccgggtccaaagttacagctagctctcctgtcgctgtcctgtccggacattcttgtgctcaaaaacatacaacctgtaatcatgtcgtggagcagctgctgcctacttctgcatggggaactcactacgtcgtgcctacccttgctagccagtctcgctatgatctggcgttcgtcgtcgcgtctcaggcaacgaagctgacttataatcatgggggcatcactggcagtagagggctgcaggctggtgacgtggtggagtttgaggttcgcccttcctggccattgtacctgagtgccaatgttggaatccaagttctgttgtttggtactggtgccatccgaaatgaggtaacatatgacccatatctggtgctaatccctgacgtcgccgcttattgcccagcatacgtggttaagtctgtccccggctgcgaaggcgtagctctggtcgtggcccaaaccaaagcgattagcggattgaccatagatgggcatgccgtaggggccaaactgacatgggaggcagtgccgggaagtgagttctcttatgccgaggtcgaactcgggaccgcagacatgattcataccgccgaagccaccacaaatctggggctgttgacatttggtctggcgaaggccattggctacgccacggctgccgactgtggcagaactgtcttgagcccggtggaacccagctgcgaaggaatgcagtgtgcggcagggcagagatgccaggtcgtaggcggcaaagccggatgtgtggctgagagcaccgccgtctgcagggcgcagggtgaccctcactatactacattcgatggccgccgctatgacatgatgggcacctgcagctataccatggtggaactctgtagtgaagacgacactttgcccgctttctccgttgaagcgaagaatgagcaccgagggtcaagaagagttagctacgtcgggcttgtgacagtccgggcatactcgcacagtgtgtctctgactaggggcgaggttggcttcgtcctggtagacaaccaacgctccagactgccagtcagcctaagcgaggggaggctgagagtgtaccaaagcgggccacgagccgtggttgagctggtgtttggattggtcgttacgtacgactgggattgccagctcgctctgagcctgccagcccgttttcaggaccaggtttgtggcctgtgcggcaactacaacggcgatcctgctgatgattttctcactcctgatggcgcactggctcccgacgctgtcgagttcgcatctagctggaaactggacgacggtgattatctatgcgaagatggatgtcagaacaactgtccagcctgcactcccggccaggcccagcactacgaaggagaccgattatgcggcatgttgacaaaactcgatggcccttttgccgtctgtcatgatactttggaccctcggcctttcctggagcagtgcgtatatgacctgtgcgtggttggtggagaacggctgagtctctgcagaggcttgtcagcttatgcccaagcgtgcctggagctcggaatctccgtgggcgattggcgcagccctgccaattgccctctgtcgtgtccagcaaattctaggtacgaactgtgcgggccggcatgtccgacctcttgtaatggcgcagccgcccccagcaactgtagcgggcggccatgtgtggagggctgcgtatgcctcccaggatttgtcgcctccggcggcgcctgcgtgcctgcctcttcttgcggctgtacctttcaaggcctccagttggcccctgggcaggaagtgtgggctgatgagctctgccagcgccggtgcacatgcaatggcgccacgcaccaggttacctgccgtgacaaacaaagctgtcctgccggtgagcgttgctccgttcagaacggtcttctaggttgctacccagacagattcggaacgtgccagggcagtggggacccccactatgtctcgttcgacggccgccgatttgactttatgggcacttgtacttacctgcttgtgggatcgtgtgggcaaaatgcggcattgcccgcgtttcgggtcctggtggagaacgagcacagaggctcacagaccgtgagctatacacgcgctgtacgggtggaggcccgtggagttaaagtggctgtgcgaagagaataccctggccaggttctcgtggacgatgtgttgcagtacctgccattccaggcagccgatggccaggtgcaggtgtttcgacagggaagagacgctgtggtcaggactgactttggtctgacagtcacctacgactggaacgctagggtgactgctaaggtcccaagcagctatgccgaggctctctgtggcttgtgtgggaatttcaacggcgatcctgcggatgacttggcactacgggggggaggccaagctgcgaacgcgctcgcatttggtaactcttggcaagaggaaacccgacctggatgcggtgccacagagccaggcgattgtcctaagctggactccctagtagcacagcagctgcaatcaaagaatgagtgtggaatcctggccgaccccaaaggaccttttcgggaatgtcattctaagttagatcctcagggcgccgtgcgtgactgcgtgtatgaccgctgtctgttgccgggccagtctggcccattgtgtgacgccctagctacttatgctgccgcctgccaggctgccggggcgacagttcatccgtggcgaagcgaagaactatgtcccctgtcttgtcctcctcatagccactatgaagcatgctcatatgggtgcccactctcttgcggcgacctgccagtgcccgggggatgtggctccgagtgtcacgagggatgcgtgtgtgacgagggattcgccttaagtggtgagtcctgccttcctctcgccagttgtggctgtgtccaccagggcacctaccacccacctggccagactttttatccgggccccggttgtgactccctatgtcactgccaggagggaggtctcgtgagttgtgagtctagttcgtgcggaccccacgaagcttgtcagcctagtggcggctcccttggatgcgttgccgtggggtcctcgacctgccaggcctccggggacccgcactacactacctttgatggtcgccggtttgactttatggggacctgcgtctacgttctcgcccaaacatgtggtacaagaccagggctacacaggtttgccgtactgcaggagaacgtggcctgggggaatggcagagtgtcggttaccagagtgataaccgtccaggtggcgaatttcaccctccgtctagaacagcggcaatggaaggtcactgtcaacggggtggatatgaagctcccagtggtcttggcgaatggtcagatcagggcatcccaacacggtagtgacgtggtgattgagaccgattttggattgagggtcgcatacgacctggtctactacgttagggtaacagtgcctggcaactattaccagcaaatgtgtggattatgtggcaactacaatggggaccctaaagatgacttccagaaacctaacgggtctcaggcaggaaacgcaaacgaatttgggaatagctgggaggaggtggtgccagattcgccctgcctaccccctacaccttgccccccaggaagtgaggactgcatacccagccataaatgcccacctgagctggagaagaaatatcagaaggaggagttttgcgggctactctccagccctaccggacctctctctagctgccataagcttgtggaccctcaggggccgctgaaggattgcatttttgatctctgcctgggaggtggtaacttatcaattctgtgttccaatatccacgcctatgtttccgcgtgccaggcagctgggggccacgttgaaccatggcggactgagacattctgcccaatggaatgtcctcctaatagtcattatgagctgtgcgcagacacgtgttccctaggttgctctgctctctccgcccctccacagtgccaagatggctgtgctgagggctgccagtgcgatagtggcttcctatataacggacaggcatgtgtgccaattcagcagtgtgggtgttatcacaacggagtctactatgaacccgagcagaccgtactgatcgacaattgcaggcagcagtgcacatgccacgcgggaaagggcatggtgtgccaggaacactcatgcaagcccgggcaggtgtgccagccaagcgggggcatcctgtcatgtgttaccaaggatccctgccatggcgttacctgcaggccgcaggaaacatgcaaagaacaaggcgggcaaggtgtttgcctgcccaattacgaggcaacctgctggctgtggggcgatccacactaccacagtttcgacggtcggaaatttgacttccagggaacatgtaattacgtcctggctaccaccgggtgccctggagtgagcacacagggtttaacccccttcaccgtcactactaaaaatcagaaccggggcaaccccgccgtgtcttatgtgagggtagttactgttgctgctttgggtactaatatctctatacataaagatgaaataggaaaagtgcgagtcaacggcgtcctgacagccttgcccgtctccgtggctgacggcagaattagcgtgactcagggtgcttcgaaggctctgttggtggccgactttggcctgcaggtctcctacgactggaattggagagtggatgtcacccttcccagcagttatcatggagctgtgtgcggcctgtgcggaaatatggaccgcaaccccaataacgaccaggtttttccaaatggtactctcgctccgtccatcccaatctggggagggtcttggcgggcgcctggctgggaccctctatgttgggatgaatgtagaggttcttgtcctacatgtccagaggatcggctggaacagtatgagggtccaggtttttgcgggccattggcccccgggaccggcggacccttcaccacatgccacgcccacgtccccccagagagtttcttcaaaggctgcgtgcttgacgtatgcatgggcggcggggatcgtgacatcctttgtaaggccctggcttcatacgtcgcggcctgtcaggctgccggcgtcgtaattgaagattggagggcccaagtcggctgtgagatcacatgccctgaaaactcacactacgaagtgtgcgggtcaccatgccccgctagctgcccatctccagctcctttgaccactccggctgtgtgtgaggggccctgtgttgagggctgtcagtgcgacgcgggtttcgttctatctgccgaccgatgtgtccctttaaacaatggttgcggatgctgggctaacggcacttaccatgaggccggaagcgagttctgggccgatggcacctgctctcagtggtgcaggtgtggcccaggaggggggtctctggtctgcacacccgcatcttgtggtctcggcgaagtttgtggcctgctaccttccggacagcacggctgccagccggtaagcacagctgaatgtcaggcttggggagaccctcattatgtgaccctcgatggccacaggttcaatttccagggtacctgtgagtacctgctctcagctccgtgtcatggaccaccactgggggctgaaaactttactgtgaccgtcgctaatgaacatcgtggctcacaggccgttagctatacgcgcagcgttactctgcagatttacaaccacagtctgaccctaagtgcccgctggccgagaaaactgcaagtggacggtgtgtttgtgaccctccccttccagctggactctctgctccacgctcatctgtctggagcagacgtggtggtgacaaccaccagcgggctgtccctagcgttcgacggcgacagtttcgtccggctcagagtacccgcagcatacgctgggtccttatgcggactgtgtgggaactataaccaggaccctgcagatgacctgaaagctgttggtggcaagcctgccgggtggcaggtgggaggggcccaagggtgtggggagtgtgtgtctaaaccctgtccgagcccgtgcacgcctgagcagcaggagtcgttcggcggaccagacgcctgcggcgttatttctgcaacagacggcccactggcgccgtgtcatggcctggtgccacccgcccagtacttccaggggtgcctactcgacgcatgtcaggtacagggccaccccggtggcctctgcccagccgtggccacttatgtagcagcgtgccaggcagccggtgcacagttgcgtgaatggagaagacccgatttttgcccattccagtgtcctgcacacagccattatgaactttgtggtgatagttgccccgggtcttgccctagtctttctgcacctgagggttgtgagagcgcctgccgagaaggctgcgtttgcgacgctggattcgtactgagcggagacacttgcgtgccagtgggccagtgcggctgtttgcatgacgaccgctactatcccctagggcagacattttatccaggtcccgggtgtgacagcctgtgtcgatgtagagaagggggcgaagtttcttgcgagcccagtagttgtgggccccacgagacatgtaggccatcaggcggctcactcgggtgcgtggcagtgggcagcacaacttgtcaggcatccggggatccccactacactacattcgatggaaggcggttcgactttatgggcacttgcgtctacgttttggcccaaacatgcgggactaggcccgggctgcatagattcgcagtccttcaggaaaatgtcgcttggggcaacgggcgagtctccgtaacccgtgtaatcacagtacaggtcgccaactttactttgcggctggagcagagacagtggaaagtgacagtgaacggggtggatatgaaactccctgttgtgctggctaacggtcagataagagccagtcaacatggatccgatgtcgtgattgagaccgatttcggtttgcgcgtggcctatgacctggtgtactacgtacgcgttactgtgccaggcaactattaccagcttatgtgcggtctctgcggcaattacaacggtgatccaaaggacgactttcagaaacctaacggctcgcaggccggtaatgctaacgagtttggcaattcttgggaagaggtggtcccagacagcccgtgcctgcccccgcccacgtgtccgcctggatcagaagggtgcattccaagtgaggaatgtcctcctgagctcgagaagaaatatcagaaggaggagttctgtggcctgctgtcatctcccaccggcccactgagctcctgtcacaagctcgtggatccgcagggccctcttaaggattgcattttcgacctgtgtttgggcggtggtaacttatccattctgtgttcaaacatacacgcttacgtaagcgcatgccaggccgccggaggccaggtggagccgtggcgcaatgaaaccttttgtccaatggagtgtcctcagaactcccactacgagctgtgcgctgacacatgtagcctcggttgctccgcactttctgcccctttgcagtgtccagatgggtgtgccgaggggtgccaatgtgactcggggttcctttacaatgggcaggcttgtgtccccattcagcaatgcgggtgctaccacaacggagcctactatgaaccagagcagaccgtcctgattgataactgtaggcagcagtgcacttgccatgttggaaaggtggtcgtctgtcaagagcactcatgtaagcctggacaggtctgtcaacctagtggtggaatactgagctgtgtgaataaggacccctgccacggtgttacatgcaggccccaagaaacctgtaaagagcagggcgggcagggggtctgtctccctaattatgaagcaacctgttggttatggggcgaccctcattaccatagttttgatggccgcaaattcgactttcaaggcacctgcaactacgttctggcgacaaccggttgtcccggggtcagtacacaaggactcacacccttcacagtcaccacaaaaaatcagaaccgggggaaccccgctgtctcttacgttagggtcgttacagttgcggcacttgggacaaatatttctatccataaggacgaaatcgggaaagtgagggttaacggagtcctgactgcactgcccgtcagcgttgcagacggtagaatctcagtgacacagggcgctagtaaggcattactggtggcagacttcggactccaggtgtcctatgactggaactggagagtggacgttacccttccctcaagttaccacggagctgtgtgcggcctgtgcgggaatatggaccgaaaccctaacaatgatcaggtctttccaaacggcacactcgctcccagcattccgatatgggggggttcatggcgagccccaggctgggatcctctgtgttgggacgaatgcaggggatcctgcccaacttgccccgaggatcgcctggagcagtatgaaggccccgggttttgcgggcccctggctcctgggaccgggggcccctttaccacgtgtcacgcacatgtcccccccgaatcgtttttcaaagggtgcgtattggatgtgtgtatggggggaggtgatcgggatattttgtgtaaagcactcgcctcgtacgtagcagcgtgccaagctgcaggcgtggtaatcgaggattggagggcacaggtcgggtgcgaaataacatgccccgagaactctcactacgaggtctgtgggccaccatgtcctgcttcctgcccctcgccagcacccttgactaccccagcagtatgcgagggcccctgtgtcgagggatgccaatgcgatgccggcttcgtgctctccgctgaccggtgcgtccccctcaacaacggatgtggatgctgggccaatggcacctatcacgaagctggcagtgagttctgggcggatggcacatgctcccagtggtgcagatgcggacctgggggagggtcactcgtctgcaccccagccagctgtgggctcggggaggtctgcgggcttctcccatccggccaacatggatgccaacctgtcagcactgcagagtgccaagcctggggagatccacattacgtgactttggatggtcacagatttgacttccagggaacgtgcgagtatctgctgtccgctccttgccacgggcctccgttaggggcagagaactttactgttaccgtcgcaaacgagcacaggggatcacaggctgtgagttatacgaggagtgtaacactgcagatctataaccactcccttacactgtcagctcggtggccccggaaattacaggttgatggcgtgtttgttaccctgccctttcaactagactccctcctccacgcgcatctgagcggcgccgacgtggtggtgacaaccacatccgggctgagtttggcatttgatggcgatagttttgtccggctgcgcgtccctgctgcatatgcagggagcctctgcgggctctgcggtaactataaccaggaccccgccgatgacctgaaagcggtaggcggaaagcccgccgggtggcaggttgggggcgctcaggggtgcggcgagtgtgtgtctaaaccatgcccatccccatgtacaccggagcagcaggagagtttcgggggccccgatgcctgcggagtgatctcagccacagatggccctttggcaccctgtcatggtctggtgccgccagcccagtacttccaaggatgccttctggacgcatgtcaggtgcaagggcacccagggggtctgtgccctgctgtggccacctatgtggcggcctgccaggcagcgggcgcccagctcagagaatggcgccgcccggatttttgtccctttcagtgtccggcccacagccattacgagctttgtggagattcttgtccaggctcctgcccgagcttaagcgcaccggaaggttgtgagtccgcttgccgggaaggatgtgtttgtgatgctggtttcgtgctgtctggcgatacctgcgtgcctgtggggcagtgcggctgcttgcatgatgatcgctattacccccttggccagacattctaccccggccccggatgtgacagcctttgcagatgcagagaaggaggtgaggtgagctgcgaacccagcagctgcgggccacatgagacctgtcgtcctagtggcggttctctcgggtgcgtagccgtcggttccaccacatgtcaagctagtggcgacccacattatacaaccttcgacggccatcgcttcgatttcatgggcacctgtgtgtacgtgctcgcccagacctgcggtaccaggcccgggcttcatcggttcgcagtgctccaagagaacgtcgcgtggggaaatgggcgcgtcagcgttacacgcgtgatcactgttcaggtggcaaattttacactgaggctggaacaacggcagtggaaggtcactgttaatggggtggacatgaagttgcccgtggtactggcaaacggccagatccgagcgtcgcaacacggctctgacgttgtcatagaaaccgatttcgggctgcgtgttgcctatgatctcgtgtattatgtgcgggtgaccgtgcctggtaattattaccagctgatgtgcggcctctgcgggaattataacggggatcctaaggatgactttcagaaacctaatggctcacaggccgggaacgctaacgaatttggaaactcttgggaggaagttgtgccggactcaccctgcctgccaccaccaacatgcccccccgggagcgccgggtgcataccatcagacaaatgtccgcccgagctggaaaagaagtatcaaaaagaggaattctgcggcctgctgtctagccctaccgggcctctctcctcttgtcacaaactggtcgacccacagggccccctgaaggattgcatctttgatctgtgtctcggagggggtaacctgtccatattgtgcagcaatatccacgcttacgtctcagcatgtcaggcggcaggcggccacgttgagccctggcggaatgagactttctgtccgatggaatgccctcagaatagtcactatgagttgtgcgcagacacatgctctctaggctgcagtgccttgtccgcaccccttcagtgccccgacggctgtgctgagggctgccaatgtgacagtggcttcctgtataacgggcaggcttgcgtccctatccaacagtgtggctgctatcacaatggagtctattatgagcccgagcagacagtgctgatcgacaattgcagacaacagtgcacctgtcatgtgggcaaggtcgtggtgtgtcaggaacactcatgtaaacctggccaggtatgtcaaccgtcagggggaattctgagctgcgtcactaaggacccatgtcacggagtcacctgtcggccccaggaaacgtgcaaggaacaaggcgggcagggcgtgtgcctgcccaactatgaagctacgtgctggctgtggggtgacccacactatcacagttttgacggcagaaagtttgacttccagggtacttgcaattacgtgctggcaacaacgggttgccctggtgtgtccactcagggactcacccctttcacagtgacgaccaaaaatcagaatcgcggcaatcccgctgtgtcatacgtgcgcgtcgttacagtggctgccctgggcactaatattagtatccacaaggacgaaataggcaaggtccgggttaacggcgttcttaccgcccttcctgtgtctgtggccgacggtcggataagcgtggcccagggggcctcgaaggctttgctggtggcagatttcggacttcaggtgtcgtacgactggaactggcgagttgacgtaaccctgcctagcagctaccacggagccgtatgcggcctttgtggcaacatggacagaaacccgaataacgatcaagtctttcccaacggaaccctggcccccagtatacccatctgggggggcagttggcgggctcccgggtgggaccccctctgttgggacgaatgtagagggagctgcccaacttgccctgaggatcgcttagagcaatacgaggggcctggtttctgtggcccactgagctcgggaaccgggggtccattcactacttgccacgctcacgtgccgcccgaaagctttttcaagggttgtgtgcttgatgtttgcatgggtggcggcgaccgggacatcctgtgtaaagctcttgcgagttatgtcgcagcctgtcaggcagccggcgtggtaattgaagactggcgtgcccaggtgggctgcgagattacttgtcccgagaatagtcattacgaggtctgtggccctccgtgcccagcgagctgcccttctcccgcaccacttaccacgccagccgtttgtgaagggccatgcgtcgaaggttgccaatgtgacgctggatttgttcttagcgcagaccgatgtgtcccgctcaacaatgggtgcgggtgttgggcaaacgggacataccacgaagcaggaagcgagttctgggctgacgggacttgtagtcaatggtgtcggtgcggcccagggggcggcagtctggtatgtacacctgcatcatgcggcctgggtgaggtgtgcggcctgctgccctccggccagcacgggtgtcaacccgtatctacagcagaatgccaagcctggggcgacccacactatgtcacactcgatggccaccgcttcgattttcagggaacatgcgagtatctgttgtctgccccatgccacggaccccctctcggtgcagagaactttactgttactgtcgccaacgaacaccgaggttctcaggcagtctcatacactaggtccgtcacactgcagatttacaatcattccctgaccctgtctgcgagatggcctagaaaattgcaggtagatggtgtttttgtggcactccctttccagctggactctctattacatgctcatctgtccggcgcggatgttgtggtcaccactacttccggtttgagtctggcttttgatggagattcgtttgtcagactccgggtacctgccgcatacgctgcctccctgtgtgggctttgtggaaactacaaccaagatcccgccgacgatctcaaagctgtagggggaaaacctgccggctggcaggtgggaggcgcccagggatgtggcgagtgtgtgtccaaaccgtgtccttctccctgtaccccagagcagcaggaatcctttggcgggccagatgcctgtggtgtgatctccgctacagacgggcctctggctccgtgccatggcctggtgcccccagcccagtatttccaaggctgcctgctagatgcatgtcaggtgcagggccatcccggggggctctgtcctgccgtagctacctacgtagccgcgtgtcaggccgcaggcgcccagttgggagagtggaggcgtcccgatttctgcccactacagtgccctgcccacagccattatgaattgtgtggggactcctgtcctgtgtcctgtccatccctgtccgcccctgaggggtgcgaatccgcatgcagggagggctgtgtatgtgacgccggatttgtgctctcaggcgatacttgcgtgcccgtgggccagtgcggctgcctgcatgatggcagatattaccccttgggagaggtcttttaccccgggccagaatgcgagcgacggtgcgagtgtgggccagggggtcatgtaacctgccaggaaggggccgcatgcggtccacatgaggaatgccgcctggaggatggcgtgcaggcatgtcatgcaaccggatgcggtcggtgcttagcgaacgggggcatccactacatcactttggatgggcgcgtgtatgacctacacgggtcctgttcctacgtcttggctcaggtgtgccaccccaagccgggggatgaggatttttcaatcgtcctggagaaaaatgccgctggggatctgcagaggcttctggtgaccgtggctggccaagtggttagcttagcccagggtcagcaagtcaccgttgatggggaagccgttgctcttcctgttgccgtggggcgggtgagagtgactgccgagggtaggaacatggtgctccagaccacaaagggcctacgattgttgtttgatggagacgcccatctactcatgagtatccctagcccattcagaggccgcttgtgcgggctctgcgggaactttaacggcaattggagcgatgactttgttctgcctaatgggtcagctgcatccagcgtggagaccttcggcgccgcctggcgcgccccaggaagctcaaaaggctgtggtgaaggatgcgggcctcagggatgcccagtgtgcttggcagaggagaccgcaccatacgagagcaatgaggcctgtggccagttgagaaacccacaaggacccttcgccacatgtcaggccgttcttagtccttccgagtacttccgacagtgtgtgtatgacctctgcgcacagaaaggagataaagccttcctctgcagatcacttgccgcctatactgcagcctgccaggctgcgggggtcgccgttaaaccttggaggaccgactctttctgtccactgcattgcccagcacattctcactattctatctgtacccgtacctgtcagggctcttgtgcagccctgtcaggccttactgggtgcaccacaaggtgcttcgaaggatgcgaatgcgatgacaggtttcttttatctcaaggggtctgcataccagtgcaggactgcgggtgtactcacaacggcagatacctgccagtcaacagcagtctgctaaccagtgattgttcagaacgctgtagctgttctagctctagtggtctgacatgtcaagccgccggctgccccccaggaagagtgtgcgaagtgaaagctgaggccaggaattgttgggccactcgtggcctttgtgtgctgagtgtgggagcaaacctgaccacatttgatggggctcgaggcgctaccacaagtcccggcgtgtacgaactctcttccaggtgccccggcttgcagaacaccatcccttggtatagggtggtcgcagaagtgcagatttgccatggaaagacagaagccgtgggtcaggtgcatatctttttccaggatggaatggttacgctaactccaaacaagggagtttgggttaatgggctccgggtggacctgccagcagaaaagctggctagcgtgagtgtttcacgaacccccgatggtagtttactcgttaggcagaaggccggagttcaagtctggcttggcgctaatgggaaagtcgccgtgattgtctcgaacgaccacgccgggaagctttgcggagcgtgcggaaattttgatggagaccagactaatgactggcatgactctcaggagaagcccgccatggagaagtggcgagcccaggacttctcaccatgctacgggtag

SEQ ID NO: 141785 - DNA, 16217 bp, Artificial Sequence
  derived and/or modified sequence
atgggagccctctggtcctggtggatcttgtgggctggtgctacccttctgtggggccttacccaggaagcctccgtagatctcaagaacacggggcgagaagagtttttaactgcatttctgcaaaactaccaactggcatacagtaaggcataccctcggctattgatatctagcctgtcagaatcccctgctagtgtgagcattctgtctcaggccgacaacacaagcaagaaagtgacagttcgccctggggaaagtgtaatggtaaacattagcgccaaggctgagatgatcggctctaaaatcttccagcacgccgtggtcatccactccgattacgcgattagtgtgcaagcactcaatgcaaaaccagatacggcggaactaaccctactgaggcctatccaggcccttgggaccgaatactttgtgctgactcctcccggtactagtgcgagaaacgtcaaagaatttgcagttgtagccggagcagccggtgccagcgtcagcgtgacactcaaaggctcggtgacatttaatggaaaattttaccctgctggggacgtcttgcgagtgactctgcagccctacaatgtggctcagctacagagcagtgtagaccttagcggcagcaaagttacagccagctcccctgtagccgtgttgagcggacatagttgcgcccagaagcacacaacctgcaatcatgtcgtagagcagctgctgcctacctctgcctggggcacgcactatgtggtcccaaccttggcttcacagtcgcggtacgaccttgctttcgtggtcgcttcacaggccactaagctgacctacaaccacggcggtattactggcagccgagggctgcaggcaggagacgtggtggagtttgaggtgcggccatcatggcctctgtacttatctgcaaatgtaggcattcaggtcttgttgttcgggaccggggcaattcgaaacgaggtcacctacgatccgtacttggtcctgatacctgacgtggccgcttactgccctgcgtacgtggtgaaaagcgttcccggatgcgagggcgtagcgctcgtcgtggcccagaccaaagcgatttctggtcttactatcgatggacacgctgtgggggcaaagctgacttgggaagcagtcccgggaagtgagttttcttacgccgaggtcgaactggggacagcagatatgattcacacagcagaagctaccacaaacttgggcttgctgaccttcggcctggcaaaagcgattggatatgcaacggccgctgactgcgggaggaccgtgcttagccctgtcgaacccagttgcgagggcatgcagtgtgccgctggtcagcgctgtcaagtggtgggcggaaaagccggttgcgtggccgagtccacggcggtctgccgtgctcagggagatccacattacacaactttcgacgggaggagatatgatatgatgggaacctgctcatacacaatggttgagttgtgtagcgaggacgacacactacccgctttttcagtcgaagccaagaacgagcaccgaggctccagaagagtgtcctatgtggggttggtgactgtgcgggcttattctcatagtgtgagtcttaccaggggcgaggtggggttcgtgctggttgataaccagcggtcacgtctgcccgtaagcctgagcgaaggaaggctgcgtgtgtatcagtctggtccgcgagcagttgtcgagttagtctttggcttggtggtaacatacgactgggactgtcaacttgcactgtcgctccctgccagatttcaagaccaggtctgcgggctctgtggcaattacaatggggaccccgctgacgacttcctgactcccgacggggcactggcccctgacgcagtggagttcgcctccagctggaaactggacgacggagattacctctgcgaggacgggtgccagaacaactgtcccgcatgcaccccaggccaggcccagcactatgagggcgaccgcctctgtggcatgcttacaaagctcgacgggccattcgccgtttgccacgatacactggacccccgaccattcctcgagcagtgtgtgtacgatctgtgcgttgtgggaggagagcggctgtctctctgtcggggtttgtctgcctacgctcaagcctgtctggaattgggcataagcgtcggagactggcggtcccctgccaattgccctctttcctgcccagccaactcaagatacgagctgtgcggcccagcatgtcctacctcgtgcaacggggctgctgctcccagcaattgcagtggcagaccgtgtgtagaaggctgtgtgtgtctccccggtttcgtggccagcggaggtgcttgtgtccctgcgtcgagctgtggctgcactttccaagggctccaactcgcacctggccaagaggtgtgggccgacgaactgtgccagcgcagatgcacttgtaatggcgctacgcatcaagtcacctgtagagacaagcagagctgtccggcaggggaacgctgttcagttcagaacggactgcttggctgctatccagaccgctttggcacatgtcaggggtcaggagatccccactatgtgagtttcgatggaaggcgctttgatttcatgggcacatgtacctatctcctggtcggttcttgtgggcaaaacgccgcactgccagccttcagagttctggtggagaacgaacacaggggtagccagacggtatcctacacaagagctgtccgggtagaggcccgaggtgtgaaagtcgcagtgaggagagagtaccccggacaggtgctggttgatgatgtgctacagtatctaccatttcaagctgctgatggacaggtacaggtcttcaggcagggcagagacgccgttgtgaggacagattttggactaaccgtgacctatgattggaatgctcgggtcacggccaaagtgccaagctcatacgcagaagctctgtgtgggttgtgtggcaattttaatggcgatccagctgacgacttggccctccgcggaggaggacaggctgctaacgccctcgccttcggaaatagttggcaagaagaaactagacctggttgcggtgccactgagcccggagactgccccaagttagactccctcgtcgcacagcagctgcagtccaaaaacgaatgtgggatactggccgacccgaaggggccattcagggagtgccattccaaattggatccccagggggctgtaagggactgtgtctacgaccgatgtttactgccaggccagtcaggtcccctttgtgacgctctggcaacttacgcggctgcctgccaagccgcaggagccacggttcacccgtggaggtcagaagaactttgtcctctgtcttgtcctccacattctcactacgaagcctgctcttacggatgtccacttagctgcggtgacctgcccgtcccaggaggctgtggctcagagtgccatgaggggtgcgtctgcgatgaagggttcgcgctgtcaggcgaaagctgcctgccactggcatcctgtggctgcgttcatcagggcacttatcaccctccaggccaaactttttatcctggaccgggatgtgacagcctctgtcactgccaggagggagggcttgtgtcctgcgagagtagtagctgtgggccacacgaagcctgtcagcctagcggcggatccctgggttgcgtggctgttggatcttccacctgtcaagcttccggagatcctcactacactacctttgacgggcgacgattcgacttcatgggcacctgcgtgtacgtgctagctcaaacatgtgggactagacccggtttgcatcggttcgcggtcctccaggagaacgtggcctgggggaatggcagagtgtccgtaactagggtgatcacggtccaggtggcaaatttcaccctccgcctggaacagaggcagtggaaggttaccgtgaacggcgttgacatgaaacttcctgtggttctcgcaaatgggcaaatccgtgcttcgcaacacggcagtgatgtggtgatagagacagacttcggtttgcgggtggcctacgatctggtgtactacgtgcgagtgactgtccctggcaattactatcaacaaatgtgtggactttgcggcaactataacggagatccaaaagacgactttcagaaaccaaacggctcccaggctgggaacgccaacgaatttgggaatagctgggaggaggtggtacccgatagcccttgtttacccccaaccccctgccccccaggaagtgaggattgtattccgagtcataaatgtcctcccgaacttgagaagaagtaccagaaagaagagttttgcggcctactgtcttcccccacaggacctctcagcagttgccacaagctcgttgatccacaaggccctctgaaagattgcatattcgacctttgtctgggcggaggcaatctttcgatcctctgtagtaacatccatgcgtacgtttccgcgtgtcaagcagcgggaggtcacgttgagccctggcgcaccgagaccttttgccctatggagtgtcccccaaatagccactatgagctctgcgccgatacttgctcactaggctgctcagccctgagcgctcctccccagtgtcaggacggctgtgctgaaggttgccagtgtgattcaggtttcctctacaacggacaggcctgtgtgcccatccagcagtgtggctgttatcacaatggtgtgtattacgagcccgagcagacggtgctcatcgacaattgtcgacagcagtgcacctgtcacgctgggaagggaatggtctgccaggagcacagctgcaagccagggcaggtttgccagcccagtggaggcatactctcatgtgtcactaaggacccttgtcacggggtgacctgcagaccacaggaaacatgcaaggagcagggaggccagggcgtttgcctccctaactacgaggccacatgctggctgtggggtgacccccactaccattcgtttgatgggaggaagtttgattttcagggtacttgtaattacgtcctggccacgacgggctgtccaggagtatctactcagggactcacacctttcacagtgactacaaagaaccaaaatcgtgggaaccctgctgtttcttatgtgcgggtggttaccgtggctgccctcgggactaatattagtatccacaaggatgaaatcggaaaggtgagagttaacggcgtgttaacagccctgccagtgtccgtggccgacggtcgaatctctgtcactcagggagccagcaaagcactcctcgtggccgatttcgggctccaagtcagttacgactggaattggagggtggacgtgaccctgcccagttcctaccacggtgctgtttgcggcttatgcggcaatatggatcgcaatcctaataacgatcaggtctttccgaacggcaccctagcacccagcataccgatctgggggggaagttggcgggcacccggttgggatcccctttgctgggacgagtgtcgcggatcatgtcccacgtgtccagaggacaggctcgagcaatacgagggccctggattctgcgggccactagctcccggaacagggggtccttttacaacatgccatgcgcacgtgccccctgagtctttttttaaaggctgcgtcttggatgtttgcatgggcggaggcgaccgcgacatactctgtaaagcgcttgccagctacgttgcagcttgccaggctgctggggtggtcatcgaagattggcgagcccaagtggggtgcgaaatcacatgccccgaaaacagtcactacgaggtatgcggttcaccgtgtcctgcctcctgcccttcgcctgcccctttaaccactcctgcagtgtgtgagggcccttgcgtagaaggttgtcagtgcgatgccggattcgtcctgagcgctgatcgctgcgtccctctcaataacggatgtgggtgctgggctaacggtacttaccacgaagccggatctgaattttgggcggatggcacctgctcacaatggtgtcgctgcgggcctggtggaggatcactcgtatgcacgcctgcctcctgtggtcttggcgaagtttgcgggctcttgccttcgggacagcacggatgtcaacccgttagtaccgccgagtgtcaggcatggggggatccccattacgtgacactggatggccaccgattcaactttcagggcacctgcgaatacttactgagtgcaccatgccacggccctcctctgggcgcagaaaatttcaccgttaccgttgcaaacgagcataggggctcacaggccgtgtcatacactcggtctgtgacacttcagatttacaatcacagcttgactctctccgcccgttggcctaggaagctgcaggtcgacggtgtcttcgtcaccctgccattccagctcgattccttactgcacgctcacctgagtggggcagatgtcgtggtgacgaccacctccggcttaagcttggccttcgatggggacagctttgtcagattacgcgtccccgctgcttacgcaggctccctgtgcgggctctgcggcaattataatcaggatcccgcagatgatcttaaggccgttggcggaaaacctgctggatggcaggtcggaggggctcagggatgcggagaatgtgtgtcaaaaccgtgcccctcaccgtgtacgccagaacagcaggaatctttcggcggacccgatgcctgtggagtgatatcagccaccgacggtcctctagcaccgtgccacggtttggttccacccgcacagtacttccagggatgcctgctcgatgcatgccaggtccagggccaccccggaggtctgtgtccggcagttgctacgtacgtcgccgcatgtcaggccgctggagctcaactacgcgaatggaggcggccagacttctgccccttccaatgccctgctcactctcactatgaactatgtggggacagctgtccgggatcctgcccctctctatctgcacctgaaggatgcgagagcgcttgccgagagggttgcgtttgtgacgccggatttgtgttgtccggggatacgtgtgtgccagtgggtcagtgcggctgtcttcatgatgatcgttactaccccctgggacagaccttttatccgggacccggatgcgacagcctgtgcaggtgccgcgagggtggagaggtttcctgtgaaccctcctcctgcgggcctcacgagacatgtcgaccatctggaggttcactcggatgcgtggccgttgggagcaccacctgtcaggcatcaggcgatccacactatactaccttcgacggcaggcggtttgactttatgggcacgtgtgtctatgtgctcgcacagacatgtggaacaagacccggactccacaggtttgccgttctccaagaaaacgttgcctggggaaacgggagagtgtctgtgaccagagtgattactgtgcaggtggctaacttcaccttaaggctagagcaacgccaatggaaggtcaccgtcaacggagttgacatgaagctgccagtcgtgctggccaatggacagatcagagcatctcagcacggcagcgacgtcgtaattgaaacagattttggactgcgggttgcgtatgatctggtttactacgtacgcgtgaccgtgccgggtaactactaccaactgatgtgtggactttgcggcaactataatggggatcccaaagatgacttccagaaacccaatggaagtcaggccggtaacgccaatgagtttggcaattcctgggaggaggtcgttcccgacagtccttgtctgcccccaccaacctgtcccccaggtagtgaaggctgtataccctccgaagagtgcccccctgagttggaaaagaagtatcagaaggaggagttctgcgggctcctttcaagcccaaccggaccactttcttcctgccataaattagtcgacccacaggggccactgaaagactgcatctttgatctctgccttgggggaggcaacctgagtattctgtgcagtaacatccacgcttacgtgagcgcatgccaggcagctggaggccaggtggaaccatggcgcaatgagaccttttgtcccatggaatgtcctcagaacagccactacgagctttgcgctgatacatgctcgctggggtgcagtgccctgagtgcgcctctccaatgtccagatggctgcgcagaggggtgccagtgtgacagcgggttcctctacaatggacaagcctgcgtgccaatccaacagtgtggttgttatcataacggcgcttattatgagcctgagcagactgtcctcattgacaattgccgccagcagtgcacgtgtcacgtcgggaaggtggtggtgtgtcaagagcactcctgcaagccaggacaagtatgtcaaccttcggggggaatcttgtcttgcgtgaataaggacccatgtcatggagtcacttgtagaccacaggagacgtgcaaggagcagggcggtcagggtgtttgtctaccgaattatgaagcaacatgttggctgtggggtgaccctcactaccattccttcgatgggagaaagttcgactttcagggtacgtgcaattatgtgctggccacaacagggtgtccgggtgtgtccacccagggtctaacaccctttaccgtcaccaccaagaatcagaacagaggcaacccagcagtttcgtatgtccgggttgtcactgtggccgcactgggcacaaatatttcaatccataaggacgagatcgggaaggtgcgggttaatggcgtgctcacagctctccctgtgtcggtggcagacggcagaatctctgtgactcagggggcatcgaaggccctgctggtggcagacttcggtttgcaagtctcctacgactggaactggcgggttgatgtgacgctgccttcatcataccacggcgcagtgtgtggcctctgtggaaacatggatcgcaaccccaacaacgaccaggtgttcccaaacggaacacttgcacccagtatcccaatctgggggggatcctggagggcacccggttgggaccccttgtgctgggatgaatgtcgaggaagttgccccacatgcccagaggaccggctggagcagtatgagggaccaggattttgcggccctctggctcctggcaccggtggtcctttcacaacatgccatgctcacgttccaccggagtctttttttaagggatgcgtgctggatgtctgcatgggcggaggagaccgagatatcctgtgcaaggctcttgctagctacgtggctgcatgtcaagccgctggggtggtcatcgaagattggagagctcaagttggctgtgaaatcacttgtccggagaactcacattatgaggtttgtggccctccttgcccagcaagttgtccgtcaccagcgccattaacgactcccgcagtctgtgaaggtccctgcgtcgagggatgccagtgtgacgcgggttttgtcttgtcggctgatcgctgcgttccactgaataatggatgcgggtgttgggccaacggcacctatcacgaagctggctcggaattctgggccgatgggacatgctcccagtggtgtagatgcgggcctggcggtggtagcttggtgtgcactccagcaagctgcggcttgggagaagtatgcggcctgctgccatcagggcagcatggctgccagccggtgtccacagccgaatgccaagcttggggagatccccactacgtgaccctggatggtcataggtttgacttccagggaacctgtgagtacctactgtccgcgccatgtcacggacccccattgggggcagagaactttactgtgaccgtcgccaatgagcaccgcggtagtcaagcggtgtcctacacaagaagtgtaacactgcagatatataatcacagcctgaccctcagcgccaggtggcctagaaaactgcaggtggatggcgtgttcgtaactttaccttttcagctggacagtttactgcatgcacacttgtcaggggctgatgtcgtggtgacaaccacatccggactctctttggcttttgacggggattcgttcgtgcgtttacgcgtgcctgctgcttacgccggaagtctgtgtgggctttgtggcaactacaaccaggaccccgctgacgatctgaaagccgtgggcggtaaacctgcaggctggcaggtgggcggagcccagggatgtggggagtgcgtgtccaaaccctgtcccagtccttgcacccctgagcagcaggaatcctttggcggacccgatgcctgtggcgttattagtgcgactgacggacccttggccccttgccatgggctggtccctcctgcccagtacttccagggctgtctccttgacgcctgccaggttcaggggcatccagggggtctgtgcccagctgtggctacatatgtggccgcatgccaagcagccggagcgcaacttagagagtggagacgtcccgatttttgcccattccagtgccccgcacattcacattatgaattatgcggcgactcttgccccggttcatgcccttctctctctgccccagaaggctgcgagtccgcttgtcgcgaaggatgcgtttgtgacgccggatttgtgctgtctggcgatacctgcgtgcctgtgggtcagtgtggttgcctgcacgatgaccggtactatcccctcggtcagaccttctaccccggaccaggctgtgactccctgtgtcgatgccgagagggcggagaggtgagctgcgagccaagtagctgtgggcctcatgaaacatgccggccatccggcggatctctgggctgcgtagctgtggggagcactacttgtcaggcttcaggagacccacactatacaacattcgatggccatcggttcgacttcatgggcacctgcgtctatgtcctggcccagacttgcgggacccggccaggactgcaccgcttcgcagtgttacaggaaaacgttgcctggggcaatggccgagtctcggttacccgtgtaatcaccgtccaggtcgcaaacttcaccctccggctggagcaacgccagtggaaggttacagtgaacggcgtcgacatgaaactgcccgtggtcctggccaatggccaaatccgcgcaagccagcatggcagcgacgtggtaatcgagactgatttcggcctgcgtgtcgcctacgacttagtttactacgtccgcgtgacggtacccggaaactattatcagctcatgtgtggactatgcggcaactacaatggggacccaaaggacgatttccagaagcccaatggctcccaggctgggaatgctaacgaattcggtaacagctgggaagaggttgtgcctgacagcccctgtctgcctcctccaacctgcccaccaggctcagccggatgtattccaagcgacaaatgtccccctgagctcgaaaaaaagtatcagaaggaagagttctgcgggctactgtcatcacctaccggtcctctgtccagctgccacaagctcgtggatccccagggccctctgaaggattgcatattcgacctctgtctgggtggcggaaacctgtcgattctctgcagcaacattcacgcatatgtgtcagcctgtcaggccgctggagggcacgtagaaccgtggagaaatgaaactttttgcccgatggaatgcccccaaaattcacactacgaactgtgcgcagatacatgctcactggggtgctctgcactgtccgcaccactccagtgcccagacggatgtgccgagggctgccaatgtgattctggctttttgtataatgggcaagcctgcgtgcctatccagcaatgtggatgctaccataatggcgtttattatgagcctgaacagacggttctcatagataactgtcgacagcagtgcacctgtcacgtcggcaaggttgtcgtttgccaagagcactcctgcaaaccaggccaggtctgccagccctcaggcggtatcttgagctgtgtcacaaaagatccctgtcacggggttacgtgccggccacaggagacttgtaaagagcagggcggacaaggagtgtgtctgcccaattatgaagccacctgctggctgtggggagacccacattaccacagtttcgacggaagaaagtttgatttccagggtacatgtaactacgtcttggctacaactggatgtcctggcgtctctacacaaggcttgacaccattcaccgttaccacaaagaaccagaatagaggcaatccggcagtgagctacgtgcgcgttgttaccgtggccgcacttggcacgaacattagtattcataaagatgagattggaaaggtcagagtgaacggcgtattaacggccctgcccgtcagcgtggctgacggcagaatctctgtagcccagggggcatcaaaggccctgctggttgctgattttggcctgcaagtctcctacgactggaattggagggtagacgtgacgctgccatcttcctaccacggggcagtctgcggtctctgcgggaacatggatcggaaccctaacaatgatcaggtgtttcctaatggcaccctcgccccttccatccccatctggggaggtagctggagggcccctggctgggatccgttatgttgggacgaatgtcgcggttcctgccccacatgtcctgaggaccgcctcgagcagtatgagggaccaggcttttgtggtcccttatctagcgggactggagggccatttacaacttgccacgcccatgtgccgcctgaaagcttttttaaggggtgtgtcctggacgtgtgcatgggtgggggtgatcgagatatcctgtgcaaagctctggctagctatgtagccgcatgccaggccgctggggtagtcatcgaggactggagagctcaagtgggttgcgagatcacttgtcctgagaattcacactacgaggtgtgcggtcctccgtgcccagccagctgtcccagtcccgcacctcttactactcccgctgtgtgtgaggggccttgcgtggagggctgccaatgtgatgcgggatttgttctcagcgccgatagatgcgtgccgttgaacaacggatgtggctgctgggctaatgggacgtaccacgaggccggttccgaattttgggccgatggcacctgtagccagtggtgccggtgtggcccaggcggaggctctctggtatgtacaccggcaagttgtggcctcggcgaagtgtgcggactgcttccttcaggacagcatgggtgccaacctgtgtctactgccgagtgccaggcgtggggagatccacattatgtcaccctcgatgggcatcggtttgacttccaagggacatgcgagtacttactcagcgccccatgtcacggccctcccttaggtgctgagaattttacagtaaccgttgccaatgaacatcggggatcccaggctgttagctacactcggagcgtgacactgcagatttacaatcactcgctaacactgagcgctaggtggccaagaaagttacaagttgatggcgtttttgttgcactgccctttcagctcgattcattactgcatgctcacctgtccggagccgatgtcgttgtcactaccacgtcaggtctgagcttggcattcgacggggacagtttcgtgaggctacgcgtacccgcagcctacgccgctagcctttgcggcctgtgtggcaactacaaccaagatcctgcagacgatctcaaagctgtgggtgggaaaccggctggctggcaagtgggcggagcccaggggtgcggagagtgcgtaagcaaaccctgtcccagtccatgcactccagaacagcaggagtcttttggcggaccagacgcatgcggcgtcattagcgccaccgacggccctctcgccccatgtcatgggcttgtgcctcctgcacagtactttcaggggtgtttgctggatgcttgtcaagtccagggccacccaggtgggctctgcccggcagtcgccacttacgtggcagcttgccaggcggcaggtgcacagctgggagaatggcgcagacctgatttctgtccgctgcagtgtcctgcacactcccattacgaattgtgtggagattcctgtccagtgtcttgtcctagccttagtgctcctgaaggctgcgagtctgcctgtcgtgaaggttgcgtctgcgacgccggattcgtgctcagtggagacacttgcgtccctgtaggacagtgtgggtgcttgcacgacggtaggtactatccgctgggcgaggtgttttaccccggtccagaatgcgaacgcagatgtgagtgtggccctggcggtcatgtgacttgtcaggagggagcagcttgcggaccccacgaggaatgtcggctggaggatggcgtccaagcctgccacgctaccggctgtggtagatgcctagccaacggtggaatccactatatcacgctggacgggagagtgtatgatctacacggctcttgttcctacgtgctcgctcaagtctgccaccctaaacctggtgacgaggacttctcaattgttcttgaaaaaaacgccgcaggagacctacagagattactcgtcacagtagctggtcaggtcgtgagtctggcccaaggacagcaagtaacagtcgacggcgaagccgtagctctgccagtggccgttggtagagttagggttactgcggaggggaggaacatggttctccaaacaaccaaaggactgagactgctttttgacggcgatgcgcatctgctcatgtcgatccccagcccctttcgtggtaggctgtgcggactctgtggcaactttaatggcaattggtccgacgacttcgtcctccccaacggctctgccgctagctccgtcgagacattcggcgctgcgtggagggccccaggtagctccaaggggtgtggggaagggtgtggacctcaaggctgtccagtgtgcctggccgaggagaccgcaccctacgagtccaatgaagcctgtgggcaactgagaaatccccaggggccatttgccacttgccaggcagtactgagccctagcgagtatttcaggcagtgcgtgtacgacctgtgtgcccagaaaggcgataaagcatttctgtgccggagcttagcagcatacacagctgcttgccaagctgcaggcgttgcagtgaaaccgtggcggacagattccttttgtccgttgcactgtcctgcccattcacactatagcatctgcacccgaacctgccaggggtcttgtgcagcactatccgggctaacggggtgcaccacccgctgcttcgaagggtgtgagtgtgacgacagatttctgctaagtcagggagtgtgtataccagtgcaggattgtggctgtacacacaatgggagatatctccctgtgaacagttcgctgctcaccagtgattgcagtgagcgttgttcatgctcttcctcctctgggctgacgtgtcaggccgcaggatgtcccccagggagagtgtgcgaggtgaaggctgaagccagaaactgctgggccactagaggcctctgcgttctgagcgttggtgccaacttgaccacattcgatggggctcgaggtgcaactacatctcccggagtttatgagctttcatctagatgccccggtctgcagaacacaataccctggtaccgggtggtggcagaggtccagatttgtcatggaaaaactgaggccgtgggacaggtacacattttctttcaagacggaatggtgaccttgaccccaaataagggagtgtgggtgaacggtttacgagtggacctgcctgccgagaagttagcttccgtgagtgttagcagaacccccgacggcagcctgttggtgcgccagaaagctggagttcaggtctggctaggagccaacggcaaggtcgctgtgattgtgtctaatgaccatgccggaaaattgtgtggggcatgcggcaattttgatggggatcagaccaacgactggcacgattctcaggaaaagcctgccatggaaaaatggcgagctcaggatttctctccctgctacggata

SEQ ID NO: 141786 - DNA, 16218 bp, Artificial Sequence
  derived and/or modified sequence
atgggagccctgtggtcatggtggattttatgggcaggcgctaccttgctgtggggattaacccaagaggcgagcgtggatctgaagaatactgggcgcgaggaatttttaaccgcatttctgcagaactaccagctggcctatagcaaggcctacccccgcctattaatatcctccttgtccgaatcaccagcctccgtcagtatcctgtctcaggcagacaacacaagcaaaaaggtgacggtgcggcctggcgagtccgtgatggtaaatattagtgcaaaggccgagatgatcggctctaagattttccagcacgccgtggtgattcatagcgactatgcgatctccgtccaggctctgaacgcaaagcccgataccgcagagctcaccctgctacgtcctattcaggcacttgggactgagtacttcgttctgacccctcctggtacctccgcccggaacgtaaaagagtttgctgtggtggccggtgcggctggcgcctccgtgagcgtgacccttaagggctccgtgacatttaacgggaagttctaccctgcgggcgacgtgctccgagttaccctgcaaccttacaacgtcgcccagttgcagtcctcagtggatctcagcggctcaaaggtgacggctagctcacctgtggcagtgctgtcgggccatagctgtgctcagaagcatactacatgtaaccacgtggtcgagcagctgttacccacctctgcctggggcacccactatgtcgtgcctactctggcttctcaatctaggtacgacctggcctttgttgtggcttcgcaggctacaaaacttacttataaccatggcgggataactggatcgcgtggactgcaggcaggcgatgttgtggagtttgaggtgagaccatcctggcctttatatctctcagccaacgtcggaatccaggttcttctgttcgggaccggagcaattagaaatgaggtcacatacgatccttatctggtgctaattcccgatgttgcggcctattgtccagcctacgtagtgaagtcagtccctggctgcgagggcgtggcgcttgtagtggcccagacgaaagctattagcggcctgaccattgacggacatgccgttggcgctaagctgacctgggaggctgtgcccggaagcgaattcagctatgcagaggtggagctgggcactgccgatatgatacatactgcagaggcgaccaccaatcttggactcctaacttttggactggcgaaggctattgggtatgcaacagcagcagactgcggtcgaaccgttcttagtccggtggaacctagttgcgagggaatgcaatgcgccgcaggacagaggtgtcaagtggtcggaggcaaagcaggatgtgtggctgaatctaccgccgtttgccgggctcagggcgacccccactatactactttcgacggccgacggtacgacatgatgggcacttgttcttacaccatggtggaactctgttctgaggatgatacgctccccgccttctctgtagaggctaagaacgaacacaggggctcaagaagagttagctatgtcggcctcgtgaccgtcagagcctattcccacagcgtctctctaacaaggggggaagtaggctttgtcttagtggataatcaacgcagtagactgcccgtgtccttgagcgaaggcaggctccgagtctaccagagcgggccccgggccgtggtggaattagtttttggcctggtggtaacctatgattgggactgccagcttgccttgtcactgccagctaggttccaagatcaggtttgcgggctttgtggaaactacaacggagatcctgccgatgacttcctcacacccgacggcgctctggccccggatgctgtggagtttgccagttcgtggaagctcgatgacggcgattatctctgtgaggacggctgtcaaaataactgtccagcgtgcacccccggccaagctcagcactatgagggtgaccggttgtgtggtatgcttaccaaactggacggccctttcgctgtgtgccatgataccctcgatccccgacccttcctggagcagtgtgtttacgacctgtgtgtggtcggcggagagcgcctgtcactgtgccgaggcctgtctgcctatgcccaggcctgcctggagctaggcattagtgtcggagactggagatctcccgctaactgtccactgtcgtgtcccgccaactcgcggtatgaactatgtgggccagcctgcccaacgtcatgtaatggcgccgccgcccccagtaattgctccgggaggccatgtgtggagggctgcgtgtgtctgccaggcttcgtcgcctccggaggagcatgcgtgcccgcgtcctcatgcgggtgcacttttcaggggctgcagttggcccctggtcaggaagtgtgggctgatgagctgtgtcagcgcaggtgtacttgtaatggcgccactcaccaggtgacttgccgggataaacagtcctgccccgccggggaaagatgctcggtacagaacggattgctcggctgctaccctgatcgctttggcacatgtcagggctccggggaccctcactacgtttcattcgatgggcgcagatttgactttatgggtacatgcacatatctcctggtgggttcatgcggccagaacgctgccctaccagcctttagagtgcttgtggagaacgagcaccgtggtagccaaactgtcagctacacccgggccgttcgggtcgaagcccgtggcgttaaggtggccgtccggcgcgagtatcccgggcaggtgctggtcgacgacgtgttgcagtatttacccttccaggccgccgacggacaggtacaagtttttcgtcagggacgagatgcagtcgttcgtacagacttcggtcttacggttacctatgattggaatgccagagtgacagctaaggtgccctcttcctatgcagaggccctgtgtggcctatgcggaaatttcaatggtgatccagccgatgaccttgccctccggggaggtggtcaggcagctaatgccctcgcgtttggaaactcatggcaggaggaaacaagaccaggatgcggagcaaccgagcccggcgactgccctaagctggattctctggtggctcagcaactccaatctaagaatgagtgcgggatcctcgccgaccctaaaggaccctttcgcgagtgccacagtaagcttgaccctcagggcgcagtgcgagactgtgtttacgatagatgcctcctacctggacaatctggccccctgtgcgatgcgctcgctacttacgcggccgcctgccaggcggccggcgccacagttcacccttggaggagcgaagaactatgccccttgagctgccctccacattcgcactatgaggcatgctcctatggctgcccgctgagttgcggcgacttacccgtgcctggaggttgtggttcagagtgccatgagggctgcgtttgcgacgaagggtttgctctgtcgggcgagtcatgcctgccactcgcaagctgcggatgtgtccaccagggaacctaccatcccccaggacagaccttctatccaggacccggatgtgattctctgtgccattgccaagaggggggattggtgagctgtgagagttcatcctgtgggccgcatgaggcctgccagccctcaggtggctctttgggatgcgtcgccgttggcagctccacttgccaagcttcaggcgaccctcattacactacatttgatggtagaaggtttgactttatgggcacatgcgtgtatgttttggcgcagacctgcggtacccgacccgggctgcatcgcttcgcagtcctccaggagaatgtggcatggggtaacggccgcgtgagcgtgacccgcgtgatcacagtgcaagtggcgaactttacactcaggctggaacagagacagtggaaagttacggtgaacggcgtcgatatgaagcttcccgtggtcctcgcaaacggtcaaataagagccagccagcacgggtcagacgtcgtgattgagactgatttcggtttgcgagttgcttacgatttggtttactatgttcgcgtgacggtgcccggaaactactatcagcagatgtgtggtctctgcggcaactataacggcgaccccaaagacgactttcaaaagccaaatggttcccaggccggaaacgctaatgagttcggaaacagttgggaagaagttgtgccagattccccgtgtctccctcctaccccatgccctcctgggtcagaggactgcattccatcccacaaatgtccacctgaattggagaagaagtatcagaaagaggagttttgcggactgctgtcctcacccaccggacctctgagctcatgccataagctcgtggaccctcagggaccgctgaaagattgcattttcgacctgtgcctcggggggggtaacctgtctatactgtgcagtaatatacacgcctacgtttctgcatgccaggcggctggaggccatgtggaaccttggagaactgagacgttctgccccatggaatgccccccgaactctcattacgaactttgtgccgacacttgttccctgggatgcagtgccctctccgccccaccccaatgccaggatgggtgtgcggagggatgccaatgtgactcagggtttctatataatgggcaggcttgtgtaccaatccagcaatgcggttgctatcataatggcgtttactacgagcctgaacagactgtactgattgataactgcagacagcagtgcacatgtcatgcgggcaagggcatggtgtgccaggagcacagctgtaaacccggtcaggtatgccaacccagcggcggaatcctttcctgcgttacgaaggacccatgtcacggcgtgacctgcagacctcaggagacctgtaaggagcaaggaggccaaggagtctgcttgcccaactatgaggcgacctgttggctgtggggcgatccacattaccactcttttgacgggcgtaaattcgactttcagggtacgtgcaactacgtactggccacaactggttgccctggagtctccactcaaggacttaccccttttacagttaccaccaaaaaccagaaccggggcaacccagcagtgtcatatgtgcgggtcgtaacagtcgccgctctagggaccaatatttctattcataaggatgaaatcggaaaagtccgcgtcaatggtgtgttaactgcactgcctgtcagtgtcgctgatggaagaatctctgtgacacaaggagctagcaaggcactgctggtggctgatttcggtttgcaagtcagttatgactggaattggcgggttgacgtgacactaccaagcagttaccacggcgccgtctgcggcctctgtggaaatatggataggaatcccaataacgaccaggtctttcccaacggcaccctggcccctagtatccctatctggggtggcagctggcgtgcccccggctgggaccctctctgctgggatgaatgcaggggcagctgcccgacctgcccggaggaccggttggagcagtacgagggccccggcttttgtggccctctggcccccggcaccggcggacctttcactacgtgtcacgctcatgtccccccagaaagtttcttcaaaggctgcgtgcttgacgtgtgtatgggcggcggggacagagacatcctttgcaaagccctagcttcttacgtcgccgcatgccaagctgcaggcgtcgtgatcgaggattggagagcccaggtaggatgtgagatcacgtgtccagagaacagccactacgaagtgtgcgggtctccttgcccagcaagctgtcctagcccggctcctttaaccaccccagccgtgtgcgagggcccttgtgtggaaggctgtcagtgtgatgctgggttcgtactgagcgccgacaggtgcgtgccactgaacaatgggtgtggctgctgggccaatggcacataccacgaggccggttctgagttttgggccgacggtacatgcagccagtggtgtcggtgcggcccaggaggtggctccttagtgtgcactccagcctcgtgtgggctgggggaggtctgcgggctcctgccctctgggcagcacggctgtcaaccagtgtccactgccgaatgccaggcctggggagatccccattatgtgaccttagacggtcaccgatttaatttccaaggcacgtgcgagtatttgctatcggctccttgccatggcccacctctaggcgctgagaatttcaccgtaacagttgcaaatgagcaccgtggttcacaggcggtttcgtacaccaggagcgttaccctccagatttacaatcattctctcacactgtccgcccgttggcctcggaaactgcaggtggatggcgtctttgtaactctgccctttcagctagactctctcctccatgcccacctttcgggtgccgacgtggtcgttactacgacatccggtctttctctggcattcgacggggatagttttgtacggctgagagtcccagcagcgtacgctggctctctgtgcggactatgtgggaactacaatcaggacccggccgatgatctgaaagccgtcggcggtaaaccagctggatggcaggtgggcggcgcccaaggatgcggggagtgcgtcagcaagccttgtcccagcccgtgcacacctgaacagcaggagagcttcggcggcccagacgcctgcggcgtcatctccgctacagatggaccgctcgctccctgtcatggcctcgtcccacccgcccagtacttccagggatgcctgctggacgcttgtcaagtgcagggacacccggggggactctgcccggccgtggctacctacgtggccgcttgccaagccgccggagctcaacttagggaatggcggaggccggatttttgcccgtttcagtgtcctgcccattcccactatgaactttgcggggatagctgcccagggtcatgtcccagcttatctgcccccgaagggtgtgagtcagcttgcagagaggggtgcgtctgcgacgcgggctttgtgctgtcaggtgatacgtgcgtccctgtcggacagtgtgggtgcttacacgatgacagatactatcctctcgggcagactttttaccctgggcccggatgtgactccctgtgccgttgccgagaagggggcgaggtctcttgtgagccttcatcttgcggaccccacgaaacgtgtaggcccagcggcggctcccttggctgcgtggcggttggaagtaccacatgtcaggcttcaggggacccacactataccacatttgacggacggcgctttgactttatggggacctgtgtgtacgtgctggcacagacgtgtggcactaggcccggcctgcacaggttcgccgtgctgcaggaaaacgttgcatggggtaatgggagagtttcagttacacgtgtgatcacagttcaggtggctaacttcactttaaggctggaacagcggcagtggaaggtgactgtgaatggcgtcgatatgaagctgccagtcgtgttagctaacggccagattcgggcttctcagcacggatctgacgttgtgatagaaaccgatttcggactcagggttgcatatgatcttgtatattacgtgcgagtgacggtgcccggcaattattaccagttaatgtgtggcctgtgtggaaactataatggcgatcctaaagatgatttccagaagcctaatggctcgcaggcgggaaatgccaacgaattcggaaattcatgggaggaggtcgtgccggactccccttgcctaccacccccaacttgcccacctggatccgagggctgtatcccgagtgaggagtgcccgcctgagctggagaaaaaataccagaaggaggaattctgcgggttactgtccagccccacagggcccctaagttcctgccacaagcttgtagacccccagggccccctgaaagactgcatcttcgatctgtgcttaggaggcggtaacttgagcattctctgcagtaatattcatgcctatgtatctgcatgccaagctgccggaggccaggtagagccctggagaaacgaaaccttttgcccaatggagtgccctcaaaacagccactatgagctgtgcgctgatacctgctccctcggttgttctgcactgagcgccccactgcagtgcccagacggatgcgccgagggctgccaatgcgacagcggctttttatacaatggccaagcgtgtgtcccgatccagcagtgcggatgttaccacaatggagcctactatgagccagaacagactgtgctgatcgataactgtcggcagcaatgtacttgccacgttgggaaagtggtggtgtgccaggagcattcatgtaaacccggacaggtctgccaacccagcggtgggatcctctcttgcgtgaacaaagatccctgtcatggagtgacatgcagaccgcaagagacgtgcaaagagcagggcggccaaggcgtgtgtctgccaaactacgaggccacctgttggctctggggcgacccacactatcactccttcgatggtcggaaattcgatttccaagggacctgcaactacgtgctcgctaccacaggatgccctggtgtgagcactcagggcctgaccccttttaccgtaaccacaaagaatcagaacagggggaaccccgccgtctcctatgttagagtggtgaccgtagccgccctcggaaccaatattagtatccacaaagacgaaattgggaaggtgcgagtcaacggtgttctgactgcgctgcctgtgtccgtagcagacggacgtataagtgtgacccagggcgcgtcgaaggccctcctggtcgccgattttggcttgcaggtgagctatgactggaattggagagtcgacgtcacccttccgagttcttaccacggcgctgtgtgcggtctgtgcggcaatatggacaggaaccccaacaacgatcaggttttcccaaacggcactttggcaccttcaatcccaatctggggcggatcctggagagcacctgggtgggatccactttgctgggacgaatgcagaggctcctgcccaacttgtccggaggacaggttggaacagtacgaaggccctgggttctgtggacccctggctccgggcaccggaggccctttcactacctgtcacgcccacgtccctcccgagtctttttttaagggttgcgttctggatgtgtgcatgggtggcggtgacagagacattctgtgtaaagctctggcatcttatgtggcggcatgtcaagccgcaggcgtggttattgaagattggcgagctcaggtgggctgcgagataacatgccccgaaaattcccactatgaggtgtgcggacccccttgtcccgcatcttgcccttctcctgccccactcacaacacccgcggtctgcgagggcccatgcgtggaaggatgtcaatgcgatgccggattcgtgcttagtgccgatcgctgtgtcccactgaacaatggttgcggatgttgggcgaacggtacctatcatgaagctgggagcgaattctgggctgatggtacgtgttcccagtggtgcaggtgcggccccggcggggggagtctcgtgtgcactccggctagctgcggcctaggtgaggtttgcggactcctcccttcaggacagcacggctgccagcccgtcagtaccgctgagtgccaggcatggggggatccacattacgtgaccttagacggccatcgtttcgacttccagggcacgtgcgaatacctgctgtccgctccctgtcatggtcctccactgggcgctgaaaatttcactgtcactgtggctaacgagcatcgcggaagtcaggccgtgagctacacccgctcagtgaccctgcagatctataatcattcactgaccttatccgcacgctggccaaggaaactgcaagtggatggcgtgtttgtgactttacccttccagcttgatagcttactccatgcccatctgtccggagctgatgtcgtggtgaccacaacatcagggctgagtctggctttcgacggcgattccttcgtgagattgagggttcctgctgcctacgctggatcgttgtgcggactgtgcggcaactacaatcaggaccccgccgacgatctgaaggctgttgggggcaaacccgcaggttggcaggtcggcggagcccagggttgtggcgaatgcgtttctaaaccatgtccatcgccatgtaccccggagcagcaagaatcatttggtgggccagatgcatgcggcgttatttccgctacagatggtcctctagctccgtgtcatggccttgtgccgcctgcccagtatttccagggttgcctactggatgcctgtcaagtccaaggccaccctggtggattatgtcctgcggtggccacctatgtggcggcttgtcaggccgcaggggctcagctgcgagaatggcgcagacccgacttttgtccgttccagtgtccagcccacagccactatgagctatgtggagactcgtgccctgggtcctgccccagcctctctgccccagaaggctgcgagagcgcctgccgcgagggatgcgtctgtgacgcgggattcgtactctccggcgacacgtgcgttcctgttggccagtgcggatgtttacacgacgaccgctactacccgttagggcaaacgttttatcccggaccgggctgcgatagtctgtgtcgttgtcgcgagggaggtgaggtgtcttgtgagcctagctcttgcggccctcacgagacgtgcaggcctagtgggggttcccttgggtgtgtcgccgtcggaagcactacctgtcaggctagtggagatccccactataccacattcgacgggcaccgatttgactttatggggacgtgcgtgtatgttctcgcccagacttgtgggacccggccgggcctgcaccggtttgctgttttacaggaaaacgtggcctgggggaatggtagagtgagtgtgacacgggttatcactgtgcaagtggcaaacttcaccttgcgcttagagcagcgccagtggaaagtgacagtgaacggtgtcgacatgaagctacccgtggtgctggccaacggacagatacgtgccagtcagcatggatccgatgtggtgatcgagactgacttcgggcttagagttgcctatgacctggtttactatgtgcgagtgactgtgccagggaattattaccagctcatgtgcgggctgtgcggaaactataatggcgaccccaaagacgactttcagaaacccaatggttctcaagctgggaacgctaatgaattcgggaatagttgggaggaagtggtgcctgattctccctgcttaccgccacccacgtgtccccccggctcagctggctgcatccccagtgataagtgccctcctgagctcgagaagaagtaccagaaggaggagttctgtggccttctttcttcgccaaccggacctctcagtagctgccacaagttggtcgatccgcaaggaccactgaaggactgcatattcgatttatgtctggggggtggtaatctaagcatcttgtgtagcaatatccacgcttatgtctctgcatgccaggcagcaggcggtcatgtcgagccttggagaaatgagaccttctgcccaatggaatgtccacagaacagtcactatgagttgtgcgccgatacctgctccctggggtgctcagccttaagcgcacccttacagtgtcccgatggctgtgccgagggatgccagtgcgactccggattcctgtataatggacaggcttgcgtcccgatccagcagtgtggttgttaccacaatggtgtatattatgagccagaacagactgtgcttatcgataactgtaggcagcaatgcacctgccacgtgggtaaagttgtggtctgtcaggagcactcgtgtaagccagggcaggtgtgccaacctagcggggggattctaagttgcgttacgaaagacccttgccacggtgtgacctgcaggcctcaggaaacctgtaaagagcagggtgggcagggcgtctgtctgccaaattatgaagcaacgtgttggctgtggggggaccctcactatcattcatttgacggcaggaagttcgatttccagggcacttgcaattacgtcctagcaacaacgggatgtcccggggtgtcaacacagggactgaccccttttaccgtcactactaaaaaccagaaccgagggaatcctgccgtgtcatatgttagggtggtaacagtggcggcactgggaacaaatatttcaatccacaaggatgaaatcggaaaggtccgtgtgaacggggtcctgaccgcccttcccgtgagtgtggccgacggtcgtatttctgtagcccagggcgcctccaaagccctacttgtcgccgattttggcctccaggtgagctacgattggaactggcgggttgacgtaacattgcctagcagctaccacggagccgtatgcggcttgtgtgggaacatggaccgcaatcctaacaatgaccaggtgtttcccaacggcacgttggctccttcaatccctatctgggggggaagctggagagcacccggatgggacccactgtgctgggatgagtgccgcggctcttgtccaacctgtccagaagatcgcctggagcagtacgaaggccctggattctgcggccccctttcctcaggcactggtgggccatttaccacctgtcatgcacacgtgcccccagaatccttttttaagggatgcgtattagatgtgtgcatgggcggcggcgatcgcgatatcctctgcaaagctttggcttcgtatgtggccgcatgccaggcagccggggtcgtgatcgaagattggcgcgcgcaggtaggttgcgaaatcacgtgtccggaaaactcacactatgaagtgtgcggaccgccatgtcccgcatcttgcccttcacccgctcccctcactacccctgccgtttgtgaaggcccctgcgtcgagggttgtcagtgtgatgctggattcgtactgtctgccgatagatgtgttcccctgaataatgggtgtggctgttgggccaatggaacataccatgaagcaggtagtgagttctgggccgacggtacatgctcccagtggtgtcgttgtggacccgggggggggtcccttgtgtgtacccctgcatcctgtggattgggcgaggtctgcggcttacttcctagcggacagcatggttgtcaacctgtgtcaactgctgagtgccaagcttggggggaccctcattatgtgaccctggacgggcacagatttgactttcagggtacctgtgagtatttgctgagtgcaccttgccacggacccccactgggggcagagaatttcacagttacggtggcaaatgagcatagaggctctcaagcagtgtcttacacccggtcagtcacattacagatatataatcacagtttgacccttagcgctcggtggccacgcaaactccaagtcgatggcgtgttcgtggcacttccattccagttggactctctgctccacgcccacctctccggagctgacgtggtcgtgaccaccacatccgggctatcactcgctttcgatggagattccttcgtccgtctgcgagttcccgctgcttacgctgcctctctgtgtggcctgtgtggcaactacaatcaggacccagcagatgacctgaaggctgtgggtggtaagcctgcgggatggcaggtaggaggagcccagggttgtggggagtgtgtgtcgaagccatgtccctccccatgtactcctgagcagcaggagagcttcggcggaccggacgcgtgtggtgtgattagtgctaccgatggcccgctggcaccttgtcatggtctggtgcccccagcccagtactttcagggctgcttgctcgatgcctgtcaagtgcaaggacacccaggaggattatgtcctgctgtcgccacgtacgtggcagcgtgtcaggcagccggagcccagctcggtgagtggcggcgacctgacttctgccctctgcagtgtcctgcgcactctcattatgaattgtgcggagatagctgcccagtgtcttgtccctcccttagcgccccagaaggttgtgagtccgcctgcagggaggggtgtgtctgcgacgccggattcgtgctgtccggagatacctgtgttcccgttggacaatgtgggtgtctccacgatggccggtattatcccttgggagaagtgttctatcccgggcccgagtgtgaaagaagatgcgagtgtggacctggcgggcatgtgacctgccaagagggagcggcctgcgggcctcatgaggagtgcaggctggaggatggagtgcaggcttgtcatgccaccggatgcggccggtgccttgccaatgggggaatccactacatcacactcgatggacgcgtttatgacttgcacggcagctgcagctacgttctggctcaggtgtgccacccaaagcccggcgatgaagattttagtatcgtgctggagaaaaatgctgccggtgacctgcaacgcctcttggttactgtggccgggcaggtggtgtctctcgcgcaagggcagcaggtcacagttgacggcgaggccgtcgcgctgcctgtggctgtggggcgcgttcgtgttacagctgaaggtcggaacatggtgcttcagactaccaagggcctgaggcttctttttgacggcgatgctcacctcctgatgtccataccaagcccgttccgtggtaggttatgtggactgtgcggtaactttaatgggaactggagtgacgatttcgtgctgcctaacgggtctgctgcaagttcagtggagacttttggcgcagcatggcgcgcccctggaagcagcaagggctgcggagagggatgcggaccccaggggtgcccagtgtgcttggccgaggaaactgcgccatacgagtctaacgaagcctgtggacagctgcgaaaccctcaggggcctttcgccacatgccaagctgtgttgtcgccctccgaatatttcagacaatgcgtgtatgatctttgtgcccagaagggggacaaggcattcctctgtcgcagtttagccgcgtatactgctgcgtgccaggctgcgggggtcgctgttaagccctggcgaaccgattccttttgccccctgcactgcccagcccattcccattattcgatctgcacccgcacctgccagggctcatgcgcagccctctccggactgacaggttgcacaacgcggtgttttgaagggtgcgaatgcgacgaccggtttctgctatctcaaggggtgtgcattcccgtccaggactgtggatgtacacacaatggccgttatcttccagtgaattccagcttgctgacaagcgactgcagcgaacggtgtagctgtagcagttcatctggacttacctgccaagctgctggttgccctccgggaagggtgtgtgaagtcaaagcagaggcccgcaactgctgggctacccgtgggctgtgtgtgttgtcagtgggagctaatttgaccacttttgacggcgcaaggggcgccactaccagccccggcgtttacgaactgtcaagcaggtgccccggtttacagaatacgattccatggtatcgtgtggtggccgaggtgcagatttgtcacggaaagactgaagctgtgggccaggtccacattttttttcaagatggcatggtcacccttacacccaataagggcgtgtgggtgaacggactcagagtagatctcccggctgaaaaactggcctcagttagcgtgtccaggactcctgacggaagtctccttgtcagacagaaggccggggtacaggtatggctgggggccaacggcaaggtagcagtaatcgtttcgaacgaccacgctggtaagttgtgcggggcttgtgggaatttcgatggggaccaaactaatgactggcacgactcacaggaaaagcctgctatggaaaagtggagagcccaagacttttccccttgctatgggtag

SEQ ID NO: 141787 - DNA, 16218 bp, Artificial Sequence
  derived and/or modified sequence
atgggcgccctctggagctggtggattctgtgggctggagctacactcctttggggcttaacgcaagaggcttccgtcgacctgaagaacacagggcgcgaggaatttctgactgcatttctgcaaaactaccagctggcatactcaaaagcatatccaaggctgctgatctcatccttgtctgagtcacctgcaagcgtatcaatcctttcccaggccgacaatacatccaaaaaagttactgtgagaccaggcgaatcagtaatggtcaatatctccgcaaaagctgaaatgatcggatccaaaattttccagcacgccgtcgtcattcatagcgattacgctatctcagttcaggcactgaacgctaaacccgataccgccgagttaacactactgcgccctatccaagcgttaggtacagaatactttgttttaacacctcctgggacctcagcccgtaatgtcaaagaatttgcagtggtcgctggagctgcaggagcaagcgtttctgtgacactcaaggggagcgtgactttcaatggtaagttctatccagctggagacgttttaagagtcaccctgcagccatacaacgtcgcacaattgcaaagcagcgtcgatcttagcggctccaaagtgactgccagttctcccgtcgccgttctgagcggtcattcatgtgcacagaaacacacgacctgcaatcacgttgtggagcaacttctgcccacctcagcctggggcacacattatgtagtgcccaccttagcaagtcagagtcgatatgatctggcattcgtcgtcgctagccaggcaacaaaactgacatataatcatggtggaattactggcagtagaggtttacaagctggggatgtagtggagttcgaagtccggccttcctggccattgtatttatctgccaacgttggtattcaggtcttactattcgggacaggggcaatccggaatgaagtgacctatgacccttatctggtgctgattcctgacgtggctgcctattgcccagcttacgttgttaaaagcgtaccgggatgtgagggcgtggccctggtggtagctcagacgaaggccataagcggacttacaatcgatggccatgccgtcggcgccaaactcacctgggaggctgtacctggatctgagttctcctatgcagaagtggagctggggacggctgacatgattcacacagccgaagctacaactaacctcggtctgctgacatttggtcttgccaaggctataggatacgccactgcagctgattgcggaaggactgtgttgtcccctgtggagccttcttgcgaaggtatgcagtgcgcagccggtcaacgctgccaggtggtcggagggaaggcaggatgcgtcgcggaatcaacggctgtatgcagagcacagggggatcctcattacactacatttgacgggagaagatatgatatgatgggcacctgcagttacacgatggttgaactgtgctctgaagacgatacccttcctgctttcagcgtggaagcaaaaaatgaacacagagggagtagaagggtttcttacgtaggcttggtgaccgtccgcgcgtactcccattctgtgtcattgactcgcggtgaagtggggttcgttctggtggataaccagcgtagtagactgcccgtctcattgtccgaaggtagattgcgagtgtaccagtcgggacctcgagccgtcgtggaactagtatttggcctcgtggtgacttatgattgggattgccaactagccctctccttacctgcccgcttccaagaccaggtgtgtgggctctgtgggaattataacggagatccagctgacgactttctcacccccgacggcgcccttgcacctgatgccgttgagttcgcatctagttggaaactggacgacggagactacctttgcgaagacgggtgccaaaataattgccctgcctgcacgcccggccaagctcagcattatgaaggagatcgcctgtgcggcatgttgactaaattagacggacctttcgccgtatgtcacgatacactcgatcctaggccattcctggaacaatgcgtctacgacctgtgtgttgtgggcggcgaaagactgtcactgtgtagagggttaagcgcctatgcacaagcctgtttagaattaggaataagtgtgggcgactggagaagccccgctaactgcccattaagctgccctgccaacagccgctacgagctgtgtggtcctgcatgccccacatcctgtaacggcgccgcagctccgtccaattgtagtggaaggccctgcgttgaaggttgtgtttgcttacccggattcgttgctagcggaggtgcttgcgtgcctgcgagctcctgtggttgtacattccaaggactccagctggcccctggccaagaggtctgggctgatgagctgtgtcagcgacgctgtacctgcaatggagctacccaccaagtgacgtgtagagacaaacagtcctgccctgcaggagagagatgctctgtgcagaacggcctcctgggttgctatcccgatcgttttggcacctgccaaggctcaggtgatccacattacgtgtcctttgatggcagaaggttcgatttcatgggcacctgtacctatctgcttgttggctcatgtggacagaatgccgccctcccagcttttcgagtgttggtcgaaaatgagcatagaggctcacaaaccgtaagctatacccgtgctgtgagagtggaagctaggggtgtaaaagtggcagtaagacgggaatatcccggccaggtgctagtggacgatgtgctccaatatctgccttttcaagcagctgacggccaagtgcaagtgttcaggcagggacgggacgccgtggtgagaacagacttcgggttaaccgttacatacgactggaatgccagggtgacagccaaagtcccctcttcatatgcggaagcgctatgtggactgtgtgggaacttcaatggcgatcccgccgatgaccttgccctaagaggaggaggccaggcagcaaatgcacttgcatttggcaactcctggcaggaggagactagacccggatgtggagcgacagagcccggtgattgtcccaaactcgactcactggtggcccagcaattacaaagtaagaacgaatgtggaattctagctgatcctaagggtccatttagggaatgtcatagtaaattagacccccagggggccgtgcgagactgtgtgtatgacaggtgcctgctacctggtcagtccggccccctgtgtgacgcgcttgctacatatgccgccgcgtgccaggcagctggcgccaccgttcacccatggagaagcgaagaattgtgtcccctgtcctgtccgccgcatagccattatgaagcatgttcatacgggtgccccttgagttgcggcgatctgcccgtcccaggcggttgtgggtcagaatgtcatgaaggatgcgtctgtgacgaaggatttgcactaagcggcgagtcttgtttacccctggcttcatgcggctgtgtgcatcaaggaacctatcaccctcctggacagaccttctaccccggtcctggatgtgactcgttgtgccattgtcaagaaggaggactagtgtcatgcgagtcttcctcctgtggtccccacgaagcatgccaaccatccggcggcagtttgggctgtgttgctgtcggaagctctacatgccaagcctccggcgatccacactataccaccttcgatgggaggagattcgatttcatgggaacctgtgtgtacgttttagcgcaaacatgcggtacgagaccaggacttcacagatttgctgttcttcaggagaatgtggcctggggaaatggccgggtgtcggtgacaagggtgatcacggtgcaagtggcaaattttaccctccgactagagcagcggcaatggaaggtgacagtgaatggcgttgacatgaagctccctgtggtgctggcgaacggacagatccgcgcctctcagcacgggtctgacgttgtgatagaaactgattttgggttgagagtggcatatgacttggtatactatgtaagggttacagtccctggaaattactatcagcagatgtgcggcctatgtggcaattataacggagatccgaaggacgacttccagaagcccaacgggtcccaggctggcaacgctaatgaatttggaaattcttgggaggaagtagtcccggattcgccatgccttcccccaactccttgtcccccaggttctgaggattgcatccctagccataaatgtcctcccgagcttgagaagaagtaccagaaagaagaattctgcggcctcctatctagcccaactggacccctatcgtcgtgccacaagctggtcgatccacaaggacccctgaaagactgcatatttgacctgtgcctgggtggcggcaacctgtcaattctgtgtagtaatatccatgcatacgtgtcagcatgtcaggctgctggtgggcatgtagaaccttggcgcaccgaaacgttctgtccaatggaatgtcccccaaattcacattacgaactctgcgccgacacatgtagcctgggttgttccgccctgagtgctcctccccaatgccaggacgggtgtgcagaggggtgtcagtgtgactctggcttcctttataacgggcaggcctgtgtaccaattcagcagtgcggttgctatcataacggcgtatactacgaacctgagcaaaccgtgttaatcgacaattgccgtcaacagtgtacttgtcacgcagggaaaggcatggtgtgccaggagcactcttgcaaacccggccaagtctgtcagccctcgggaggcattctctcttgcgttactaaggatccttgccatggggtaacatgtagacctcaggagacttgcaaagagcagggtggccaaggtgtgtgcttacctaattatgaagcaacttgttggctctggggggacccccactatcattcctttgacggacgtaaattcgattttcaggggacttgcaactacgtattagccacgactggatgcccaggagtctcgactcagggtttgacaccatttactgtcaccacgaagaatcaaaacagaggcaaccccgctgttagttacgttagagtcgtgactgtggctgcccttggcactaacatcagtatccataaggatgagatcgggaaggtaagagttaatggagtgctgactgcccttcctgtatccgtggcagacggacgaataagcgtgacccagggtgctagtaaggcattactggtcgccgatttcggactgcaggtatcttatgattggaactggagggtggacgttacacttccaagcagctatcacggggccgtctgcgggctatgcggtaatatggaccgtaacccgaataatgatcaggtcttcccaaatggcacattggccccatccattccgatatgggggggtagctggagagccccaggttgggatcccttgtgttgggatgaatgcagaggctcctgccctacttgccctgaggaccggctagaacagtacgaaggcccaggattttgcggacccctagcacctggcactggtggacctttcactacgtgtcacgcccacgtgcccccagagtctttcttcaaaggatgtgtcctggacgtttgtatgggcggtggagatcgcgatatactgtgtaaagctctagcatcctacgtcgccgcctgccaagccgctggtgtagtgatcgaggactggcgggcccaggtgggttgtgaaatcacttgccccgaaaatagccattatgaagtgtgcggaagcccctgtcctgcaagttgtccatcccccgcacctttaacaactcctgcagtatgcgagggaccctgcgtggaagggtgtcagtgcgatgcaggctttgtcctgagcgctgaccgatgcgtccccctgaacaatggatgcggatgttgggctaacggaacataccatgaggctggatccgagttctgggcagatggcacatgctcccagtggtgccggtgcggccccgggggcggctcattggtttgcactcccgcgtcgtgcggtctcggagaagtgtgtggcctacttcctagcggccaacatgggtgtcagcctgtcagtaccgcagagtgtcaggcctggggcgatcctcattacgtaacacttgatgggcatcggttcaatttccagggtacatgtgaataccttcttagcgccccttgccacggcccgccactgggagctgagaactttacagtaactgtggccaacgagcacagaggatctcaagccgtgtcttatactcggtccgttacactgcagatctacaaccattctctgacactgtctgcccgctggccaagaaaactccaggtggacggagttttcgtgacactgcccttccaacttgactcacttcttcatgcccatctctcaggcgccgacgtcgtggttacaacaacatctggacttagtctggcattcgacggcgacagcttcgtcagactgcgggtgcctgccgcctatgccggcagcctctgcggcctgtgcgggaattacaatcaggacccagcagatgatttaaaagccgttggagggaagccagcaggatggcaggtcgggggcgctcaggggtgcggcgagtgtgtttcaaagccctgtccgtcaccttgtacaccggaacaacaagaatcatttggcggaccggacgcatgcggtgttattagtgccactgatggaccattggcaccgtgccatggcttggtaccacccgctcaatatttccagggatgcctcttggatgcctgccaggtacagggacatccaggcggcctgtgccctgccgttgctacttacgtcgccgcctgtcaggctgccggagcacagctgcgcgagtggcgaagacctgacttttgcccttttcagtgtccagctcattcccattacgaattatgcggtgattcctgtccaggcagctgcccctcccttagcgcacccgagggatgtgagtccgcctgccgagaaggctgtgtgtgtgatgcaggatttgttctgtctggtgatacctgtgtgccggtgggccagtgcggctgccttcacgatgacagatattatcctctcggccaaactttttaccccggcccaggatgcgattccctatgtagatgcagagagggaggcgaagtgtcctgtgaacctagttcttgtggccctcacgaaacatgcagaccctctggaggatcactgggttgtgtcgcggtaggatcaacgacgtgtcaagcttcgggagacccccactacaccactttcgacggaaggaggttcgattttatgggcacttgtgtctatgttctcgctcagacttgcggcactaggcccggcctgcacagattcgctgtacttcaagaaaacgtggcctggggcaacggtcgggtctcagttacaagggtcataactgtccaagttgcaaacttcacattgcgcctagaacaacgacagtggaaggtgacagtcaacggagtggatatgaagttacctgtcgtcctggctaacgggcagattcgggcctcacagcatgggtcagatgttgttatcgaaacggatttcggcctccgggttgcctatgacctggtttactatgtgagggtgactgtccccggaaattactaccaactgatgtgcggactatgcgggaactataacggtgatccaaaagatgacttccagaagcccaacggatctcaggccggaaatgctaatgagttcggaaactcttgggaggaagtcgtgcctgacagcccatgccttcctcccccaacttgtcctccaggatctgaaggctgtattcctagcgaagagtgcccccccgagctggagaaaaaataccagaaagaagaattctgcggcctcttatcttcgcctaccgggccccttagctcttgccataaattagtagatccacaaggacccctcaaagactgcatctttgacttatgtttaggaggtggcaacttaagcattctctgcagtaatattcatgcctatgtatctgcatgccaagctgccggaggccaggtagagccctggagaaacgaaaccttttgcccaatggagtgccctcaaaacagccactatgagctgtgcgctgatacctgctccctcggttgttctgcactgagcgccccactgcagtgcccagacggatgcgccgagggctgccaatgcgacagcggctttttatacaatggccaagcgtgtgtcccgatccagcagtgcggatgttaccacaatggagcctactatgagccagaacagactgtgctgattgacaactgtagacagcaatgtacatgccacgttggaaaggtggtcgtttgtcaagaacactcctgtaagccaggccaagtctgtcaacccagtggcggaatactcagttgtgtgaacaaagatccatgtcacggagtaacttgtcgcccacaggagacctgcaaagaacaaggcggccaaggggtgtgtctgcctaattacgaggccacatgttggttgtggggagacccccattatcacagcttcgacggtcggaaattcgattttcaggggacctgcaattacgtgctggccactactgggtgtcccggagtttccacgcaaggactgacaccttttaccgtcacgacgaagaatcagaaccgcggcaacccagccgtttcctacgtgcgcgtggttacagttgcggcactgggcaccaatatttctatacacaaggacgagataggcaaagtaagagttaatggtgtgctgacggcattgccagtttccgtcgctgatggcagaatctctgtcacacagggggcgagcaaggcacttctcgtagcagatttcgggctccaggtgtcgtacgactggaattggagagtggatgttactctccccagctcctaccacggcgccgtttgtggcctctgtggaaacatggatcggaatccgaataacgatcaagtctttcctaacgggactttggctccttctattcctatctggggtggcagttggagggcgcccggctgggatcccctttgttgggacgaatgcagaggaagctgcccaacctgtccagaagaccgcctcgagcagtacgagggcccaggcttctgcggacctctggcccccggcacaggaggcccttttacaacctgtcatgcccacgtacctcccgaatcatttttcaaaggatgtgtgttggatgtgtgcatggggggaggcgatcgcgatatcctctgcaaagcactagcgtcttatgtcgcggcctgccaggccgcaggtgtcgtaatagaagactggcgcgcccaagttggctgcgagatcacctgcccagaaaatagccattatgaggtctgtggacccccttgcccagcctcctgtccaagccccgccccacttacaacaccagccgtgtgtgaaggtccatgcgtggaagggtgccagtgtgatgctggcttcgttctgtctgccgataggtgcgtgcccctaaataatggatgcggttgctgggcgaatgggacttaccacgaggccgggtcagaattctgggccgacggaacttgttcacagtggtgtcggtgtggacccggtggaggatcacttgtctgtacaccagcttcctgtgggctgggagaggtatgcggacttctgccttcaggccaacacggttgtcaaccggttagtacggccgagtgccaagcttggggagacccacattacgtgacactggacggccataggttcgattttcagggcacatgcgaatatctcctttctgcaccctgccatggcccgcccctaggagccgaaaactttacggtgacagtcgcaaatgaacacagaggttcgcaagccgtctcctataccagatcagtcaccctccaaatttataaccacagcctcacgctgtccgctagatggccccgcaaactccaggtagacggagttttcgtgacattaccctttcagctggattctttactgcatgctcacctttctggagcagacgtagtcgtgacaaccacctccggcctgtctcttgcgtttgatggagattccttcgtgcgtctccgtgtccccgcggcatatgccggctctctgtgtggactgtgcggaaactacaatcaggaccctgcggacgatctcaaggcagtgggagggaagcctgctggatggcaggtgggtggagcccaaggctgtggagagtgcgtgagtaagccttgtccatcaccatgtactccggaacagcaagaaagctttggtggacccgacgcatgcggcgtcatttcagccactgatggcccattagcaccttgtcatgggttagtccctccagcccagtattttcagggctgtctcttggatgcgtgtcaggtgcagggtcatcccggaggcctgtgtccggctgtcgccacatacgtggccgcctgtcaagccgctggcgctcaattacgtgaatggagaaggcccgacttttgtcctttccagtgccctgcacactctcactacgaactgtgcggtgatagttgccctggatcctgccccagtctatccgctcctgagggctgcgaatctgcttgtcgagagggatgcgtttgcgatgctggttttgttctctcaggtgacacctgtgtccccgtcggacaatgtgggtgcttgcacgacgacagatactacccgctgggccagactttttacccaggacccggatgtgatagcctctgcagatgtagggagggaggagaagtctcttgtgaaccttcttcatgcggacctcatgagacgtgtcgcccatctggagggagcttaggatgtgtggcggttggcagcactacgtgtcaggcctcaggcgacccacattacactactttcgatggacatagattcgactttatgggaacctgcgtgtatgtgctagcacagacttgcggcactcgccctggcctccatagatttgcagtgctccaggaaaacgtggcatggggtaacggtcgggtgtcagtaacccgggtcataacagtgcaagtggcgaattttactttgcgtcttgagcagcgccagtggaaagtgacagttaacggtgtggacatgaaactgcccgtggtactggcgaatggacaaatacgagcaagccaacatggatctgacgtggtgatcgagactgattttggactccgagtagcctacgacctggtttattatgtccgcgtgactgtacctggcaactattatcagctgatgtgtggcttgtgtggtaattataatggggatcccaaagatgacttccaaaaacccaatggctctcaggctggcaatgcgaatgagtttggcaattcatgggaagaagttgtgcctgacagcccctgcctgcctcccccaacttgcccccctgggtccgcgggatgcattccaagcgacaaatgcccacctgaacttgaaaagaaatatcagaaggaggaattctgtggcctcttgagttctccaaccggccctttgagtagctgccacaaactggtcgacccccaaggtccactgaaagattgcatcttcgatctgtgcttaggcggtggcaacctgtctattctgtgttccaatattcacgcctatgtgagcgcttgccaagctgctggcggacatgtggagccttggagaaacgagactttttgtcctatggagtgtcctcagaactctcattacgaactgtgtgcagacacctgttctcttggatgctccgcactatcagccccccttcagtgcccagatgggtgcgccgaagggtgtcagtgcgattctgggttcctttataacggacaagcatgcgtgcctattcaacaatgtggatgttatcataatggagtgtactatgaacccgagcagaccgtcctcatcgacaactgtcggcaacagtgtacatgtcacgtgggtaaagtcgtcgtctgtcaagagcacagctgtaaacccggccaagtgtgccagccttcagggggcattctgtcctgtgtcacaaaggacccatgccatggcgtgacttgccgtcctcaggagacctgtaaagaacaaggcggccaaggagtttgtcttcctaactacgaagcaacatgttggctatggggagatcctcattatcactctttcgacggccgaaaattcgattttcaaggaacctgtaactatgtactcgccacaacaggctgtcctggcgtttcaacccagggattgacccccttcactgtcacgactaaaaatcagaaccggggtaaccccgcagtgtcatacgtccgggttgtcaccgtggcagctctcggaaccaacatcagcatccacaaagacgagattgggaaagtccgggtgaatggcgttctgacggctttaccggtgagcgtcgccgacggaaggatttccgtagctcagggagcttctaaagcattgttggtcgcagatttcggactgcaagtctcatacgattggaattggagggttgacgtgacactcccttcatcataccacggggccgtatgtggactgtgcggtaatatggacagaaatcccaataacgaccaagtgttccccaatggaactttagcgcccagtataccgatctggggcggctcctggagggcccctggatgggatccgctctgttgggacgagtgcagaggctcctgtccaacatgcccagaggataggctggaacagtatgaggggcctggtttttgcggacccttaagtagcggtaccggaggacccttcacaacatgccatgcccatgtcccgcccgaaagcttcttcaagggatgtgtgttagatgtttgtatgggcggaggagatcgagatatcctgtgtaaagcattggccagctatgtcgctgcctgtcaggctgccggtgttgtgattgaagactggcgagctcaagtcggctgtgaaattacgtgcccagagaacagtcattatgaagtgtgcggcccgccctgtcccgcttcatgccccagtcccgcccccctgaccactcctgctgtatgcgaggggccatgtgtggaagggtgtcaatgtgacgctggttttgtgcttagcgccgacaggtgcgttcccttaaacaacggatgcggttgctgggccaacggcacctaccatgaagccgggagcgaattctgggcagacgggacttgtagccagtggtgccgctgcgggccaggaggagggagcctggtttgtacccccgccagttgcggcctgggagaggtttgcggactgttacccagtggtcagcacggctgtcagccagtctcaacagccgaatgtcaggcatggggtgaccctcactatgttacccttgacgggcaccgttttgactttcaaggaacttgtgagtacctcctatccgcaccatgccatgggccgcccctgggagccgaaaatttcactgtaactgtggctaacgaacataggggctcgcaagccgtaagctacactcgatccgtaaccctccaaatctataaccatagcctgaccctgagcgctagatggccacgtaaattacaggtggacggcgttttcgtggcgctgccttttcaactggattctctgttacatgcccacctcagcggcgccgatgttgtggtgactactactagtgggctcagcctagccttcgacggggacagtttcgttcgcctcagggtacccgccgcttacgctgcgtctctgtgtggcctatgcggtaactataatcaggatccggctgacgatctgaaggctgtaggaggcaagcccgcaggatggcaggtcggaggcgcacagggttgcggagaatgtgtgtcaaagccttgtccatccccatgtacaccagagcaacaagagtcatttgggggaccagacgcatgtggagtgatttcagccaccgacggtccactagccccttgtcacggtctggtccctccagcacaatacttccagggctgtctattagacgcctgtcaggttcagggtcaccccggtggactctgtcccgctgttgccacttatgtagccgcttgccaagccgcaggagcgcagctaggggagtggaggagacccgatttttgcccccttcagtgcccggcgcattcacactacgagctgtgtggagactcttgtcccgtgtcttgcccttctctgtctgcaccggaaggctgtgagtctgcttgtcgggagggctgtgtctgcgatgctggatttgtgctaagcggggatacttgcgtacctgttggtcagtgtggatgcctccacgacggtcgctattaccccctaggagaagtgttttaccccggacccgagtgtgagcggcggtgcgaatgcggcccaggaggccacgtgacatgccaggaaggcgctgcatgcggcccacacgaagaatgcaggctcgaggacggcgtgcaagcctgccacgcaaccggctgcggtcgttgcttggcaaatggaggcattcactatatcactttggacggtcgagtctatgacttgcatgggtcatgtagctatgtattagcccaggtatgtcatcccaaaccaggcgacgaagatttctctattgtgttggagaaaaacgccgcaggggatctccagcggctcctggttaccgtcgcaggccaggtcgtttcactagctcagggtcaacaagtaaccgtggatggagaagctgtcgcgcttcctgtggctgtgggtagggttcgggtaactgctgagggcaggaacatggttctgcagacaaccaaaggcctacgtcttctgttcgacggtgacgcccatcttcttatgagtatcccatcgccattccgagggcgcctctgtggtctctgtgggaattttaacggcaattggtccgacgattttgtcctgcctaatggctctgctgccagttcagttgagacattcggggctgcctggagagcccccggaagcagtaaaggatgcggtgagggttgcggccctcaggggtgtcctgtctgtctcgcagaggagaccgcaccatatgaaagcaatgaggcatgtggacagctcagaaatccccaaggcccatttgcaacctgtcaggctgtcctgtcgcccagtgagtacttccggcaatgtgtctacgacctatgcgcccaaaagggggataaggccttcctctgtcgcagccttgcggcttatacagctgcttgtcaggcagcgggagtggccgttaaaccatggagaactgattcgttttgtccactgcattgcccagctcactcacactattccatttgtactagaacttgccagggatcttgcgccgctctctccgggcttactggatgcacgacacggtgcttcgaagggtgcgagtgtgacgatcgcttcctcctgtctcaaggtgtgtgcattcctgtgcaggattgcggttgtacccacaatggaagatacctgccagtgaattcaagtctgctcacaagcgactgctctgaaaggtgctcatgttcttcgtcatctggattgacatgccaggcagccggttgtccacctgggcgggtctgcgaagtgaaagccgaagctaggaactgttgggcaacaaggggtctgtgtgtcctttccgtgggcgctaacttgacaacttttgatggcgccagaggcgcaaccaccagccccggggtctatgaactttcctcacgctgtcccgggctgcagaatacgatcccatggtacagagtggtagcagaggtccagatctgtcacggtaagacggaagcggtcggacaagtgcacatcttctttcaggacggcatggtaaccctcacccccaataaaggagtctgggtaaatggcttacgagtcgatttgcctgccgaaaaactggcaagcgtgagtgtctctaggactcccgacggctctcttttggtgcggcagaaagccggtgtgcaagtttggttaggcgctaatgggaaagtggctgtcatcgtgtccaacgatcacgcaggaaaattatgtggggcttgtgggaattttgacggagaccagacgaatgattggcacgatagccaagagaaaccagctatggagaagtggcgcgctcaagatttctctccttgctatggttag

SEQ ID NO: 141788 - DNA, 16389 bp, Artificial Sequence
  derived and/or modified sequence
ctgcagccatgggtgccctatggagctggtggatactctgggctggagcaaccctcctgtggggattgacccaggaggcttcagtggacctcaagaacactggcagagaggaattcctcacagccttcctgcagaactatcagctggcctacagcaaggcctacccccgcctccttatctccagtctgtcagagagccccgcttcagtctccatcctcagccaggcagacaacacctcaaagaaggtcacagtgaggcccggggagtcggtcatggtcaacatcagtgccaaggctgagatgataggcagcaagatcttccagcatgcggtggtgatccattctgactatgccatctctgtgcaggcactaaatgccaagcctgacacagcggagctgacactgctgcggcccatccaggccctaggcaccgagtattttgtgctcacaccccccggcacctcagccaggaatgtcaaggagtttgccgtggtggccggtgccgcaggtgcctcggtcagtgtcacgctgaaggggtcagtgacattcaatggcaagttctatccagcaggcgatgtcctaagagtgactctacagccctacaatgtggcccagctacagagctcagtggatctctcggggtcaaaggtcacagctagtagccccgtggctgtcctctctggccacagctgtgcgcagaaacatacgacctgcaaccatgtggttgagcagctgctacccacgtctgcctggggcacccactatgtagtacccacgctggcctcccaatctcgctatgatttggccttcgttgtggccagccaggccacaaagctgacctacaaccatgggggtatcactggctcccgtgggctccaggcaggtgatgtggtagagtttgaggtccggccatcctggccactctacctgtctgcaaatgtgggcatccaggtcctgttgtttggcacaggtgccataaggaatgaagtgacttatgacccctacctggtcctgatcccagatgtggcggcctactgcccagcctatgtggtcaagagtgtaccaggctgtgagggcgtggccctggtagtggcacagacgaaggctatcagcgggctgaccatagatgggcatgcagtgggggccaagctcacctgggaggctgtgccaggcagtgagttctcgtatgctgaagtggagctcggcacagctgacatgatccacacggccgaggccaccaccaacttgggactgctcaccttcgggctggccaaggctataggctacgcaacagctgctgattgcggccggactgtactgtccccagtggagccctcctgcgaaggcatgcagtgcgcagccgggcagcgctgccaggtggtaggcgggaaggccgggtgtgtggcggagtccaccgctgtctgccgcgcccagggcgacccccattacaccaccttcgacggccgtcgctacgacatgatgggcacctgttcgtacacgatggtggagctgtgcagcgaggacgacaccctgcccgccttcagcgtggaggccaagaacgagcaccggggcagccgccgcgtctcctacgtgggcctcgtcactgtgcgcgcctacagccactctgtgtcgctgacccgcggtgaagttggcttcgtcctggttgacaaccagcgctcgcgcctgccagtctccctgagtgagggtcgcctgcgtgtgtaccagagcggaccacgggccgtggtggagctggtctttgggctggtggtcacttatgactgggactgccagctggcactcagcctgcctgcacgcttccaagaccaggtgtgcgggctgtgtggcaactataatggtgacccagcagacgacttcctcacgcctgacggggctctggctcctgacgctgtggagttcgcaagtagctggaagctggatgatggggactacctgtgtgaggatggctgccagaacaactgtcccgcctgcaccccaggccaggcccaacactatgagggcgaccgactctgtggcatgctgaccaagctcgatggccccttcgctgtctgccatgacaccctggaccccaggcccttcctggagcagtgtgtatatgacctgtgtgtggtcggtggggagcggctcagcctgtgccgtggcctcagcgcctatgcccaggcctgtctggagcttggcatctcggttggggactggagatcaccagccaactgccccctgtcctgccctgccaacagccgctatgagctctgcggccctgcttgcccgacctcctgcaacggggctgcggcgccgtccaactgctccgggcgcccctgcgtggagggctgcgtgtgcctcccaggcttcgtggccagcggcggcgcctgcgtgccggcctcgtcgtgtggctgcaccttccagggtctccagctcgctccgggccaggaagtgtgggcggacgagttgtgccaaaggcgctgcacctgcaacggcgccacccatcaggtcacctgccgcgacaagcagagctgcccggcgggtgagcgctgcagcgtccagaacggcctcctgggctgctaccccgatcgcttcgggacctgccaggggtccggggacccacactatgtgagcttcgacggccggcgcttcgacttcatgggcacctgcacgtacctgctggtcggctcatgcggccagaacgcagcgctgcctgccttccgggtgctggtggaaaacgagcatcggggcagccagactgtgagctacacgcgcgccgtgcgggtggaggcccgcggggtgaaggtggccgtgcgccgggagtaccccgggcaagtgctggtggatgacgtccttcagtatctgcccttccaagcagcagatgggcaggtgcaggtgttccgacagggcagggatgccgtcgtgcgcacggactttggcctgactgtcacttatgactggaatgcacgagtgactgccaaggtgcccagcagctatgctgaggccctgtgtggactctgtgggaacttcaacggggacccagctgatgacctggctctgcggggtgggggtcaagctgccaatgcactggcctttgggaacagctggcaagaagagacgaggcccggctgtggagcaactgaaccgggtgactgtcccaagctggactccctggtggcccagcagctgcagagcaagaatgagtgtggaatccttgccgaccccaaggggcccttccgggagtgccatagcaagctggacccccagggtgccgtgcgcgactgtgtctatgaccgctgcctgctgccaggccagtctgggccactgtgtgacgcactggccacctatgctgctgcatgccaggctgctggagccacagtgcacccctggaggagtgaagaactttgcccactgagctgcccaccccacagccactatgaggcgtgttcctacggctgcccgctgtcctgtggagacctcccagtgcccgggggctgtggctcagaatgccatgagggctgcgtgtgcgatgagggctttgcgctcagtggtgagtcctgcctgcccctggcctcctgtggctgcgtacaccagggcacctaccacccaccaggccagaccttctaccctggccccggatgtgattccctttgccactgccaggagggcggcctggtgtcctgtgagtcctccagctgcggaccgcacgaggcctgccagccatccggtggcagcttgggctgtgtggccgtgggctctagcacctgccaggcgtcaggagacccccactacaccaccttcgatggccgccgcttcgacttcatgggcacctgcgtgtatgtgctggctcagacctgcggcacccggcctggcctgcatcggtttgccgtcctgcaggagaacgtggcctggggtaatgggcgagtcagtgtgaccagggtgatcacggtccaggtggcaaacttcaccctgcggctggagcagagacagtggaaggtcacggtgaacggtgtggacatgaagctgcccgtggtgctggccaacggccagatccgtgcctcccagcatggttcagatgttgtgattgagaccgacttcggcctgcgtgtggcctacgaccttgtgtactatgtgcgggtcaccgtccccggaaactactaccagcagatgtgtggcctgtgtgggaactacaacggcgaccccaaggatgacttccagaagcccaatggctcacaggcaggcaacgccaatgagttcggcaactcctgggaggaggtggtgcccgactctccctgcctgccgcccaccccttgcccgccggggagcgaggactgtatccccagccacaagtgtcctcccgagctggagaagaagtatcagaaggaggagttctgtgggctcctctccagccccacagggccactgtcctcctgccacaagctggtggatccccagggtcccttgaaagattgcatctttgatctctgcctgggtggtgggaacctgagcattctctgcagcaacatccatgcctacgtgagtgcttgccaggcggctggaggccacgtggagccctggaggactgaaactttctgtcccatggagtgccctccgaacagtcactacgagctctgtgcggacacctgctccctgggctgctcagctctcagtgcccctccacagtgccaggatgggtgtgctgagggctgccagtgtgactccggcttcctctacaatggccaagcctgcgtgcccatccagcaatgcggctgctaccacaatggtgtctactatgagccggagcagacagtcctcattgacaactgtcggcagcagtgcacgtgccatgcgggtaaaggcatggtgtgccaggaacacagctgcaagccggggcaggtgtgccagccctccggaggcatcctgagctgcgtcaccaaagacccgtgccacggcgtgacatgccggccacaggagacatgcaaggagcagggtggccagggcgtgtgcctgcccaactatgaggccacgtgctggctgtggggcgacccacactaccactccttcgatggccggaagtttgacttccagggcacctgtaactatgtgctggcaacaactggctgcccgggggtcagcacccagggcctgacacccttcaccgtcaccaccaagaaccagaaccggggcaaccctgctgtgtcctacgtgagagtcgtcaccgtggctgccctcggcaccaacatctccatccacaaggacgagatcggcaaagtccgggtgaacggtgtgctcacagccttgcctgtctctgtggccgacgggcggatttcagtgacccagggtgcatcgaaggcactgctggtggctgactttggactgcaagtcagctatgactggaactggcgggtagacgtgacgctgcccagcagctatcatggcgcagtgtgcgggctctgcggtaacatggaccgcaaccccaacaatgaccaggtcttccctaatggcacactggctccctccatacccatctggggcggcagctggcgagccccaggctgggacccactgtgttgggacgaatgtcgggggtcctgcccaacgtgccctgaggaccggttggagcagtacgagggccctggcttctgcggacccctggcccccggcacagggggccctttcaccacctgccatgctcatgtgccacctgagagcttcttcaagggctgtgttctggacgtctgcatgggtggtggggaccgtgacattctttgcaaggctctggcttcctatgtggccgcctgccaggctgctggggttgtcatcgaagactggcgggcacaggttggctgtgagatcacctgcccagaaaacagccactatgaggtctgtggctcaccctgcccggccagctgtccgtcccctgcaccccttacgacgccagccgtatgtgagggcccctgtgtggagggctgccagtgcgacgcgggtttcgtgttaagtgctgaccgctgtgttcccctcaacaacggctgcggctgctgggccaatggcacctaccacgaggcgggcagtgagttttgggctgatggcacctgctcccagtggtgtcgctgcgggcctgggggtggctcgctggtctgcacacctgccagctgtgggctgggtgaagtgtgtggcctcctgccatccggccagcacggctgccagcccgtcagcacagctgagtgccaggcgtggggtgacccccattacgtcactctggatgggcaccgattcaatttccaaggcacctgcgagtacctgctgagtgcaccctgccacggaccacccttgggggctgagaacttcactgtcactgtagccaatgagcaccggggcagccaggctgtcagctacacccgcagtgtcaccctgcaaatctacaaccacagcctgacactgagtgcccgctggccccggaagctacaggtggacggcgtgttcgtcactctgcccttccagctggactcgctcctgcacgcacacctgagcggcgccgacgtggtggtgaccacaacctcagggctctcgctggctttcgacggggacagcttcgtgcgcctgcgcgtgccggcggcgtacgcgggctctctctgtggcttatgcgggaactacaaccaggaccccgcagacgacctgaaggcggtgggcgggaagcccgccggatggcaggtgggcggcgcccagggctgcggggaatgtgtgtccaagccatgcccgtcgccgtgcaccccagagcagcaagagtccttcggcggcccggacgcctgcggcgtgatctccgccaccgacggcccgctggcgccctgccacggccttgtgccgcccgcgcagtacttccagggctgcttgctggacgcctgccaagttcagggccatcctggaggcctctgtcctgcagtggccacctacgtggcagcctgtcaggccgctggggcccagctccgcgagtggaggcggccggacttctgtcccttccagtgccctgcccacagccactacgagctctgcggtgactcctgtcctgggagctgcccgagcctgtcggcacccgagggctgtgagtcggcctgccgtgaaggctgtgtctgcgatgctggcttcgtgctcagtggtgacacgtgtgtacctgtgggccagtgtggctgcctccacgatgaccgctactacccactgggccagaccttctaccctggccctgggtgtgattccctttgccgctgccgggagggcggtgaggtgtcctgtgagccctccagctgcggcccgcatgagacctgccggccatccggtggcagcttgggctgcgtggccgtgggctctaccacctgccaggcgtcgggagatccccactacaccaccttcgatggccgccgcttcgacttcatgggcacctgcgtgtatgtgctggctcagacctgcggcacccggcctggcctacatcggtttgccgtcctgcaggagaacgtggcctggggtaatgggcgagtcagtgtgaccagggtgatcacggtccaggtggcaaacttcaccctgcggctggagcagagacagtggaaggtcacggtgaacggtgtggacatgaagctgcccgtggtgctggccaacggccagatccgtgcctcccagcatggttcagatgttgtgattgagaccgacttcggcctgcgtgtggcctacgaccttgtgtactatgtgcgggtcaccgtccctggaaactactaccagctgatgtgtggcctgtgtgggaactacaacggcgaccccaaggatgacttccagaagcccaatggctcgcaggcaggcaacgccaatgagttcggcaactcctgggaggaggtggtgcccgactctccctgcctgccgccgcccacctgcccgccggggagcgagggctgtatccccagcgaggagtgtcctcccgagctggagaagaagtatcagaaggaggagttctgtgggctcctctccagccccacagggccactgtcctcttgccacaagctggtggatccccagggtcccttgaaagattgcatctttgatctctgcctgggtggtgggaacctgagcattctctgcagcaacatccatgcctacgtgagtgcttgccaggcagctggaggccaggtggagccctggaggaatgaaactttctgtcccatggaatgccctcagaacagtcactacgagctctgtgcggacacctgctccctgggctgctcggctctcagtgcccctctgcagtgcccagatgggtgtgctgagggctgccagtgtgactccggcttcctctacaacggccaagcctgcgtgcccatccagcaatgtggctgctaccacaatggtgcctactatgagccggagcagacagtcctcattgacaactgtcggcagcagtgcacgtgccatgtgggtaaagtcgtggtgtgccaggaacacagctgcaagccggggcaggtgtgccagccctccggaggcatcctgagctgcgtcaacaaagacccgtgccacggcgtgacatgccggccacaggagacatgcaaggagcagggtggccagggcgtgtgcctgcccaactatgaggccacgtgctggctgtggggcgacccacactaccactccttcgatggccggaagtttgacttccagggcacctgtaactatgtgctggcaacaactggctgcccgggggtcagcacccagggcctgacacccttcaccgtcaccaccaagaaccagaaccggggcaaccctgctgtgtcctacgtgagagtcgtcaccgtggctgccctcggcaccaacatctccatccacaaggacgagatcggcaaagtccgggtgaacggtgtgctcacagccttgcctgtctctgtggccgacgggcggatttcagtgacccagggtgcatcgaaggcactgctggtggctgactttggactgcaagtcagctatgactggaactggcgggtagacgtgacgctgcccagcagctatcatggcgcagtgtgcgggctctgcggtaacatggaccgcaaccccaacaatgaccaggtcttccctaatggcacactggctccctccatacccatctggggcggcagctggcgagccccaggctgggacccactgtgttgggacgaatgtcgggggtcctgcccaacgtgccctgaggaccggttggagcagtacgagggccctggcttctgcggacccctggcccccggcacagggggccctttcaccacctgccatgctcatgtgccacctgagagcttcttcaagggctgtgttctggacgtctgcatgggtggtggggaccgtgacattctttgcaaggctctggcttcctatgtggccgcctgccaggctgctggggttgtcatcgaagactggcgggcacaggttggctgtgagatcacctgcccagaaaacagccactatgaggtctgtggcccaccctgcccggccagctgtccgtcccctgcaccccttacgacgccagccgtatgtgagggcccctgtgtggagggctgccagtgcgacgcgggtttcgtgttaagtgctgaccgctgtgttcccctcaacaacggctgcggctgctgggccaatggcacctaccacgaggcgggcagtgagttttgggctgatggcacctgctcccagtggtgtcgctgcgggcctgggggtggctcgctggtctgcacacctgccagctgtgggctgggtgaagtgtgtggcctcctgccatccggccagcacggctgccagcccgtcagcacagctgagtgccaggcgtggggtgacccccattacgtcactctggatgggcaccgattcgatttccaaggcacctgcgagtacctgctgagtgcaccctgccacggaccacccttgggggctgagaacttcactgtcactgtagccaatgagcaccggggcagccaggctgtcagctacacccgcagtgtcaccctgcaaatctacaaccacagcctgacactgagtgcccgctggccccggaagctacaggtggacggcgtgttcgtcactctgcccttccagctggactcgctcctgcacgcacacctgagcggcgccgacgtggtggtgaccacaacctcagggctctcgctggctttcgatggggacagcttcgtgcgcctgcgcgtgccggcggcgtacgcgggctctctctgtggcttatgcgggaactacaaccaggaccccgcagacgacctgaaggcggtgggcgggaagcccgccggatggcaggtgggcggcgcccagggctgcggggaatgtgtgtccaagccatgcccgtcgccgtgcaccccagagcagcaagagtccttcggcggcccggacgcctgcggcgtgatctccgccaccgacggcccgctggcgccctgccacggccttgtgccgcccgcgcagtacttccagggctgcttgctggacgcctgccaagttcagggccatcctggaggcctctgtcctgcagtggccacctacgtggcagcctgtcaggccgctggggcccagctccgcgagtggaggcggccggacttctgtcccttccagtgccctgcccacagccactacgagctctgcggtgactcctgtcctgggagctgcccgagcctgtcggcacccgagggctgtgagtcggcctgccgtgaaggctgtgtctgcgatgctggcttcgtgctcagtggtgacacgtgtgtacctgtgggccagtgtggctgcctccacgatgaccgctactacccactgggccagaccttctaccctggccctgggtgtgattccctttgccgctgccgggagggcggtgaggtgtcctgtgagccctccagctgcggcccgcatgagacctgccggccatccggtggcagcttgggctgcgtggccgtgggctctaccacctgccaggcgtcgggagatccccactacaccaccttcgatggccaccgcttcgacttcatgggcacctgcgtgtatgtgctggctcagacctgcggcacccggcctggcctgcatcggtttgccgtcctgcaggagaacgtggcctggggtaatgggcgagtcagtgtgaccagggtgatcacggtccaggtggcaaacttcaccctgcggctggagcagagacagtggaaggtcacggtgaacggtgtggacatgaagctgcccgtggtgctggccaacggccagatccgtgcctcccagcatggttcagatgttgtgattgagaccgacttcggcctgcgtgtggcctacgaccttgtgtactatgtgcgggtcaccgtccctggaaactactaccagctgatgtgtggcctgtgtgggaactacaacggcgaccccaaggatgacttccagaagcccaatggctcgcaggcaggcaacgccaatgagttcggcaactcctgggaggaggtggtgcccgactctccctgcctgccgccgcccacctgcccgccggggagcgcgggctgtatccccagcgacaagtgtcctcccgagctggagaagaagtatcagaaggaggagttctgtgggctcctctccagccccacagggccactgtcctcctgccacaagctggtggatccccagggtcccttgaaagattgcatctttgatctctgcctgggtggtgggaacctgagcattctctgcagcaacatccatgcctacgtgagtgcttgccaggcggctggaggccacgtggagccctggaggaatgaaactttctgtcccatggaatgccctcagaacagtcactacgagctctgtgcggacacctgctccctgggctgctcggctctcagtgcccctctgcagtgcccagatgggtgtgctgagggctgccagtgtgactccggcttcctctacaacggccaagcctgcgtgcccatccagcaatgtggctgctaccacaatggtgtctactatgagccggagcagacagtcctcattgacaactgtcggcagcagtgcacgtgccatgtgggtaaagtcgtggtgtgccaggaacacagctgcaagccggggcaggtgtgccagccctccggaggcatcctgagctgcgtcaccaaagacccgtgccacggcgtgacatgccggccacaggagacatgcaaggagcagggtggccagggcgtgtgcctgcccaactatgaggccacgtgctggctgtggggcgacccacactaccactccttcgatggccggaagtttgacttccagggcacctgtaactatgtgctggcaacaactggctgcccgggggtcagcacccagggcctgacacccttcaccgtcaccaccaagaaccagaaccggggcaaccctgctgtgtcctacgtgagagtcgtcaccgtggctgccctcggcaccaacatctccatccacaaggacgagatcggcaaagtccgggtgaacggtgtgctcacagccttgcctgtctccgtggccgacgggcggatttcagtggcccagggtgcatcgaaggcactgctggtggctgactttggactgcaagtcagctatgactggaactggcgggtagacgtgacgctccccagcagctatcatggcgcagtgtgcgggctctgcggtaacatggaccgcaaccccaacaatgaccaggtcttccctaatggcacactggctccctccatacccatctggggcggcagctggcgagccccaggctgggacccactgtgttgggacgaatgtcgggggtcctgcccaacgtgccctgaggaccggttggagcagtacgagggccctggcttctgcggacccctttcatctggcacagggggccccttcaccacctgccatgctcatgtgccacctgagagcttcttcaagggctgtgttctggacgtctgcatgggtggtggggaccgtgacattctttgcaaggctctggcttcctacgtggccgcctgccaggccgctggggttgtcatcgaagactggcgggcacaggttggctgtgagatcacctgcccagaaaacagccactatgaggtctgtggcccaccctgcccagccagctgtccgtcccctgcaccccttacgacgccagccgtatgtgagggcccctgtgtggagggctgccagtgcgacgcgggtttcgtgttaagtgctgaccgctgtgttcccctcaacaacggctgcggctgctgggccaatggcacctaccacgaggcgggcagtgagttttgggctgatggcacctgctcccagtggtgtcgctgcgggcctgggggtggctcgctggtctgcacacctgccagctgtgggctgggtgaagtgtgtggcctcctgccatccggccagcacggctgccagcccgtcagcacagctgagtgccaggcgtggggtgacccccattacgtcactctggatgggcaccgattcgatttccaaggcacctgcgagtacctgctgagtgcaccctgccacggaccacccttgggggctgagaacttcactgtcactgtagccaatgagcaccggggcagccaggctgtcagctacacccgcagtgtcaccctgcaaatctacaaccacagcctgacactgagtgcccgctggccccggaagctacaggtcgacggcgtgttcgtggctctgcctttccagctggactcgctcctgcacgcacacctgagcggcgccgacgtggtggtgaccacaacctcagggctctcgctggctttcgatggggacagcttcgtgcgcctgcgcgtgccggcggcgtacgcggcctctctctgtggcttatgcgggaactacaaccaggaccccgcagacgacctcaaggctgtgggcgggaagcccgctggatggcaggtgggcggggcccagggctgcggggaatgtgtgtccaagccatgcccgtcgccgtgcaccccagagcagcaggagtccttcggcggcccggacgcctgcggcgtgatctccgccaccgacggcccgctggcaccctgccacggccttgtgccgcccgcgcagtacttccagggctgcttgctggacgcctgccaagttcagggccatcctggaggcctctgtcctgcagtggctacctacgtggcagcctgtcaggccgctggggcccagctcggcgagtggaggcggccggacttctgtcccttgcagtgccctgcccacagccactatgagctctgcggtgactcctgccctgtgagctgcccgagcctctcagcacccgagggctgtgagtcggcctgccgtgaaggctgtgtctgcgatgctggcttcgtactcagtggtgacacctgcgtacccgtgggccagtgtggctgcctccatgatggccgctactacccactgggcgaggtcttctacccgggccctgagtgtgagcggcgctgtgagtgtgggccaggtggccatgtcacctgccaggagggcgcagcctgtgggccccatgaggagtgccggttagaggatggtgtccaggcctgtcatgccacaggctgtggccgctgcctggccaacgggggcatccactacatcacccttgatggccgtgtctacgacctgcatggctcctgctcctatgtcttggcccaagtctgccacccaaagcctggggacgaggacttttccatcgtgcttgagaagaatgcagctggagatctccaacgcctcctggttactgtggctggccaggttgtgagcctagctcaggggcagcaggtcaccgtggacggcgaggctgtggccctgcctgtggctgtgggccgcgtgcgggtgaccgccgagggccgaaacatggttctgcagacgaccaaggggctgcggcttctctttgatggcgatgcccacctcctcatgtccatccccagccccttccgtggacggctctgtggcctctgtgggaacttcaatggcaactggagtgacgactttgtcctgcccaatggctcagcagcgtccagtgtggagaccttcggggctgcatggcgggcgcccggctcctccaagggctgtggcgagggctgcgggccccaaggctgcccagtgtgcttggcagaggagactgcaccctatgagagcaacgaggcctgcgggcagctccggaacccccagggccccttcgcgacctgccaggcggtgctgagtccctctgagtacttccgccaatgcgtatacgacctgtgcgcgcaaaagggtgacaaagccttcctgtgccgcagcctggcagcctacacggcggcctgtcaggcagctggcgtggccgtgaagccctggaggacagacagcttctgcccgctccattgccccgcccacagccactactccatctgcactcgcacctgccagggatcctgtgcggctctctccggcctcacgggctgcaccacccgctgttttgagggctgtgagtgcgacgaccgcttcctgctttcccagggtgtctgcatccctgtccaagattgtggctgcacccataatggccgatacttgccggtaaactcctccctgctgacctcagactgcagcgagcgctgttcctgttcctcaagctctggcctgacatgccaggcagctggctgcccaccaggccgtgtatgtgaggtcaaggctgaagcccggaactgctgggccacccgtggtctctgtgtcctgtctgtgggtgccaacctcaccacctttgatggggcccgtggtgccaccacctctcctggtgtctatgagctctcttcccgctgcccaggactacagaataccatcccctggtaccgtgtagttgccgaagtccagatctgccatggcaaaacggaggctgtgggccaggtccacatcttcttccaggatgggatggtgacgttgactccaaacaagggtgtgtgggtgaatggtctccgagtggatctcccagctgagaagttagcatctgtgtccgtgagtcgtacacctgatggctccctgctagtccgccagaaggcaggggtccaggtgtggcttggagccaatgggaaggtggctgtgattgtcagcaatgaccatgctgggaaactgtgtggggcctgtggaaactttgacggggaccagaccaatgattggcatgactcccaggagaagccagcgatggagaaatggagagcgcaggacttctccccatgttatggctgatcagtcatccaccaggaacgaagatttcctgaagaagacctggtccctctggaggttgcagtggctgaaggatgcatcatgtgctcctaccctgctctaccgcttttctgggtcacagaggccaaatgtgagagcattgaataaatatcttaagctaagctgc

SEQ ID NO: 141789 - RNA, 16218 nt, Artificial Sequence
  derived and/or modified sequence
augggagcccuguggucaugguggauuuuaugggcaggcgcuaccuugcuguggggauuaacccaagaggcgagcguggaucugaagaauacugggcgcgaggaauuuuuaaccgcauuucugcagaacuaccagcuggccuauagcaaggccuacccccgccuauuaauauccuccuuguccgaaucaccagccuccgucaguauccugucucaggcagacaacacaagcaaaaaggugacggugcggccuggcgaguccgugaugguaaauauuagugcaaaggccgagaugaucggcucuaagauuuuccagcacgccguggugauucauagcgacuaugcgaucuccguccaggcucugaacgcaaagcccgauaccgcagagcucacccugcuacguccuauucaggcacuugggacugaguacuucguucugaccccuccugguaccuccgcccggaacguaaaagaguuugcugugguggccggugcggcuggcgccuccgugagcgugacccuuaagggcuccgugacauuuaacgggaaguucuacccugcgggcgacgugcuccgaguuacccugcaaccuuacaacgucgcccaguugcaguccucaguggaucucagcggcucaaaggugacggcuagcucaccuguggcagugcugucgggccauagcugugcucagaagcauacuacauguaaccacguggucgagcagcuguuacccaccucugccuggggcacccacuaugucgugccuacucuggcuucucaaucuagguacgaccuggccuuuguuguggcuucgcaggcuacaaaacuuacuuauaaccauggcgggauaacuggaucgcguggacugcaggcaggcgauguuguggaguuugaggugagaccauccuggccuuuauaucucucagccaacgucggaauccagguucuucuguucgggaccggagcaauuagaaaugaggucacauacgauccuuaucuggugcuaauucccgauguugcggccuauuguccagccuacguagugaagucagucccuggcugcgagggcguggcgcuuguaguggcccagacgaaagcuauuagcggccugaccauugacggacaugccguuggcgcuaagcugaccugggaggcugugcccggaagcgaauucagcuaugcagagguggagcugggcacugccgauaugauacauacugcagaggcgaccaccaaucuuggacuccuaacuuuuggacuggcgaaggcuauuggguaugcaacagcagcagacugcggucgaaccguucuuaguccgguggaaccuaguugcgagggaaugcaaugcgccgcaggacagaggugucaaguggucggaggcaaagcaggauguguggcugaaucuaccgccguuugccgggcucagggcgacccccacuauacuacuuucgacggccgacgguacgacaugaugggcacuuguucuuacaccaugguggaacucuguucugaggaugauacgcuccccgccuucucuguagaggcuaagaacgaacacaggggcucaagaagaguuagcuaugucggccucgugaccgucagagccuauucccacagcgucucucuaacaaggggggaaguaggcuuugucuuaguggauaaucaacgcaguagacugcccguguccuugagcgaaggcaggcuccgagucuaccagagcgggccccgggccgugguggaauuaguuuuuggccuggugguaaccuaugauugggacugccagcuugccuugucacugccagcuagguuccaagaucagguuugcgggcuuuguggaaacuacaacggagauccugccgaugacuuccucacacccgacggcgcucuggccccggaugcuguggaguuugccaguucguggaagcucgaugacggcgauuaucucugugaggacggcugucaaaauaacuguccagcgugcacccccggccaagcucagcacuaugagggugaccgguugugugguaugcuuaccaaacuggacggcccuuucgcugugugccaugauacccucgauccccgacccuuccuggagcaguguguuuacgaccuguguguggucggcggagagcgccugucacugugccgaggccugucugccuaugcccaggccugccuggagcuaggcauuagugucggagacuggagaucucccgcuaacuguccacugucgugucccgccaacucgcgguaugaacuaugugggccagccugcccaacgucauguaauggcgccgccgcccccaguaauugcuccgggaggccauguguggagggcugcgugugucugccaggcuucgucgccuccggaggagcaugcgugcccgcguccucaugcgggugcacuuuucaggggcugcaguuggccccuggucaggaagugugggcugaugagcugugucagcgcagguguacuuguaauggcgccacucaccaggugacuugccgggauaaacaguccugccccgccggggaaagaugcucgguacagaacggauugcucggcugcuacccugaucgcuuuggcacaugucagggcuccggggacccucacuacguuucauucgaugggcgcagauuugacuuuauggguacaugcacauaucuccugguggguucaugcggccagaacgcugcccuaccagccuuuagagugcuuguggagaacgagcaccgugguagccaaacugucagcuacacccgggccguucgggucgaagcccguggcguuaagguggccguccggcgcgaguaucccgggcaggugcuggucgacgacguguugcaguauuuacccuuccaggccgccgacggacagguacaaguuuuucgucagggacgagaugcagucguucguacagacuucggucuuacgguuaccuaugauuggaaugccagagugacagcuaaggugcccucuuccuaugcagaggcccuguguggccuaugcggaaauuucaauggugauccagccgaugaccuugcccuccggggagguggucaggcagcuaaugcccucgcguuuggaaacucauggcaggaggaaacaagaccaggaugcggagcaaccgagcccggcgacugcccuaagcuggauucucugguggcucagcaacuccaaucuaagaaugagugcgggauccucgccgacccuaaaggacccuuucgcgagugccacaguaagcuugacccucagggcgcagugcgagacuguguuuacgauagaugccuccuaccuggacaaucuggcccccugugcgaugcgcucgcuacuuacgcggccgccugccaggcggccggcgccacaguucacccuuggaggagcgaagaacuaugccccuugagcugcccuccacauucgcacuaugaggcaugcuccuauggcugcccgcugaguugcggcgacuuacccgugccuggagguugugguucagagugccaugagggcugcguuugcgacgaaggguuugcucugucgggcgagucaugccugccacucgcaagcugcggauguguccaccagggaaccuaccaucccccaggacagaccuucuauccaggacccggaugugauucucugugccauugccaagaggggggauuggugagcugugagaguucauccugugggccgcaugaggccugccagcccucagguggcucuuugggaugcgucgccguuggcagcuccacuugccaagcuucaggcgacccucauuacacuacauuugaugguagaagguuugacuuuaugggcacaugcguguauguuuuggcgcagaccugcgguacccgacccgggcugcaucgcuucgcaguccuccaggagaauguggcaugggguaacggccgcgugagcgugacccgcgugaucacagugcaaguggcgaacuuuacacucaggcuggaacagagacaguggaaaguuacggugaacggcgucgauaugaagcuucccgugguccucgcaaacggucaaauaagagccagccagcacgggucagacgucgugauugagacugauuucgguuugcgaguugcuuacgauuugguuuacuauguucgcgugacggugcccggaaacuacuaucagcagauguguggucucugcggcaacuauaacggcgaccccaaagacgacuuucaaaagccaaaugguucccaggccggaaacgcuaaugaguucggaaacaguugggaagaaguugugccagauuccccgugucucccuccuaccccaugcccuccugggucagaggacugcauuccaucccacaaauguccaccugaauuggagaagaaguaucagaaagaggaguuuugcggacugcuguccucacccaccggaccucugagcucaugccauaagcucguggacccucagggaccgcugaaagauugcauuuucgaccugugccucgggggggguaaccugucuauacugugcaguaauauacacgccuacguuucugcaugccaggcggcuggaggccauguggaaccuuggagaacugagacguucugccccauggaaugccccccgaacucucauuacgaacuuugugccgacacuuguucccugggaugcagugcccucuccgccccaccccaaugccaggaugggugugcggagggaugccaaugugacucaggguuucuauauaaugggcaggcuuguguaccaauccagcaaugcgguugcuaucauaauggcguuuacuacgagccugaacagacuguacugauugauaacugcagacagcagugcacaugucaugcgggcaagggcauggugugccaggagcacagcuguaaacccggucagguaugccaacccagcggcggaauccuuuccugcguuacgaaggacccaugucacggcgugaccugcagaccucaggagaccuguaaggagcaaggaggccaaggagucugcuugcccaacuaugaggcgaccuguuggcuguggggcgauccacauuaccacucuuuugacgggcguaaauucgacuuucaggguacgugcaacuacguacuggccacaacugguugcccuggagucuccacucaaggacuuaccccuuuuacaguuaccaccaaaaaccagaaccggggcaacccagcagugucauaugugcgggucguaacagucgccgcucuagggaccaauauuucuauucauaaggaugaaaucggaaaaguccgcgucaaugguguguuaacugcacugccugucagugucgcugauggaagaaucucugugacacaaggagcuagcaaggcacugcugguggcugauuucgguuugcaagucaguuaugacuggaauuggcggguugacgugacacuaccaagcaguuaccacggcgccgucugcggccucuguggaaauauggauaggaaucccaauaacgaccaggucuuucccaacggcacccuggccccuaguaucccuaucugggguggcagcuggcgugcccccggcugggacccucucugcugggaugaaugcaggggcagcugcccgaccugcccggaggaccgguuggagcaguacgagggccccggcuuuuguggcccucuggcccccggcaccggcggaccuuucacuacgugucacgcucauguccccccagaaaguuucuucaaaggcugcgugcuugacguguguaugggcggcggggacagagacauccuuugcaaagcccuagcuucuuacgucgccgcaugccaagcugcaggcgucgugaucgaggauuggagagcccagguaggaugugagaucacguguccagagaacagccacuacgaagugugcgggucuccuugcccagcaagcuguccuagcccggcuccuuuaaccaccccagccgugugcgagggcccuuguguggaaggcugucagugugaugcuggguucguacugagcgccgacaggugcgugccacugaacaauggguguggcugcugggccaauggcacauaccacgaggccgguucugaguuuugggccgacgguacaugcagccaguggugucggugcggcccaggagguggcuccuuagugugcacuccagccucgugugggcugggggaggucugcgggcuccugcccucugggcagcacggcugucaaccaguguccacugccgaaugccaggccuggggagauccccauuaugugaccuuagacggucaccgauuuaauuuccaaggcacgugcgaguauuugcuaucggcuccuugccauggcccaccucuaggcgcugagaauuucaccguaacaguugcaaaugagcaccgugguucacaggcgguuucguacaccaggagcguuacccuccagauuuacaaucauucucucacacuguccgcccguuggccucggaaacugcagguggauggcgucuuuguaacucugcccuuucagcuagacucucuccuccaugcccaccuuucgggugccgacguggucguuacuacgacauccggucuuucucuggcauucgacggggauaguuuuguacggcugagagucccagcagcguacgcuggcucucugugcggacuaugugggaacuacaaucaggacccggccgaugaucugaaagccgucggcgguaaaccagcuggauggcaggugggcggcgcccaaggaugcggggagugcgucagcaagccuugucccagcccgugcacaccugaacagcaggagagcuucggcggcccagacgccugcggcgucaucuccgcuacagauggaccgcucgcucccugucauggccucgucccacccgcccaguacuuccagggaugccugcuggacgcuugucaagugcagggacacccggggggacucugcccggccguggcuaccuacguggccgcuugccaagccgccggagcucaacuuagggaauggcggaggccggauuuuugcccguuucaguguccugcccauucccacuaugaacuuugcggggauagcugcccagggucaugucccagcuuaucugcccccgaagggugugagucagcuugcagagaggggugcgucugcgacgcgggcuuugugcugucaggugauacgugcgucccugucggacagugugggugcuuacacgaugacagauacuauccucucgggcagacuuuuuacccugggcccggaugugacucccugugccguugccgagaagggggcgaggucucuugugagccuucaucuugcggaccccacgaaacguguaggcccagcggcggcucccuuggcugcguggcgguuggaaguaccacaugucaggcuucaggggacccacacuauaccacauuugacggacggcgcuuugacuuuauggggaccuguguguacgugcuggcacagacguguggcacuaggcccggccugcacagguucgccgugcugcaggaaaacguugcaugggguaaugggagaguuucaguuacacgugugaucacaguucagguggcuaacuucacuuuaaggcuggaacagcggcaguggaaggugacugugaauggcgucgauaugaagcugccagucguguuagcuaacggccagauucgggcuucucagcacggaucugacguugugauagaaaccgauuucggacucaggguugcauaugaucuuguauauuacgugcgagugacggugcccggcaauuauuaccaguuaauguguggccuguguggaaacuauaauggcgauccuaaagaugauuuccagaagccuaauggcucgcaggcgggaaaugccaacgaauucggaaauucaugggaggaggucgugccggacuccccuugccuaccacccccaacuugcccaccuggauccgagggcuguaucccgagugaggagugcccgccugagcuggagaaaaaauaccagaaggaggaauucugcggguuacuguccagccccacagggccccuaaguuccugccacaagcuuguagacccccagggcccccugaaagacugcaucuucgaucugugcuuaggaggcgguaacuugagcauucucugcaguaauauucaugccuauguaucugcaugccaagcugccggaggccagguagagcccuggagaaacgaaaccuuuugcccaauggagugcccucaaaacagccacuaugagcugugcgcugauaccugcucccucgguuguucugcacugagcgccccacugcagugcccagacggaugcgccgagggcugccaaugcgacagcggcuuuuuauacaauggccaagcgugugucccgauccagcagugcggauguuaccacaauggagccuacuaugagccagaacagacugugcugaucgauaacugucggcagcaauguacuugccacguugggaaagugguggugugccaggagcauucauguaaacccggacaggucugccaacccagcggugggauccucucuugcgugaacaaagaucccugucauggagugacaugcagaccgcaagagacgugcaaagagcagggcggccaaggcgugugucugccaaacuacgaggccaccuguuggcucuggggcgacccacacuaucacuccuucgauggucggaaauucgauuuccaagggaccugcaacuacgugcucgcuaccacaggaugcccuggugugagcacucagggccugaccccuuuuaccguaaccacaaagaaucagaacagggggaaccccgccgucuccuauguuagaguggugaccguagccgcccucggaaccaauauuaguauccacaaagacgaaauugggaaggugcgagucaacgguguucugacugcgcugccuguguccguagcagacggacguauaagugugacccagggcgcgucgaaggcccuccuggucgccgauuuuggcuugcaggugagcuaugacuggaauuggagagucgacgucacccuuccgaguucuuaccacggcgcugugugcggucugugcggcaauauggacaggaaccccaacaacgaucagguuuucccaaacggcacuuuggcaccuucaaucccaaucuggggcggauccuggagagcaccugggugggauccacuuugcugggacgaaugcagaggcuccugcccaacuuguccggaggacagguuggaacaguacgaaggcccuggguucuguggaccccuggcuccgggcaccggaggcccuuucacuaccugucacgcccacgucccucccgagucuuuuuuuaaggguugcguucuggaugugugcauggguggcggugacagagacauucuguguaaagcucuggcaucuuauguggcggcaugucaagccgcaggcgugguuauugaagauuggcgagcucaggugggcugcgagauaacaugccccgaaaauucccacuaugaggugugcggacccccuugucccgcaucuugcccuucuccugccccacucacaacacccgcggucugcgagggcccaugcguggaaggaugucaaugcgaugccggauucgugcuuagugccgaucgcugugucccacugaacaaugguugcggauguugggcgaacgguaccuaucaugaagcugggagcgaauucugggcugaugguacguguucccaguggugcaggugcggccccggcggggggagucucgugugcacuccggcuagcugcggccuaggugagguuugcggacuccucccuucaggacagcacggcugccagcccgucaguaccgcugagugccaggcauggggggauccacauuacgugaccuuagacggccaucguuucgacuuccagggcacgugcgaauaccugcuguccgcucccugucaugguccuccacugggcgcugaaaauuucacugucacuguggcuaacgagcaucgcggaagucaggccgugagcuacacccgcucagugacccugcagaucuauaaucauucacugaccuuauccgcacgcuggccaaggaaacugcaaguggauggcguguuugugacuuuacccuuccagcuugauagcuuacuccaugcccaucuguccggagcugaugucguggugaccacaacaucagggcugagucuggcuuucgacggcgauuccuucgugagauugaggguuccugcugccuacgcuggaucguugugcggacugugcggcaacuacaaucaggaccccgccgacgaucugaaggcuguugggggcaaacccgcagguuggcaggucggcggagcccaggguuguggcgaaugcguuucuaaaccauguccaucgccauguaccccggagcagcaagaaucauuuggugggccagaugcaugcggcguuauuuccgcuacagaugguccucuagcuccgugucauggccuugugccgccugcccaguauuuccaggguugccuacuggaugccugucaaguccaaggccacccugguggauuauguccugcgguggccaccuauguggcggcuugucaggccgcaggggcucagcugcgagaauggcgcagacccgacuuuuguccguuccaguguccagcccacagccacuaugagcuauguggagacucgugcccuggguccugccccagccucucugccccagaaggcugcgagagcgccugccgcgagggaugcgucugugacgcgggauucguacucuccggcgacacgugcguuccuguuggccagugcggauguuuacacgacgaccgcuacuacccguuagggcaaacguuuuaucccggaccgggcugcgauagucugugucguugucgcgagggaggugaggugucuugugagccuagcucuugcggcccucacgagacgugcaggccuaguggggguucccuugggugugucgccgucggaagcacuaccugucaggcuaguggagauccccacuauaccacauucgacgggcaccgauuugacuuuauggggacgugcguguauguucucgcccagacuugugggacccggccgggccugcaccgguuugcuguuuuacaggaaaacguggccugggggaaugguagagugagugugacacggguuaucacugugcaaguggcaaacuucaccuugcgcuuagagcagcgccaguggaaagugacagugaacggugucgacaugaagcuacccguggugcuggccaacggacagauacgugccagucagcauggauccgauguggugaucgagacugacuucgggcuuagaguugccuaugaccugguuuacuaugugcgagugacugugccagggaauuauuaccagcucaugugcgggcugugcggaaacuauaauggcgaccccaaagacgacuuucagaaacccaaugguucucaagcugggaacgcuaaugaauucgggaauaguugggaggaaguggugccugauucucccugcuuaccgccacccacguguccccccggcucagcuggcugcauccccagugauaagugcccuccugagcucgagaagaaguaccagaaggaggaguucuguggccuucuuucuucgccaaccggaccucucaguagcugccacaaguuggucgauccgcaaggaccacugaaggacugcauauucgauuuaugucuggggggugguaaucuaagcaucuuguguagcaauauccacgcuuaugucucugcaugccaggcagcaggcggucaugucgagccuuggagaaaugagaccuucugcccaauggaauguccacagaacagucacuaugaguugugcgccgauaccugcucccuggggugcucagccuuaagcgcacccuuacagugucccgauggcugugccgagggaugccagugcgacuccggauuccuguauaauggacaggcuugcgucccgauccagcagugugguuguuaccacaaugguguauauuaugagccagaacagacugugcuuaucgauaacuguaggcagcaaugcaccugccacguggguaaaguuguggucugucaggagcacucguguaagccagggcaggugugccaaccuagcggggggauucuaaguugcguuacgaaagacccuugccacggugugaccugcaggccucaggaaaccuguaaagagcagggugggcagggcgucugucugccaaauuaugaagcaacguguuggcuguggggggacccucacuaucauucauuugacggcaggaaguucgauuuccagggcacuugcaauuacguccuagcaacaacgggaugucccggggugucaacacagggacugaccccuuuuaccgucacuacuaaaaaccagaaccgagggaauccugccgugucauauguuagggugguaacaguggcggcacugggaacaaauauuucaauccacaaggaugaaaucggaaagguccgugugaacgggguccugaccgcccuucccgugaguguggccgacggucguauuucuguagcccagggcgccuccaaagcccuacuugucgccgauuuuggccuccaggugagcuacgauuggaacuggcggguugacguaacauugccuagcagcuaccacggagccguaugcggcuugugugggaacauggaccgcaauccuaacaaugaccagguguuucccaacggcacguuggcuccuucaaucccuaucugggggggaagcuggagagcacccggaugggacccacugugcugggaugagugccgcggcucuuguccaaccuguccagaagaucgccuggagcaguacgaaggcccuggauucugcggcccccuuuccucaggcacuggugggccauuuaccaccugucaugcacacgugcccccagaauccuuuuuuaagggaugcguauuagaugugugcaugggcggcggcgaucgcgauauccucugcaaagcuuuggcuucguauguggccgcaugccaggcagccggggucgugaucgaagauuggcgcgcgcagguagguugcgaaaucacguguccggaaaacucacacuaugaagugugcggaccgccaugucccgcaucuugcccuucacccgcuccccucacuaccccugccguuugugaaggccccugcgucgaggguugucagugugaugcuggauucguacugucugccgauagauguguuccccugaauaauggguguggcuguugggccaauggaacauaccaugaagcagguagugaguucugggccgacgguacaugcucccaguggugucguuguggacccgggggggggucccuuguguguaccccugcauccuguggauugggcgaggucugcggcuuacuuccuagcggacagcaugguugucaaccugugucaacugcugagugccaagcuuggggggacccucauuaugugacccuggacgggcacagauuugacuuucaggguaccugugaguauuugcugagugcaccuugccacggacccccacugggggcagagaauuucacaguuacgguggcaaaugagcauagaggcucucaagcagugucuuacacccggucagucacauuacagauauauaaucacaguuugacccuuagcgcucgguggccacgcaaacuccaagucgauggcguguucguggcacuuccauuccaguuggacucucugcuccacgcccaccucuccggagcugacguggucgugaccaccacauccgggcuaucacucgcuuucgauggagauuccuucguccgucugcgaguucccgcugcuuacgcugccucucuguguggccuguguggcaacuacaaucaggacccagcagaugaccugaaggcugugggugguaagccugcgggauggcagguaggaggagcccaggguuguggggagugugugucgaagccaugucccuccccauguacuccugagcagcaggagagcuucggcggaccggacgcguguggugugauuagugcuaccgauggcccgcuggcaccuugucauggucuggugcccccagcccaguacuuucagggcugcuugcucgaugccugucaagugcaaggacacccaggaggauuauguccugcugucgccacguacguggcagcgugucaggcagccggagcccagcucggugaguggcggcgaccugacuucugcccucugcaguguccugcgcacucucauuaugaauugugcggagauagcugcccagugucuugucccucccuuagcgccccagaagguugugaguccgccugcagggaggggugugucugcgacgccggauucgugcuguccggagauaccuguguucccguuggacaaugugggugucuccacgauggccgguauuaucccuugggagaaguguucuaucccgggcccgagugugaaagaagaugcgaguguggaccuggcgggcaugugaccugccaagagggagcggccugcgggccucaugaggagugcaggcuggaggauggagugcaggcuugucaugccaccggaugcggccggugccuugccaaugggggaauccacuacaucacacucgauggacgcguuuaugacuugcacggcagcugcagcuacguucuggcucaggugugccacccaaagcccggcgaugaagauuuuaguaucgugcuggagaaaaaugcugccggugaccugcaacgccucuugguuacuguggccgggcagguggugucucucgcgcaagggcagcaggucacaguugacggcgaggccgucgcgcugccuguggcuguggggcgcguucguguuacagcugaaggucggaacauggugcuucagacuaccaagggccugaggcuucuuuuugacggcgaugcucaccuccugauguccauaccaagcccguuccgugguagguuauguggacugugcgguaacuuuaaugggaacuggagugacgauuucgugcugccuaacgggucugcugcaaguucaguggagacuuuuggcgcagcauggcgcgccccuggaagcagcaagggcugcggagagggaugcggaccccaggggugcccagugugcuuggccgaggaaacugcgccauacgagucuaacgaagccuguggacagcugcgaaacccucaggggccuuucgccacaugccaagcuguguugucgcccuccgaauauuucagacaaugcguguaugaucuuugugcccagaagggggacaaggcauuccucugucgcaguuuagccgcguauacugcugcgugccaggcugcgggggucgcuguuaagcccuggcgaaccgauuccuuuugcccccugcacugcccagcccauucccauuauucgaucugcacccgcaccugccagggcucaugcgcagcccucuccggacugacagguugcacaacgcgguguuuugaagggugcgaaugcgacgaccgguuucugcuaucucaaggggugugcauucccguccaggacuguggauguacacacaauggccguuaucuuccagugaauuccagcuugcugacaagcgacugcagcgaacgguguagcuguagcaguucaucuggacuuaccugccaagcugcugguugcccuccgggaagggugugugaagucaaagcagaggcccgcaacugcugggcuacccgugggcuguguguguugucagugggagcuaauuugaccacuuuugacggcgcaaggggcgccacuaccagccccggcguuuacgaacugucaagcaggugccccgguuuacagaauacgauuccaugguaucgugugguggccgaggugcagauuugucacggaaagacugaagcugugggccagguccacauuuuuuuucaagauggcauggucacccuuacacccaauaagggcgugugggugaacggacucagaguagaucucccggcugaaaaacuggccucaguuagcguguccaggacuccugacggaagucuccuugucagacagaaggccgggguacagguauggcugggggccaacggcaagguagcaguaaucguuucgaacgaccacgcugguaaguugugcggggcuugugggaauuucgauggggaccaaacuaaugacuggcacgacucacaggaaaagccugcuauggaaaaguggagagcccaagacuuuuccccuugcuauggguag

SEQ ID NO: 141790 - RNA, 16218 nt, Artificial Sequence
  derived and/or modified sequence
augggcgcccucuggagcugguggauucugugggcuggagcuacacuccuuuggggcuuaacgcaagaggcuuccgucgaccugaagaacacagggcgcgaggaauuucugacugcauuucugcaaaacuaccagcuggcauacucaaaagcauauccaaggcugcugaucucauccuugucugagucaccugcaagcguaucaauccuuucccaggccgacaauacauccaaaaaaguuacugugagaccaggcgaaucaguaauggucaauaucuccgcaaaagcugaaaugaucggauccaaaauuuuccagcacgccgucgucauucauagcgauuacgcuaucucaguucaggcacugaacgcuaaacccgauaccgccgaguuaacacuacugcgcccuauccaagcguuagguacagaauacuuuguuuuaacaccuccugggaccucagcccguaaugucaaagaauuugcaguggucgcuggagcugcaggagcaagcguuucugugacacucaaggggagcgugacuuucaaugguaaguucuauccagcuggagacguuuuaagagucacccugcagccauacaacgucgcacaauugcaaagcagcgucgaucuuagcggcuccaaagugacugccaguucucccgucgccguucugagcggucauucaugugcacagaaacacacgaccugcaaucacguuguggagcaacuucugcccaccucagccuggggcacacauuauguagugcccaccuuagcaagucagagucgauaugaucuggcauucgucgucgcuagccaggcaacaaaacugacauauaaucaugguggaauuacuggcaguagagguuuacaagcuggggauguaguggaguucgaaguccggccuuccuggccauuguauuuaucugccaacguugguauucaggucuuacuauucgggacaggggcaauccggaaugaagugaccuaugacccuuaucuggugcugauuccugacguggcugccuauugcccagcuuacguuguuaaaagcguaccgggaugugagggcguggcccuggugguagcucagacgaaggccauaagcggacuuacaaucgauggccaugccgucggcgccaaacucaccugggaggcuguaccuggaucugaguucuccuaugcagaaguggagcuggggacggcugacaugauucacacagccgaagcuacaacuaaccucggucugcugacauuuggucuugccaaggcuauaggauacgccacugcagcugauugcggaaggacuguguuguccccuguggagccuucuugcgaagguaugcagugcgcagccggucaacgcugccagguggucggagggaaggcaggaugcgucgcggaaucaacggcuguaugcagagcacagggggauccucauuacacuacauuugacgggagaagauaugauaugaugggcaccugcaguuacacgaugguugaacugugcucugaagacgauacccuuccugcuuucagcguggaagcaaaaaaugaacacagagggaguagaaggguuucuuacguaggcuuggugaccguccgcgcguacucccauucugugucauugacucgcggugaagugggguucguucugguggauaaccagcguaguagacugcccgucucauuguccgaagguagauugcgaguguaccagucgggaccucgagccgucguggaacuaguauuuggccucguggugacuuaugauugggauugccaacuagcccucuccuuaccugcccgcuuccaagaccaggugugugggcucugugggaauuauaacggagauccagcugacgacuuucucacccccgacggcgcccuugcaccugaugccguugaguucgcaucuaguuggaaacuggacgacggagacuaccuuugcgaagacgggugccaaaauaauugcccugccugcacgcccggccaagcucagcauuaugaaggagaucgccugugcggcauguugacuaaauuagacggaccuuucgccguaugucacgauacacucgauccuaggccauuccuggaacaaugcgucuacgaccuguguguugugggcggcgaaagacugucacuguguagaggguuaagcgccuaugcacaagccuguuuagaauuaggaauaagugugggcgacuggagaagccccgcuaacugcccauuaagcugcccugccaacagccgcuacgagcugugugguccugcaugccccacauccuguaacggcgccgcagcuccguccaauuguaguggaaggcccugcguugaagguuguguuugcuuacccggauucguugcuagcggaggugcuugcgugccugcgagcuccugugguuguacauuccaaggacuccagcuggccccuggccaagaggucugggcugaugagcugugucagcgacgcuguaccugcaauggagcuacccaccaagugacguguagagacaaacaguccugcccugcaggagagagaugcucugugcagaacggccuccuggguugcuaucccgaucguuuuggcaccugccaaggcucaggugauccacauuacguguccuuugauggcagaagguucgauuucaugggcaccuguaccuaucugcuuguuggcucauguggacagaaugccgcccucccagcuuuucgaguguuggucgaaaaugagcauagaggcucacaaaccguaagcuauacccgugcugugagaguggaagcuagggguguaaaaguggcaguaagacgggaauaucccggccaggugcuaguggacgaugugcuccaauaucugccuuuucaagcagcugacggccaagugcaaguguucaggcagggacgggacgccguggugagaacagacuucggguuaaccguuacauacgacuggaaugccagggugacagccaaaguccccucuucauaugcggaagcgcuauguggacugugugggaacuucaauggcgaucccgccgaugaccuugcccuaagaggaggaggccaggcagcaaaugcacuugcauuuggcaacuccuggcaggaggagacuagacccggauguggagcgacagagcccggugauugucccaaacucgacucacugguggcccagcaauuacaaaguaagaacgaauguggaauucuagcugauccuaaggguccauuuagggaaugucauaguaaauuagacccccagggggccgugcgagacuguguguaugacaggugccugcuaccuggucaguccggcccccugugugacgcgcuugcuacauaugccgccgcgugccaggcagcuggcgccaccguucacccauggagaagcgaagaauuguguccccuguccuguccgccgcauagccauuaugaagcauguucauacgggugccccuugaguugcggcgaucugcccgucccaggcgguugugggucagaaugucaugaaggaugcgucugugacgaaggauuugcacuaagcggcgagucuuguuuaccccuggcuucaugcggcugugugcaucaaggaaccuaucacccuccuggacagaccuucuaccccgguccuggaugugacucguugugccauugucaagaaggaggacuagugucaugcgagucuuccuccugugguccccacgaagcaugccaaccauccggcggcaguuugggcuguguugcugucggaagcucuacaugccaagccuccggcgauccacacuauaccaccuucgaugggaggagauucgauuucaugggaaccuguguguacguuuuagcgcaaacaugcgguacgagaccaggacuucacagauuugcuguucuucaggagaauguggccuggggaaauggccgggugucggugacaagggugaucacggugcaaguggcaaauuuuacccuccgacuagagcagcggcaauggaaggugacagugaauggcguugacaugaagcucccuguggugcuggcgaacggacagauccgcgccucucagcacgggucugacguugugauagaaacugauuuuggguugagaguggcauaugacuugguauacuauguaaggguuacagucccuggaaauuacuaucagcagaugugcggccuauguggcaauuauaacggagauccgaaggacgacuuccagaagcccaacgggucccaggcuggcaacgcuaaugaauuuggaaauucuugggaggaaguagucccggauucgccaugccuucccccaacuccuugucccccagguucugaggauugcaucccuagccauaaauguccucccgagcuugagaagaaguaccagaaagaagaauucugcggccuccuaucuagcccaacuggaccccuaucgucgugccacaagcuggucgauccacaaggaccccugaaagacugcauauuugaccugugccuggguggcggcaaccugucaauucuguguaguaauauccaugcauacgugucagcaugucaggcugcuggugggcauguagaaccuuggcgcaccgaaacguucuguccaauggaaugucccccaaauucacauuacgaacucugcgccgacacauguagccuggguuguuccgcccugagugcuccuccccaaugccaggacgggugugcagaggggugucagugugacucuggcuuccuuuauaacgggcaggccuguguaccaauucagcagugcgguugcuaucauaacggcguauacuacgaaccugagcaaaccguguuaaucgacaauugccgucaacaguguacuugucacgcagggaaaggcauggugugccaggagcacucuugcaaacccggccaagucugucagcccucgggaggcauucucucuugcguuacuaaggauccuugccaugggguaacauguagaccucaggagacuugcaaagagcaggguggccaaggugugugcuuaccuaauuaugaagcaacuuguuggcucuggggggacccccacuaucauuccuuugacggacguaaauucgauuuucaggggacuugcaacuacguauuagccacgacuggaugcccaggagucucgacucaggguuugacaccauuuacugucaccacgaagaaucaaaacagaggcaaccccgcuguuaguuacguuagagucgugacuguggcugcccuuggcacuaacaucaguauccauaaggaugagaucgggaagguaagaguuaauggagugcugacugcccuuccuguauccguggcagacggacgaauaagcgugacccagggugcuaguaaggcauuacuggucgccgauuucggacugcagguaucuuaugauuggaacuggaggguggacguuacacuuccaagcagcuaucacggggccgucugcgggcuaugcgguaauauggaccguaacccgaauaaugaucaggucuucccaaauggcacauuggccccauccauuccgauauggggggguagcuggagagccccagguugggaucccuuguguugggaugaaugcagaggcuccugcccuacuugcccugaggaccggcuagaacaguacgaaggcccaggauuuugcggaccccuagcaccuggcacugguggaccuuucacuacgugucacgcccacgugcccccagagucuuucuucaaaggauguguccuggacguuuguaugggcgguggagaucgcgauauacuguguaaagcucuagcauccuacgucgccgccugccaagccgcugguguagugaucgaggacuggcgggcccagguggguugugaaaucacuugccccgaaaauagccauuaugaagugugcggaagccccuguccugcaaguuguccaucccccgcaccuuuaacaacuccugcaguaugcgagggacccugcguggaagggugucagugcgaugcaggcuuuguccugagcgcugaccgaugcgucccccugaacaauggaugcggauguugggcuaacggaacauaccaugaggcuggauccgaguucugggcagauggcacaugcucccaguggugccggugcggccccgggggcggcucauugguuugcacucccgcgucgugcggucucggagaaguguguggccuacuuccuagcggccaacaugggugucagccugucaguaccgcagagugucaggccuggggcgauccucauuacguaacacuugaugggcaucgguucaauuuccaggguacaugugaauaccuucuuagcgccccuugccacggcccgccacugggagcugagaacuuuacaguaacuguggccaacgagcacagaggaucucaagccgugucuuauacucgguccguuacacugcagaucuacaaccauucucugacacugucugcccgcuggccaagaaaacuccagguggacggaguuuucgugacacugcccuuccaacuugacucacuucuucaugcccaucucucaggcgccgacgucgugguuacaacaacaucuggacuuagucuggcauucgacggcgacagcuucgucagacugcgggugccugccgccuaugccggcagccucugcggccugugcgggaauuacaaucaggacccagcagaugauuuaaaagccguuggagggaagccagcaggauggcaggucgggggcgcucaggggugcggcgaguguguuucaaagcccuguccgucaccuuguacaccggaacaacaagaaucauuuggcggaccggacgcaugcgguguuauuagugccacugauggaccauuggcaccgugccauggcuugguaccacccgcucaauauuuccagggaugccucuuggaugccugccagguacagggacauccaggcggccugugcccugccguugcuacuuacgucgccgccugucaggcugccggagcacagcugcgcgaguggcgaagaccugacuuuugcccuuuucaguguccagcucauucccauuacgaauuaugcggugauuccuguccaggcagcugccccucccuuagcgcacccgagggaugugaguccgccugccgagaaggcugugugugugaugcaggauuuguucugucuggugauaccugugugccggugggccagugcggcugccuucacgaugacagauauuauccucucggccaaacuuuuuaccccggcccaggaugcgauucccuauguagaugcagagagggaggcgaaguguccugugaaccuaguucuuguggcccucacgaaacaugcagacccucuggaggaucacuggguugugucgcgguaggaucaacgacgugucaagcuucgggagacccccacuacaccacuuucgacggaaggagguucgauuuuaugggcacuugugucuauguucucgcucagacuugcggcacuaggcccggccugcacagauucgcuguacuucaagaaaacguggccuggggcaacggucgggucucaguuacaagggucauaacuguccaaguugcaaacuucacauugcgccuagaacaacgacaguggaaggugacagucaacggaguggauaugaaguuaccugucguccuggcuaacgggcagauucgggccucacagcaugggucagauguuguuaucgaaacggauuucggccuccggguugccuaugaccugguuuacuaugugagggugacuguccccggaaauuacuaccaacugaugugcggacuaugcgggaacuauaacggugauccaaaagaugacuuccagaagcccaacggaucucaggccggaaaugcuaaugaguucggaaacucuugggaggaagucgugccugacagcccaugccuuccucccccaacuuguccuccaggaucugaaggcuguauuccuagcgaagagugcccccccgagcuggagaaaaaauaccagaaagaagaauucugcggccucuuaucuucgccuaccgggccccuuagcucuugccauaaauuaguagauccacaaggaccccucaaagacugcaucuuugacuuauguuuaggagguggcaacuuaagcauucucugcaguaauauucaugccuauguaucugcaugccaagcugccggaggccagguagagcccuggagaaacgaaaccuuuugcccaauggagugcccucaaaacagccacuaugagcugugcgcugauaccugcucccucgguuguucugcacugagcgccccacugcagugcccagacggaugcgccgagggcugccaaugcgacagcggcuuuuuauacaauggccaagcgugugucccgauccagcagugcggauguuaccacaauggagccuacuaugagccagaacagacugugcugauugacaacuguagacagcaauguacaugccacguuggaaagguggucguuugucaagaacacuccuguaagccaggccaagucugucaacccaguggcggaauacucaguugugugaacaaagauccaugucacggaguaacuugucgcccacaggagaccugcaaagaacaaggcggccaaggggugugucugccuaauuacgaggccacauguugguuguggggagacccccauuaucacagcuucgacggucggaaauucgauuuucaggggaccugcaauuacgugcuggccacuacugggugucccggaguuuccacgcaaggacugacaccuuuuaccgucacgacgaagaaucagaaccgcggcaacccagccguuuccuacgugcgcgugguuacaguugcggcacugggcaccaauauuucuauacacaaggacgagauaggcaaaguaagaguuaauggugugcugacggcauugccaguuuccgucgcugauggcagaaucucugucacacagggggcgagcaaggcacuucucguagcagauuucgggcuccaggugucguacgacuggaauuggagaguggauguuacucuccccagcuccuaccacggcgccguuuguggccucuguggaaacauggaucggaauccgaauaacgaucaagucuuuccuaacgggacuuuggcuccuucuauuccuaucugggguggcaguuggagggcgcccggcugggauccccuuuguugggacgaaugcagaggaagcugcccaaccuguccagaagaccgccucgagcaguacgagggcccaggcuucugcggaccucuggcccccggcacaggaggcccuuuuacaaccugucaugcccacguaccucccgaaucauuuuucaaaggauguguguuggaugugugcauggggggaggcgaucgcgauauccucugcaaagcacuagcgucuuaugucgcggccugccaggccgcaggugucguaauagaagacuggcgcgcccaaguuggcugcgagaucaccugcccagaaaauagccauuaugaggucuguggacccccuugcccagccuccuguccaagccccgccccacuuacaacaccagccgugugugaagguccaugcguggaagggugccagugugaugcuggcuucguucugucugccgauaggugcgugccccuaaauaauggaugcgguugcugggcgaaugggacuuaccacgaggccgggucagaauucugggccgacggaacuuguucacaguggugucgguguggacccgguggaggaucacuugucuguacaccagcuuccugugggcugggagagguaugcggacuucugccuucaggccaacacgguugucaaccgguuaguacggccgagugccaagcuuggggagacccacauuacgugacacuggacggccauagguucgauuuucagggcacaugcgaauaucuccuuucugcacccugccauggcccgccccuaggagccgaaaacuuuacggugacagucgcaaaugaacacagagguucgcaagccgucuccuauaccagaucagucacccuccaaauuuauaaccacagccucacgcuguccgcuagauggccccgcaaacuccagguagacggaguuuucgugacauuacccuuucagcuggauucuuuacugcaugcucaccuuucuggagcagacguagucgugacaaccaccuccggccugucucuugcguuugauggagauuccuucgugcgucuccguguccccgcggcauaugccggcucucuguguggacugugcggaaacuacaaucaggacccugcggacgaucucaaggcagugggagggaagccugcuggauggcagguggguggagcccaaggcuguggagagugcgugaguaagccuuguccaucaccauguacuccggaacagcaagaaagcuuugguggacccgacgcaugcggcgucauuucagccacugauggcccauuagcaccuugucauggguuagucccuccagcccaguauuuucagggcugucucuuggaugcgugucaggugcagggucaucccggaggccuguguccggcugucgccacauacguggccgccugucaagccgcuggcgcucaauuacgugaauggagaaggcccgacuuuuguccuuuccagugcccugcacacucucacuacgaacugugcggugauaguugcccuggauccugccccagucuauccgcuccugagggcugcgaaucugcuugucgagagggaugcguuugcgaugcugguuuuguucucucaggugacaccuguguccccgucggacaaugugggugcuugcacgacgacagauacuacccgcugggccagacuuuuuacccaggacccggaugugauagccucugcagauguagggagggaggagaagucucuugugaaccuucuucaugcggaccucaugagacgugucgcccaucuggagggagcuuaggauguguggcgguuggcagcacuacgugucaggccucaggcgacccacauuacacuacuuucgauggacauagauucgacuuuaugggaaccugcguguaugugcuagcacagacuugcggcacucgcccuggccuccauagauuugcagugcuccaggaaaacguggcaugggguaacggucgggugucaguaacccgggucauaacagugcaaguggcgaauuuuacuuugcgucuugagcagcgccaguggaaagugacaguuaacgguguggacaugaaacugcccgugguacuggcgaauggacaaauacgagcaagccaacauggaucugacguggugaucgagacugauuuuggacuccgaguagccuacgaccugguuuauuauguccgcgugacuguaccuggcaacuauuaucagcugauguguggcuugugugguaauuauaauggggaucccaaagaugacuuccaaaaacccaauggcucucaggcuggcaaugcgaaugaguuuggcaauucaugggaagaaguugugccugacagccccugccugccucccccaacuugccccccuggguccgcgggaugcauuccaagcgacaaaugcccaccugaacuugaaaagaaauaucagaaggaggaauucuguggccucuugaguucuccaaccggcccuuugaguagcugccacaaacuggucgacccccaagguccacugaaagauugcaucuucgaucugugcuuaggcgguggcaaccugucuauucuguguuccaauauucacgccuaugugagcgcuugccaagcugcuggcggacauguggagccuuggagaaacgagacuuuuuguccuauggaguguccucagaacucucauuacgaacugugugcagacaccuguucucuuggaugcuccgcacuaucagccccccuucagugcccagaugggugcgccgaagggugucagugcgauucuggguuccuuuauaacggacaagcaugcgugccuauucaacaauguggauguuaucauaauggaguguacuaugaacccgagcagaccguccucaucgacaacugucggcaacaguguacaugucacguggguaaagucgucgucugucaagagcacagcuguaaacccggccaagugugccagccuucagggggcauucuguccugugucacaaaggacccaugccauggcgugacuugccguccucaggagaccuguaaagaacaaggcggccaaggaguuugucuuccuaacuacgaagcaacauguuggcuauggggagauccucauuaucacucuuucgacggccgaaaauucgauuuucaaggaaccuguaacuauguacucgccacaacaggcuguccuggcguuucaacccagggauugacccccuucacugucacgacuaaaaaucagaaccgggguaaccccgcagugucauacguccggguugucaccguggcagcucucggaaccaacaucagcauccacaaagacgagauugggaaaguccgggugaauggcguucugacggcuuuaccggugagcgucgccgacggaaggauuuccguagcucagggagcuucuaaagcauuguuggucgcagauuucggacugcaagucucauacgauuggaauuggaggguugacgugacacucccuucaucauaccacggggccguauguggacugugcgguaauauggacagaaaucccaauaacgaccaaguguuccccaauggaacuuuagcgcccaguauaccgaucuggggcggcuccuggagggccccuggaugggauccgcucuguugggacgagugcagaggcuccuguccaacaugcccagaggauaggcuggaacaguaugaggggccugguuuuugcggacccuuaaguagcgguaccggaggacccuucacaacaugccaugcccaugucccgcccgaaagcuucuucaagggauguguguuagauguuuguaugggcggaggagaucgagauauccuguguaaagcauuggccagcuaugucgcugccugucaggcugccgguguugugauugaagacuggcgagcucaagucggcugugaaauuacgugcccagagaacagucauuaugaagugugcggcccgcccugucccgcuucaugccccagucccgccccccugaccacuccugcuguaugcgaggggccauguguggaagggugucaaugugacgcugguuuugugcuuagcgccgacaggugcguucccuuaaacaacggaugcgguugcugggccaacggcaccuaccaugaagccgggagcgaauucugggcagacgggacuuguagccaguggugccgcugcgggccaggaggagggagccugguuuguacccccgccaguugcggccugggagagguuugcggacuguuacccaguggucagcacggcugucagccagucucaacagccgaaugucaggcauggggugacccucacuauguuacccuugacgggcaccguuuugacuuucaaggaacuugugaguaccuccuauccgcaccaugccaugggccgccccugggagccgaaaauuucacuguaacuguggcuaacgaacauaggggcucgcaagccguaagcuacacucgauccguaacccuccaaaucuauaaccauagccugacccugagcgcuagauggccacguaaauuacagguggacggcguuuucguggcgcugccuuuucaacuggauucucuguuacaugcccaccucagcggcgccgauguuguggugacuacuacuagugggcucagccuagccuucgacggggacaguuucguucgccucaggguacccgccgcuuacgcugcgucucuguguggccuaugcgguaacuauaaucaggauccggcugacgaucugaaggcuguaggaggcaagcccgcaggauggcaggucggaggcgcacaggguugcggagaaugugugucaaagccuuguccauccccauguacaccagagcaacaagagucauuugggggaccagacgcauguggagugauuucagccaccgacgguccacuagccccuugucacggucuggucccuccagcacaauacuuccagggcugucuauuagacgccugucagguucagggucaccccgguggacucugucccgcuguugccacuuauguagccgcuugccaagccgcaggagcgcagcuaggggaguggaggagacccgauuuuugcccccuucagugcccggcgcauucacacuacgagcuguguggagacucuugucccgugucuugcccuucucugucugcaccggaaggcugugagucugcuugucgggagggcugugucugcgaugcuggauuugugcuaagcggggauacuugcguaccuguuggucaguguggaugccuccacgacggucgcuauuacccccuaggagaaguguuuuaccccggacccgagugugagcggcggugcgaaugcggcccaggaggccacgugacaugccaggaaggcgcugcaugcggcccacacgaagaaugcaggcucgaggacggcgugcaagccugccacgcaaccggcugcggucguugcuuggcaaauggaggcauucacuauaucacuuuggacggucgagucuaugacuugcaugggucauguagcuauguauuagcccagguaugucaucccaaaccaggcgacgaagauuucucuauuguguuggagaaaaacgccgcaggggaucuccagcggcuccugguuaccgucgcaggccaggucguuucacuagcucagggucaacaaguaaccguggauggagaagcugucgcgcuuccuguggcuguggguaggguucggguaacugcugagggcaggaacaugguucugcagacaaccaaaggccuacgucuucuguucgacggugacgcccaucuucuuaugaguaucccaucgccauuccgagggcgccucuguggucucugugggaauuuuaacggcaauugguccgacgauuuuguccugccuaauggcucugcugccaguucaguugagacauucggggcugccuggagagcccccggaagcaguaaaggaugcggugaggguugcggcccucagggguguccugucugucucgcagaggagaccgcaccauaugaaagcaaugaggcauguggacagcucagaaauccccaaggcccauuugcaaccugucaggcuguccugucgcccagugaguacuuccggcaaugugucuacgaccuaugcgcccaaaagggggauaaggccuuccucugucgcagccuugcggcuuauacagcugcuugucaggcagcgggaguggccguuaaaccauggagaacugauucguuuuguccacugcauugcccagcucacucacacuauuccauuuguacuagaacuugccagggaucuugcgccgcucucuccgggcuuacuggaugcacgacacggugcuucgaagggugcgagugugacgaucgcuuccuccugucucaaggugugugcauuccugugcaggauugcgguuguacccacaauggaagauaccugccagugaauucaagucugcucacaagcgacugcucugaaaggugcucauguucuucgucaucuggauugacaugccaggcagccgguuguccaccugggcgggucugcgaagugaaagccgaagcuaggaacuguugggcaacaaggggucuguguguccuuuccgugggcgcuaacuugacaacuuuugauggcgccagaggcgcaaccaccagccccggggucuaugaacuuuccucacgcugucccgggcugcagaauacgaucccaugguacagagugguagcagagguccagaucugucacgguaagacggaagcggucggacaagugcacaucuucuuucaggacggcaugguaacccucacccccaauaaaggagucuggguaaauggcuuacgagucgauuugccugccgaaaaacuggcaagcgugagugucucuaggacucccgacggcucucuuuuggugcggcagaaagccggugugcaaguuugguuaggcgcuaaugggaaaguggcugucaucguguccaacgaucacgcaggaaaauuauguggggcuugugggaauuuugacggagaccagacgaaugauuggcacgauagccaagagaaaccagcuauggagaaguggcgcgcucaagauuucucuccuugcuaugguuag

SEQ ID NO: 141791 - protein, 400 aa, Artificial Sequence
  derived and/or modified sequence
MAGCVPLLQGLVLVLALHRVEPSVFLPASKANDVLVRWKRAGSYLLEELFEGNLEKECYEEICVYEEAREVFENEVVTDEFWRRYKGGSPCISQPCLHNGSCQDSIWGYTCTCSPGYEGSNCELAKNECHPERTDGCQHFCLPGQESYTCSCAQGYRLGEDHKQCVPHDQCACGVLTSEKRAPDLQDLPWQVKLTNSEGKDFCGGVIIRENFVLTTAKCSLLHRNITVKTYFNRTSQDPLMIKITHVHVHMRYDADAGENDLSLLELEWPIQCPGAGLPVCTPEKDFAEHLLIPRTRGLLSGWARNGTDLGNSLTTRPVTLVEGEECGQVLNVTVTTRTYCERSSVAAMHWMDGSVVTREHRGSWFLTGVLGSQPVGGQAHMVLVTKVSRYSLWFKQIMN

SEQ ID NO: 141792 - DNA, 1203 bp, Artificial Sequence
  derived and/or modified sequence
atggctggctgcgtcccccttttacaaggcctcgttctcgtccttgctctgcatagggtggagccctccgtcttcctgccggcttccaaagccaatgatgttttggtacggtggaaaagggctggctcttatctcttggaggagctgtttgaagggaatctcgagaaggagtgttacgaggagatctgcgtatatgaggaagccagagaggtgtttgagaatgaggttgtcactgatgagttttggcgccggtacaagggagggtctccctgcatcagccaaccttgcctacacaatggctcatgtcaggacagcatatggggctacacttgcacatgctcacccggctatgaagggtctaactgtgaattagccaaaaatgagtgccacccagaaagaaccgatggatgccagcatttctgcctaccgggacaagagagttacacatgcagttgtgcccaggggtataggctgggggaagatcataagcagtgcgtacctcacgatcagtgcgcttgtggggtcttaacctcagaaaaacgagctcccgaccttcaagatctgccttggcaggtcaaactcactaatagtgagggcaaggacttctgtgggggtgttatcattagggagaacttcgttctcaccaccgcaaagtgttccctgctgcaccgtaacatcacggtaaagacctacttcaatcgcaccagccaggaccccctgatgattaagattacccacgtgcatgtccacatgagatacgacgcagacgctggcgagaatgatctctcactgctcgagctcgaatggcctattcaatgcccaggcgccggactcccggtatgtacgcctgagaaagatttcgccgagcatctgctcatccctcggaccaggggccttctctcggggtgggctaggaatggcacagatctgggtaacagtcttacaacacgtccggtaaccttggtggagggcgaggaatgcggccaggtgcttaatgttaccgtgacaactcggacctactgcgagcgctctagtgtggctgcaatgcactggatggacggaagcgtggtgacccgagagcaccgaggctcgtggtttcttactggggtgctgggatctcagccagtcggcggccaggcccatatggtgctggtaaccaaggtttcccggtattcactgtggtttaaacagatcatgaattag

SEQ ID NO: 141793 - DNA, 1203 bp, Artificial Sequence
  derived and/or modified sequence
atggccggctgtgtgcccctgctgcagggcctggtgctggtgctggccctgcaccgggtggagcccagcgtcttcctgcctgccagcaaggccaatgatgtgctggtgcgctggaagagagctggcagctacctgctggaggagctgtttgagggcaacctggagaaggaatgttatgaggagatctgtgtgtatgaggaggcccgggaggtgtttgaaaatgaggtggtgacagatgagttctggaggcgctacaagggcggcagcccctgcatcagccagccctgcctgcacaacggcagctgccaggacagcatctggggctacacctgcacctgcagccctggctatgagggcagcaactgtgagctggccaagaatgaatgccaccctgagaggacagatggctgccagcacttctgcctgcccggccaggagagctacacctgcagctgtgcccagggctaccgcctgggggaggaccacaagcagtgtgtgccccatgaccagtgtgcctgtggggtgctgaccagcgagaagagggccccagacctgcaggacctgccctggcaggtgaagctgaccaacagcgagggcaaggacttctgtggcggcgtcatcatccgggagaactttgtgctgaccacagccaagtgcagcctgctgcacaggaacatcaccgtgaagacctacttcaacagaaccagccaggaccccctgatgatcaagatcacccacgtgcacgtgcacatgagatatgatgctgatgctggagaaaatgacctgagcctgctggagctggagtggcccatccagtgccctggggccggcctgcctgtgtgcaccccagagaaggactttgctgagcacctgctgatccccaggacccggggcctgctgagcggctgggccagaaatggaacagacctgggcaacagcctgaccaccaggcctgtgaccctggtggagggggaggagtgtggccaggtgctgaatgtgacagtgaccaccaggacctactgtgagaggagctctgtggccgccatgcactggatggatggctctgtggtgacccgggagcaccggggctcctggttcctgactggagtgctgggcagccagcctgtgggcggccaggcccacatggtgctggtgaccaaggtgagccgctacagcctgtggttcaagcagatcatgaactag

SEQ ID NO: 141794 - DNA, 1203 bp, Artificial Sequence
  derived and/or modified sequence
atggccggctgcgtgcccctgctgcagggcctggtgctggtgctggccctgcaccgagtggagccctctgtgttcctgcctgcaagtaaggctaacgatgttctggtgagatggaagcgtgcgggttcgtacctgttagaggagctgtttgaagggaacttagagaaagagtgttatgaagaaatttgcgtgtatgaggaagcacgggaggtgttcgagaacgaagtggtgactgacgaattttggcggcgatataagggcggctccccttgtatttcacagccctgcctgcataacggaagctgtcaagacagcatctgggggtatacctgcacctgctccccaggctacgaaggctccaactgtgagctggcaaaaaatgagtgtcaccccgaacgtaccgacggatgccaacacttttgtctccccggtcaagagtcttatacctgttcttgcgcacagggttaccgtctaggggaggaccataaacagtgcgtccctcatgaccagtgcgcctgcggcgtgctgacctccgagaaacgggcaccggacctgcaagatctcccttggcaggtgaaactcacaaattcagaaggaaaggacttctgcggtggtgtcatcatccgcgaaaatttcgtgctgacaaccgccaagtgcagcctcctgcaccggaatattacagtcaagacctatttcaataggacgtctcaggatccactaatgattaagatcacccacgtccacgtgcatatgcgctacgatgcggatgctggcgaaaacgacctgagcctcctcgagctggaatggcctatccagtgccctggtgcaggattgcccgtgtgtacacccgaaaaggactttgccgagcaccttttaataccaagaactagagggctgttgtccggttgggcacgaaatggaaccgatctgggtaactcactgactacgcgtccggtcaccttggtggaaggcgaggagtgtgggcaggtgctgaatgtgacagttaccacaagaacgtactgcgaacggagcagtgtggccgcaatgcattggatggacggcagcgtggtgacgagagagcacaggggaagctggttcctgaccggggtgctgggcagccagccagtaggaggacaggcccatatggtactggtaacaaaagtatctagatactccctgtggttcaaacagattatgaactag

SEQ ID NO: 141795 - DNA, 1203 bp, Artificial Sequence
  derived and/or modified sequence
atggccggttgtgttcctctgttgcagggtctggtcctggttctggctctgcaccgcgtcgagccctccgtgttcctgcctgcgtccaaagcgaacgacgtgttggtgcgctggaaaagagccggatcatatcttctggaggagcttttcgagggcaacctggagaaagagtgctacgaagagatttgcgtgtacgaagaagctagggaggtgttcgagaacgaagtggtgacggatgaattctggaggaggtataaggggggaagcccctgtatctcccagccttgcctgcacaacgggtcatgccaggactcgatttggggctacacttgcacctgcagccccggatacgaggggtcaaattgtgagctggccaagaacgaatgtcaccccgagaggaccgacgggtgccagcacttctgtctgccgggacaggagagttacacctgtagttgtgcgcagggatatcgcctgggcgaagaccataagcagtgcgtcccacatgaccagtgtgcttgcggagtcctcactagcgagaagcgcgcaccagatttacaagacctaccgtggcaagtaaagctgacaaactctgagggaaaggatttctgcgggggtgtcattattcgggaaaattttgtgctgaccaccgcaaaatgttccttgttacacagaaatatcaccgtcaagacatactttaataggacttctcaagaccccttaatgatcaaaataacgcatgttcacgtacatatgcgatatgacgccgatgccggagaaaacgatctgtccctgctggagttagagtggcctatacagtgcccaggagcaggacttccggtgtgtactccagaaaaggatttcgctgaacaccttttaattcctcggactcggggattgcttagcggttgggcacgcaatggtaccgacctgggaaatagcctgaccacccggcctgtgactctcgtagagggcgaggagtgtggacaggtgttaaacgttaccgtgactacacgcacctactgcgagcgttcatccgtcgccgctatgcattggatggatggttccgtggtgacaagagaacacagaggaagttggtttttaaccggagtcctggggtcccagcctgtcgggggtcaggcgcacatggttctcgtgaccaaggtctcccgatatagtctgtggttcaaacagattatgaactag

SEQ ID NO: 141796 - DNA, 1485 bp, Artificial Sequence
  derived and/or modified sequence
ggtgggaatggcaggctgcgtcccactgctccagggcctggtcctggtcctcgccctccatcgtgtggagccctcagtatttctcccggcctccaaagcaaacgacgttctggtgaggtggaagcgtgcgggctcctatcttctggaagaactcttcgagggaaacttggaaaaagaatgttatgaagaaatctgtgtctatgaagaagcaagagaagtgtttgaaaatgaagtagtcactgatgaattctggagacgatataagggcggctccccgtgcatctcccagccctgcctccacaacggctcttgccaggacagcatctggggctacacctgcacctgctcccccggctatgagggcagcaactgcgagctggctaaaaatgaatgtcacccagagcggactgatgggtgtcaacacttctgcctcccaggacaggaatcctacacatgcagctgtgctcagggctacaggcttggtgaggaccacaaacagtgtgtgccccacgaccagtgtgcctgcggggtgctgacctctgagaagcgtgcaccggatctacaggacctcccgtggcaggtaaagttaacaaattccgaaggaaaagacttctgtggtggtgttataatacgggaaaattttgtactgacaacagcaaaatgttcactgttacacaggaatattactgtaaaaacatattttaacagaacgagccaagacccgctgatgatcaagataacgcacgtccatgtgcacatgcggtatgacgcggacgcgggggagaatgacctgtcactgctggagctggagtggcccatccagtgcccaggtgcggggctccccgtgtgcacccctgagaaagacttcgctgagcacctcctcatcccacgcaccaggggcctcctcagcggctgggcacgcaatggcactgacctgggcaactcgctgaccacgcggcctgtcacacttgtggagggggaggagtgcgggcaggtcctgaatgtgactgtcaccaccaggacctactgtgagagaagcagcgtggcggccatgcactggatggatggaagtgtggtcaccagagaacacagaggctcctggtttctcacgggggtcctgggctcgcagccagtaggagggcaggctcacatggtccttgtcaccaaggtctccaggtactcactctggtttaaacagatcatgaactaactgaaactcagctagccagaatgaacaacacaaccggaagcgggattccaagctggcactgccactgtggagggcgctgaaacttcatcacacactgagaggccgtcacagccccagaccacccgcttggcccacgcagcagcagagccgccgtttgctgggttgtttaccgagcactgtgacctttctttccctggaactctttatctcaatagagaccttaaaagaaaacatgagatacgttaaataataaaataagataatctgtcagtcat

SEQ ID NO: 141797 - DNA, 1203 bp, Artificial Sequence
  derived and/or modified sequence
atggcaggatgtgtcccactgctccagggcctcgtgctcgttttagctcttcacagagtggagccatccgtcttccttcccgcctccaaggctaatgatgttctggtgcggtggaaacgagctggatcatacctcctggaagaattgtttgaaggaaatctcgagaaggagtgttacgaagaaatatgtgtttatgaggaagctcgggaggtttttgaaaacgaggtcgtgaccgatgagttttggcggaggtacaaaggaggaagtccatgcatctctcaaccttgcctgcacaacggctcctgccaagattcaatttggggttacacgtgcacatgctcccctggctatgagggttcaaattgcgagttggctaaaaacgaatgtcatccagagcggactgatggttgccaacacttctgtttgcccggacaggagtcctacacttgctcctgcgctcagggctatcgtcttggagaggatcacaagcagtgtgtgcctcatgaccagtgcgcatgcggagtactgacctccgagaaaagggcgccagatcttcaggatctgccttggcaggttaaactgaccaattccgaaggcaaggacttttgtggcggtgtgattatacgcgaaaactttgtcctgacgaccgctaagtgctctctgctgcacaggaacatcacagttaagacctacttcaataggacctcacaagaccctcttatgataaagattacacacgtgcatgtgcatatgaggtatgatgcagatgccggcgagaatgacctgtctctgctggaactagaatggcctattcagtgccccggtgctggtctccctgtgtgtacaccagaaaaagactttgcagagcacctactgatccctcgcacgcgcggtttactgtccggctgggccagaaacggcacggacctaggaaattcattgaccacacgacctgtgaccttagtggaaggcgaagaatgcgggcaggttttaaatgtcaccgtgacaaccaggacttattgcgaaagaagctccgtggccgctatgcactggatggacggaagtgttgtaactagggaacataggggctcttggtttctcacaggagtgttggggtcccagccagtggggggtcaggcccacatggtactcgtcacgaaagtaagccgctacagcctctggttcaagcaaatcatgaattag

SEQ ID NO: 141798 - DNA, 1203 bp, Artificial Sequence
  derived and/or modified sequence
atggctggctgcgtgcctctgctgcaaggattagtgctggtgttagcactgcaccgcgtcgaaccttctgtctttctaccagcaagcaaagccaatgatgtgctcgtaagatggaagagggccggatcatatctgctagaggagctttttgaagggaacctcgagaaagaatgctacgaagagatttgtgtttacgaggaggcccgagaggtgtttgaaaacgaggtggttacagacgaattttggagacgctataagggagggagcccatgtatatctcagccgtgcctccataatggctcttgtcaagactcaatttgggggtatacctgcacatgttcccccggctacgaagggtcaaactgcgaactagccaagaatgagtgtcacccggaaagaaccgatggatgccagcacttttgtctgccaggccaagaatcgtatacttgctcctgtgcacaagggtatagactgggagaagatcacaagcaatgcgtcccccacgatcagtgtgcttgtggggtgctaaccagtgaaaagagagcccctgacctccaggacctcccctggcaggtgaaattgaccaattccgagggtaaagatttctgcggtggagtgattatccgagagaatttcgttttgacaactgctaagtgctctctacttcatcggaacattactgtgaagacatactttaaccggacttcccaagaccccctaatgatcaaaatcacccacgtgcacgtgcatatgagatatgatgctgatgccggcgaaaacgacctgtccctactggaacttgaatggccgatacagtgtccgggcgcgggcttgcctgtgtgcacccccgaaaaagactttgctgaacatttattgatcccacgcacccgcggcctgctctcaggttgggccagaaacggtacagacctgggtaatagccttaccaccagacctgtgaccctggtcgaaggagaggagtgtggacaggtgctgaatgtgaccgtaactacaagaacttattgtgagcggtccagtgttgctgccatgcattggatggatggaagcgtcgtaactcgagagcatagaggctcctggtttctgacaggggtgctgggatcacagcccgtgggaggacaagcccacatggtactcgttacaaaagttagcaggtatagcctgtggtttaaacaaattatgaattag

SEQ ID NO: 141799 - DNA, 1203 bp, Artificial Sequence
  derived and/or modified sequence
atggccggctgcgtgcccctgctgcagggcctggtgctggtgctggccctgcacagagtggagcccagcgtgttcctgcccgccagcaaggccaacgacgtgctggtgagatggaagagagccggcagctacctgctggaggagctgttcgagggcaacctggagaaggagtgctacgaggagatctgcgtgtacgaggaggccagagaggtgttcgagaacgaggtggtgaccgacgagttctggagaagatacaagggcggcagcccctgcatcagccagccctgcctgcacaacggcagctgccaggacagcatctggggctacacctgcacctgcagccccggctacgagggcagcaactgcgagctggccaagaacgagtgccaccccgagagaaccgacggctgccagcacttctgcctgcccggccaggagagctacacctgcagctgcgcccagggctacagactgggcgaggaccacaagcagtgcgtgccccacgaccagtgcgcctgcggcgtgctgaccagcgagaagagagcccccgacctgcaggacctgccctggcaggtgaagctgaccaacagcgagggcaaggacttctgcggcggcgtgatcatcagagagaacttcgtgctgaccaccgccaagtgcagcctgctgcacagaaacatcaccgtgaagacctacttcaacagaaccagccaggaccccctgatgatcaagatcacccacgtgcacgtgcacatgagatacgacgccgacgccggcgagaacgacctgagcctgctggagctggagtggcccatccagtgccccggcgccggcctgcccgtgtgcacccccgagaaggacttcgccgagcacctgctgatccccagaaccagaggcctgctgagcggctgggccagaaacggcaccgacctgggcaacagcctgaccaccagacccgtgaccctggtggagggcgaggagtgcggccaggtgctgaacgtgaccgtgaccaccagaacctactgcgagagaagcagcgtggccgccatgcactggatggacggcagcgtggtgaccagagagcacagaggcagctggttcctgaccggcgtgctgggcagccagcccgtgggcggccaggcccacatggtgctggtgaccaaggtgagcagatacagcctgtggttcaagcagatcatgaactag

SEQ ID NO: 141800 - protein, 375 aa, Artificial Sequence
  derived and/or modified sequence
MLDRDVGPTPMYPPTYLEPGIGRHTPYGNQTDYRIFELNKRLQNWTEECDNLWWDAFTTEFFEDDAMLTITFCLEDGPKRYTIGRTLIPRYFRSIFEGGATELYYVLKHPKEAFHSNFVSLDCDQGSMVTQHGKPMFTQVCVEGRLYLEFMFDDMMRIKTWHFSIRQHRELIPRSILAMHAQDPQMLDQLSKNITRCGLSNSTLNYLRLCVILEPMQELMSRHKTYSLSPRDCLKTCLFQKWQRMVAPPAEPTRQQPSKRRKRKMSGGSTMSSGGGNTNNSNSKKKSPASTFALSSQVPDVMVVGEPTLMGGEFGDEDERLITRLENTQFDAANGIDDEDSFNNSPALGANSPWNSKPPSSQESKSENPTSQASQ

SEQ ID NO: 141801 - DNA, 1128 bp, Artificial Sequence
  derived and/or modified sequence
atgctggacagggacgtaggtcccacacctatgtacccccccacttacctggagcctggaattggtaggcatactccgtatggaaatcaaaccgactataggatatttgagctcaacaaaaggctccaaaactggaccgaagagtgtgataacctctggtgggacgcatttacaacagaatttttcgaggacgacgcaatgcttacaatcacattctgcctcgaagacggcccgaagcgttacaccatagggcgcacgctgataccccgatattttagatcaatttttgagggaggggcgaccgagttatactacgtactgaagcaccccaaggaagcgttccattctaactttgtgtctctggactgtgatcagggcagtatggtgacccagcacgggaagccaatgtttacgcaggtgtgtgtagaaggcaggctgtatttagagtttatgtttgacgacatgatgagaatcaagacttggcacttcagcatcagacagcatcgcgaactcatccctcggtctatactcgcaatgcatgcccaggatccccagatgctcgatcaactctcaaagaacatcactagatgcggccttagcaacagcaccctcaattatctcagactgtgtgtgattctggaacctatgcaggagctgatgtctagacacaagacgtactcgctctccccaagggactgcctcaaaacctgtctgtttcagaagtggcagagaatggtagcccctcccgcagagcctacacgacagcagccttcaaaacgccggaaacgaaagatgagcggaggctcaaccatgtcctcgggtggcggcaatacaaataattctaattctaaaaagaagtcccccgcgtcaacattcgccctctcgtcacaggtccccgatgtgatggtggtaggagaaccgactctgatgggcggggaattcggagatgaggatgaaaggttaattactaggctggagaacacccagtttgatgctgccaacggaattgacgatgaggactcattcaacaattccccagccttgggcgcaaacagcccgtggaactccaaaccacctagtagccaagaaagcaaatcagagaatccgactagccaggcttcccaatag

SEQ ID NO: 141802 - DNA, 1128 bp, Artificial Sequence
  derived and/or modified sequence
atgctggacagagatgtgggccccacccccatgtacccacccacctacctggagcccggcatcggccgccacaccccctacggcaaccagacagactaccgcatctttgagctgaacaagaggctgcagaactggacagaggagtgtgacaacctgtggtgggatgccttcaccacagagttctttgaagatgatgccatgctgaccatcaccttctgcctggaggatggccccaagcgctacaccatcggccgcaccctcatcccccgctacttccgcagcatctttgagggcggggccacagagctgtactacgtgctgaagcaccccaaggaggccttccacagcaactttgtgtccctggactgtgaccagggctccatggtgacccagcacggcaagcccatgttcacccaggtgtgtgtggagggccgcctgtacctggagttcatgtttgatgacatgatgaggatcaagacctggcacttcagcatccggcagcaccgggagctgatccccaggagcatcctggccatgcacgcccaggacccccagatgctggaccagctgagcaagaacatcacccgctgtggcctgagcaacagcaccctgaactacctgcggctgtgtgtgatcctggagcccatgcaggagctgatgagccgccacaagacctacagcctgagcccccgggactgcctgaagacctgcctcttccagaagtggcagaggatggtggcccccccagctgagcccacccggcagcagcccagcaagaggaggaagaggaagatgtctgggggcagcaccatgagcagcggcggcggcaacaccaacaacagcaacagcaagaagaagagccctgccagcacctttgccctgagcagccaggtgcctgatgtgatggtggtgggggagcccaccctgatgggcggggagtttggagatgaagatgagcggctcatcacccggctggagaacacccagtttgatgctgccaacggcattgatgatgaagattccttcaacaacagccctgccctgggcgccaacagcccctggaacagcaagccacccagcagccaggagagcaagtctgagaaccccaccagccaggccagccagtag

SEQ ID NO: 141803 - DNA, 1128 bp, Artificial Sequence
  derived and/or modified sequence
atgctggaccgggacgtgggccccacccccatgtacccccccacctacctcgaaccaggcattggtaggcacaccccgtatggcaatcaaaccgattacagaattttcgagctgaataagaggctgcagaactggacagaggagtgtgataatctgtggtgggatgcttttacgacagaattctttgaggacgatgccatgctcacaataactttttgtctcgaagatggtcctaagcgctataccatcgggaggacattgatccctagatatttccgttccatcttcgaaggaggtgccaccgagctgtattacgtcctcaagcacccaaaagaagccttccactccaacttcgtttctctggactgtgaccagggctccatggtgacccagcatggtaagcccatgttcacccaggtgtgtgttgaaggccggttgtacctggagtttatgttcgacgatatgatgaggattaagacctggcacttttcgatacgtcagcatcgcgagctgattccacgctctattttagccatgcacgctcaagatccacagatgctggaccagctgagcaagaacatcacacgctgcgggctgagtaactctactctgaattatctgcgcctctgtgtgattctggaaccaatgcaggaactgatgtctcggcataagacatattcactatccccgcgggattgtctcaaaacttgcctgtttcagaagtggcagcgtatggtggccccacccgcagaacccacccgacaacaaccaagcaagcgtcgcaagaggaagatgagcggcgggtcaaccatgtctagtggaggaggtaataccaataattccaattcgaaaaaaaaatctccagcttccacctttgcattaagcagccaggtgcccgatgtcatggtcgtgggcgaaccaactttgatggggggcgagttcggggatgaggatgagcgtctgatcacccggcttgagaacacccagttcgacgcagccaatggaatcgatgacgaagactcattcaacaattctcctgccctgggggccaatagcccctggaattcaaagcccccctcttcgcaggagtctaaaagtgagaatcctactagccaggcctctcaatag

SEQ ID NO: 141804 - DNA, 1128 bp, Artificial Sequence
  derived and/or modified sequence
atgctggaccgcgacgttggtcccacccccatgtatcctcccacctatctggaacccggtatagggaggcacaccccttacgggaatcagaccgattatcggatcttcgagctgaataagaggctgcaaaattggacggaggagtgtgataatctctggtgggacgccttcactacagagttcttcgaagacgatgcaatgctcacaatcaccttttgccttgaggatggtcctaaaaggtacaccattggtcgtactcttataccacgttacttccggtctattttcgagggcggagctaccgaactgtactacgtgctcaagcatcccaaagaggcctttcattctaacttcgtctcactagattgcgatcagggttcaatggtcacccagcacggtaagccgatgtttacacaagtttgcgttgaagggaggctgtatctggagttcatgttcgatgacatgatgaggatcaagacttggcacttttctattagacaacaccgggagctaattccccgatcaattctggctatgcacgctcaagacccacagatgttggaccagctgagtaagaatataacgcgttgcggtctgagcaactcaaccctaaactacttaagactgtgtgtcattttggagccaatgcaggaactaatgagtaggcataagacttatagcctgtcccctagggattgtctgaaaacttgtctgtttcagaagtggcagagaatggtcgcacctccagcagaacccactcggcaacagccctctaagcgacgaaaacgcaagatgagcggcggaagcacaatgagctctgggggtggcaataccaataattcaaattctaaaaaaaagtctcctgccagcacctttgccctttcctcccaggtgcctgacgtaatggtggtcggtgaaccaaccctcatggggggagagttcggggatgaggacgaaaggctcatcacccgcttggagaatactcagttcgatgctgcaaatggaatcgacgatgaggacagcttcaacaattcaccagccctcggcgctaacagtccctggaactcaaagccacctagctcacaagaatctaagagcgaaaatcccacatcccaggcgtcacagtag

SEQ ID NO: 141805 - DNA, 1128 bp, Artificial Sequence
  derived and/or modified sequence
atgctggacagagacgtgggccccacccccatgtacccccccacctacctggagcccggcatcggcagacacaccccctacggcaaccagaccgactacagaatcttcgagctgaacaagagactgcagaactggaccgaggagtgcgacaacctgtggtgggacgccttcaccaccgagttcttcgaggacgacgccatgctgaccatcaccttctgcctggaggacggccccaagagatacaccatcggcagaaccctgatccccagatacttcagaagcatcttcgagggcggcgccaccgagctgtactacgtgctgaagcaccccaaggaggccttccacagcaacttcgtgagcctggactgcgaccagggcagcatggtgacccagcacggcaagcccatgttcacccaggtgtgcgtggagggcagactgtacctggagttcatgttcgacgacatgatgagaatcaagacctggcacttcagcatcagacagcacagagagctgatccccagaagcatcctggccatgcacgcccaggacccccagatgctggaccagctgagcaagaacatcaccagatgcggcctgagcaacagcaccctgaactacctgagactgtgcgtgatcctggagcccatgcaggagctgatgagcagacacaagacctacagcctgagccccagagactgcctgaagacctgcctgttccagaagtggcagagaatggtggccccccccgccgagcccaccagacagcagcccagcaagagaagaaagagaaagatgagcggcggcagcaccatgagcagcggcggcggcaacaccaacaacagcaacagcaagaagaagagccccgccagcaccttcgccctgagcagccaggtgcccgacgtgatggtggtgggcgagcccaccctgatgggcggcgagttcggcgacgaggacgagagactgatcaccagactggagaacacccagttcgacgccgccaacggcatcgacgacgaggacagcttcaacaacagccccgccctgggcgccaacagcccctggaacagcaagccccccagcagccaggagagcaagagcgagaaccccaccagccaggccagccagtag

SEQ ID NO: 141806 - protein, 1573 aa, Artificial Sequence
  derived and/or modified sequence
MAFSKGFRIYHKLDPPPFSLIVETRHKEECLMFESGAVAVLSSAEKEAIKGTYSKVLDAYGLLGVLRLNLGDTMLHYLVLVTGCMSVGKIQESEVFRVTSTEFISLRIDSSDEDRISEVRKVLNSGNFYFAWSASGISLDLSLNAHRSMQEQTTDNRFFWNQSLHLHLKHYGVNCDDWLLRLMCGGVEIRTIYAAHKQAKACLISRLSCERAGTRFNVRGTNDDGHVANFVETEQVVYLDDSVSSFIQIRGSVPLFWEQPGLQVGSHRVRMSRGFEANAPAFDRHFRTLKNLYGKQIIVNLLGSKEGEHMLSKAFQSHLKASEHAADIQMVNFDYHQMVKGGKAEKLHSVLKPQVQKFLDYGFFYFNGSEVQRCQSGTVRTNCLDCLDRTNSVQAFLGLEMLAKQLEALGLAEKPQLVTRFQEVFRSMWSVNGDSISKIYAGTGALEGKAKLKDGARSVTRTIQNNFFDSSKQEAIDVLLLGNTLNSDLADKARALLTTGSLRVSEQTLQSASSKVLKSMCENFYKYSKPKKIRVCVGTWNVNGGKQFRSIAFKNQTLTDWLLDAPKLAGIQEFQDKRSKPTDIFAIGFEEMVELNAGNIVSASTTNQKLWAVELQKTISRDNKYVLLASEQLVGVCLFVFIRPQHAPFIRDVAVDTVKTGMGGATGNKGAVAIRMLFHTTSLCFVCSHFAAGQSQVKERNEDFIEIARKLSFPMGRMLFSHDYVFWCGDFNYRIDLPNEEVKELIRQQNWDSLIAGDQLINQKNAGQVFRGFLEGKVTFAPTYKYDLFSDDYDTSEKCRTPAWTDRVLWRRRKWPFDRSAEDLDLLNASFQDESKILYTWTPGTLLHYGRAELKTSDHRPVVALIDIDIFEVEAEERQNIYKEVIAVQGPPDGTVLVSIKSSLPENNFFDDALIDELLQQFASFGEVILIRFVEDKMWVTFLEGSSALNVLSLNGKELLNRTITIALKSPDWIKNLEEEMSLEKISIALPSSTSSTLLGEDAEVAADFDMEGDVDDYSAEVEELLPQHLQPSSSSGLGTSPSSSPRTSPCQSPTISEGPVPSLPIRPSRAPSRTPGPPSAQSSPIDAQPATPLPQKDPAQPLEPKRPPPPRPVAPPTRPAPPQRPPPPSGARSPAPTRKEFGGIGAPPSPGVARREMEAPKSPGTTRKDNIGRSQPSPQAGLAGPGPAGYSTARPTIPPRAGVISAPQSHARASAGRLTPESQSKTSETSKGSTFLPEPLKPQAAFPPQSSLPPPAQRLQEPLVPVAAPMPQSGPQPNLETPPQPPPRSRSSHSLPSEASSQPQVKTNGISDGKRESPLKIDPFEDLSFNLLAVSKAQLSVQTSPVPTPDPKRLIQLPSATQSNVLSSVSCMPTMPPIPARSQSQENMRSSPNPFITGLTRTNPFSDRTAAPGNPFRAKSEESEATSWFSKEEPVTISPFPSLQPLGHNKSRASSSLDGFKDSFDLQGQSTLKISNPKGWVTFEEEEDFGVKGKSKSACSDLLGNQPSSFSGSNLTLNDDWNKGTNVSFCVLPSRRPPPPPVPLLPPGTSPPVDPFTTLASKASPTLDFTER

SEQ ID NO: 141807 - protein, 1612 aa, Artificial Sequence
  derived and/or modified sequence
MRKRWACWSGSDAPGGCGGGCGRRRRRSRRKRAASEERRMAFSKGFRIYHKLDPPPFSLIVETRHKEECLMFESGAVAVLSSAEKEAIKGTYSKVLDAYGLLGVLRLNLGDTMLHYLVLVTGCMSVGKIQESEVFRVTSTEFISLRIDSSDEDRISEVRKVLNSGNFYFAWSASGISLDLSLNAHRSMQEQTTDNRFFWNQSLHLHLKHYGVNCDDWLLRLMCGGVEIRTIYAAHKQAKACLISRLSCERAGTRFNVRGTNDDGHVANFVETEQVVYLDDSVSSFIQIRGSVPLFWEQPGLQVGSHRVRMSRGFEANAPAFDRHFRTLKNLYGKQIIVNLLGSKEGEHMLSKAFQSHLKASEHAADIQMVNFDYHQMVKGGKAEKLHSVLKPQVQKFLDYGFFYFNGSEVQRCQSGTVRTNCLDCLDRTNSVQAFLGLEMLAKQLEALGLAEKPQLVTRFQEVFRSMWSVNGDSISKIYAGTGALEGKAKLKDGARSVTRTIQNNFFDSSKQEAIDVLLLGNTLNSDLADKARALLTTGSLRVSEQTLQSASSKVLKSMCENFYKYSKPKKIRVCVGTWNVNGGKQFRSIAFKNQTLTDWLLDAPKLAGIQEFQDKRSKPTDIFAIGFEEMVELNAGNIVSASTTNQKLWAVELQKTISRDNKYVLLASEQLVGVCLFVFIRPQHAPFIRDVAVDTVKTGMGGATGNKGAVAIRMLFHTTSLCFVCSHFAAGQSQVKERNEDFIEIARKLSFPMGRMLFSHDYVFWCGDFNYRIDLPNEEVKELIRQQNWDSLIAGDQLINQKNAGQVFRGFLEGKVTFAPTYKYDLFSDDYDTSEKCRTPAWTDRVLWRRRKWPFDRSAEDLDLLNASFQDESKILYTWTPGTLLHYGRAELKTSDHRPVVALIDIDIFEVEAEERQNIYKEVIAVQGPPDGTVLVSIKSSLPENNFFDDALIDELLQQFASFGEVILIRFVEDKMWVTFLEGSSALNVLSLNGKELLNRTITIALKSPDWIKNLEEEMSLEKISIALPSSTSSTLLGEDAEVAADFDMEGDVDDYSAEVEELLPQHLQPSSSSGLGTSPSSSPRTSPCQSPTISEGPVPSLPIRPSRAPSRTPGPPSAQSSPIDAQPATPLPQKDPAQPLEPKRPPPPRPVAPPTRPAPPQRPPPPSGARSPAPTRKEFGGIGAPPSPGVARREMEAPKSPGTTRKDNIGRSQPSPQAGLAGPGPAGYSTARPTIPPRAGVISAPQSHARASAGRLTPESQSKTSETSKGSTFLPEPLKPQAAFPPQSSLPPPAQRLQEPLVPVAAPMPQSGPQPNLETPPQPPPRSRSSHSLPSEASSQPQVKTNGISDGKRESPLKIDPFEDLSFNLLAVSKAQLSVQTSPVPTPDPKRLIQLPSATQSNVLSSVSCMPTMPPIPARSQSQENMRSSPNPFITGLTRTNPFSDRTAAPGNPFRAKSEESEATSWFSKEEPVTISPFPSLQPLGHNKSRASSSLDGFKDSFDLQGQSTLKISNPKGWVTFEEEEDFGVKGKSKSACSDLLGNQPSSFSGSNLTLNDDWNKGTNVSFCVLPSRRPPPPPVPLLPPGTSPPVDPFTTLASKASPTLDFTER

SEQ ID NO: 141808 - DNA, 4722 bp, Artificial Sequence
  derived and/or modified sequence
atggccttcagcaagggcttcagaatctaccacaagctggaccccccccccttcagcctgatcgtggagaccagacacaaggaggagtgcctgatgttcgagagcggcgccgtggccgtgctgagcagcgccgagaaggaggccatcaagggcacctacagcaaggtgctggacgcctacggcctgctgggcgtgctgagactgaacctgggcgacaccatgctgcactacctggtgctggtgaccggctgcatgagcgtgggcaagatccaggagagcgaggtgttcagagtgaccagcaccgagttcatcagcctgagaatcgacagcagcgacgaggacagaatcagcgaggtgagaaaggtgctgaacagcggcaacttctacttcgcctggagcgccagcggcatcagcctggacctgagcctgaacgcccacagaagcatgcaggagcagaccaccgacaacagattcttctggaaccagagcctgcacctgcacctgaagcactacggcgtgaactgcgacgactggctgctgagactgatgtgcggcggcgtggagatcagaaccatctacgccgcccacaagcaggccaaggcctgcctgatcagcagactgagctgcgagagagccggcaccagattcaacgtgagaggcaccaacgacgacggccacgtggccaacttcgtggagaccgagcaggtggtgtacctggacgacagcgtgagcagcttcatccagatcagaggcagcgtgcccctgttctgggagcagcccggcctgcaggtgggcagccacagagtgagaatgagcagaggcttcgaggccaacgcccccgccttcgacagacacttcagaaccctgaagaacctgtacggcaagcagatcatcgtgaacctgctgggcagcaaggagggcgagcacatgctgagcaaggccttccagagccacctgaaggccagcgagcacgccgccgacatccagatggtgaacttcgactaccaccagatggtgaagggcggcaaggccgagaagctgcacagcgtgctgaagccccaggtgcagaagttcctggactacggcttcttctacttcaacggcagcgaggtgcagagatgccagagcggcaccgtgagaaccaactgcctggactgcctggacagaaccaacagcgtgcaggccttcctgggcctggagatgctggccaagcagctggaggccctgggcctggccgagaagccccagctggtgaccagattccaggaggtgttcagaagcatgtggagcgtgaacggcgacagcatcagcaagatctacgccggcaccggcgccctggagggcaaggccaagctgaaggacggcgccagaagcgtgaccagaaccatccagaacaacttcttcgacagcagcaagcaggaggccatcgacgtgctgctgctgggcaacaccctgaacagcgacctggccgacaaggccagagccctgctgaccaccggcagcctgagagtgagcgagcagaccctgcagagcgccagcagcaaggtgctgaagagcatgtgcgagaacttctacaagtacagcaagcccaagaagatcagagtgtgcgtgggcacctggaacgtgaacggcggcaagcagttcagaagcatcgccttcaagaaccagaccctgaccgactggctgctggacgcccccaagctggccggcatccaggagttccaggacaagagaagcaagcccaccgacatcttcgccatcggcttcgaggagatggtggagctgaacgccggcaacatcgtgagcgccagcaccaccaaccagaagctgtgggccgtggagctgcagaagaccatcagcagagacaacaagtacgtgctgctggccagcgagcagctggtgggcgtgtgcctgttcgtgttcatcagaccccagcacgcccccttcatcagagacgtggccgtggacaccgtgaagaccggcatgggcggcgccaccggcaacaagggcgccgtggccatcagaatgctgttccacaccaccagcctgtgcttcgtgtgcagccacttcgccgccggccagagccaggtgaaggagagaaacgaggacttcatcgagatcgccagaaagctgagcttccccatgggcagaatgctgttcagccacgactacgtgttctggtgcggcgacttcaactacagaatcgacctgcccaacgaggaggtgaaggagctgatcagacagcagaactgggacagcctgatcgccggcgaccagctgatcaaccagaagaacgccggccaggtgttcagaggcttcctggagggcaaggtgaccttcgcccccacctacaagtacgacctgttcagcgacgactacgacaccagcgagaagtgcagaacccccgcctggaccgacagagtgctgtggagaagaagaaagtggcccttcgacagaagcgccgaggacctggacctgctgaacgccagcttccaggacgagagcaagatcctgtacacctggacccccggcaccctgctgcactacggcagagccgagctgaagaccagcgaccacagacccgtggtggccctgatcgacatcgacatcttcgaggtggaggccgaggagagacagaacatctacaaggaggtgatcgccgtgcagggcccccccgacggcaccgtgctggtgagcatcaagagcagcctgcccgagaacaacttcttcgacgacgccctgatcgacgagctgctgcagcagttcgccagcttcggcgaggtgatcctgatcagattcgtggaggacaagatgtgggtgaccttcctggagggcagcagcgccctgaacgtgctgagcctgaacggcaaggagctgctgaacagaaccatcaccatcgccctgaagagccccgactggatcaagaacctggaggaggagatgagcctggagaagatcagcatcgccctgcccagcagcaccagcagcaccctgctgggcgaggacgccgaggtggccgccgacttcgacatggagggcgacgtggacgactacagcgccgaggtggaggagctgctgccccagcacctgcagcccagcagcagcagcggcctgggcaccagccccagcagcagccccagaaccagcccctgccagagccccaccatcagcgagggccccgtgcccagcctgcccatcagacccagcagagcccccagcagaacccccggcccccccagcgcccagagcagccccatcgacgcccagcccgccacccccctgccccagaaggaccccgcccagcccctggagcccaagagaccccccccccccagacccgtggccccccccaccagacccgcccccccccagagaccccccccccccagcggcgccagaagccccgcccccaccagaaaggagttcggcggcatcggcgccccccccagccccggcgtggccagaagagagatggaggcccccaagagccccggcaccaccagaaaggacaacatcggcagaagccagcccagcccccaggccggcctggccggccccggccccgccggctacagcaccgccagacccaccatcccccccagagccggcgtgatcagcgccccccagagccacgccagagccagcgccggcagactgacccccgagagccagagcaagaccagcgagaccagcaagggcagcaccttcctgcccgagcccctgaagccccaggccgccttccccccccagagcagcctgcccccccccgcccagagactgcaggagcccctggtgcccgtggccgcccccatgccccagagcggcccccagcccaacctggagacccccccccagcccccccccagaagcagaagcagccacagcctgcccagcgaggccagcagccagccccaggtgaagaccaacggcatcagcgacggcaagagagagagccccctgaagatcgaccccttcgaggacctgagcttcaacctgctggccgtgagcaaggcccagctgagcgtgcagaccagccccgtgcccacccccgaccccaagagactgatccagctgcccagcgccacccagagcaacgtgctgagcagcgtgagctgcatgcccaccatgccccccatccccgccagaagccagagccaggagaacatgagaagcagccccaaccccttcatcaccggcctgaccagaaccaaccccttcagcgacagaaccgccgcccccggcaaccccttcagagccaagagcgaggagagcgaggccaccagctggttcagcaaggaggagcccgtgaccatcagccccttccccagcctgcagcccctgggccacaacaagagcagagccagcagcagcctggacggcttcaaggacagcttcgacctgcagggccagagcaccctgaagatcagcaaccccaagggctgggtgaccttcgaggaggaggaggacttcggcgtgaagggcaagagcaagagcgcctgcagcgacctgctgggcaaccagcccagcagcttcagcggcagcaacctgaccctgaacgacgactggaacaagggcaccaacgtgagcttctgcgtgctgcccagcagaagacccccccccccccccgtgcccctgctgccccccggcaccagcccccccgtggaccccttcaccaccctggccagcaaggccagccccaccctggacttcaccgagagatag

SEQ ID NO: 141809 - DNA, 4053 bp, Artificial Sequence
  derived and/or modified sequence
atgagaaagagatgggcctgctggagcggcagcgacgcccccggcggctgcggcggcggctgcggcagaagaagaagaagaagcagaagaaagagagccgccagcgaggagagaagaatggccttcagcaagggcttcagaatctaccacaagctggaccccccccccttcagcctgatcgtggagaccagacacaaggaggagtgcctgatgttcgagagcggcgccgtggccgtgctgagcagcgccgagaaggaggccatcaagggcacctacagcaaggtgctggacgcctacggcctgctgggcgtgctgagactgaacctgggcgacaccatgctgcactacctggtgctggtgaccggctgcatgagcgtgggcaagatccaggagagcgaggtgttcagagtgaccagcaccgagttcatcagcctgagaatcgacagcagcgacgaggacagaatcagcgaggtgagaaaggtgctgaacagcggcaacttctacttcgcctggagcgccagcggcatcagcctggacctgagcctgaacgcccacagaagcatgcaggagcagaccaccgacaacagattcttctggaaccagagcctgcacctgcacctgaagcactacggcgtgaactgcgacgactggctgctgagactgatgtgcggcggcgtggagatcagaaccatctacgccgcccacaagcaggccaaggcctgcctgatcagcagactgagctgcgagagagccggcaccagattcaacgtgagaggcaccaacgacgacggccacgtggccaacttcgtggagaccgagcaggtggtgtacctggacgacagcgtgagcagcttcatccagatcagaggcagcgtgcccctgttctgggagcagcccggcctgcaggtgggcagccacagagtgagaatgagcagaggcttcgaggccaacgcccccgccttcgacagacacttcagaaccctgaagaacctgtacggcaagcagatcatcgtgaacctgctgggcagcaaggagggcgagcacatgctgagcaaggccttccagagccacctgaaggccagcgagcacgccgccgacatccagatggtgaacttcgactaccaccagatggtgaagggcggcaaggccgagaagctgcacagcgtgctgaagccccaggtgcagaagttcctggactacggcttcttctacttcaacggcagcgaggtgcagagatgccagagcggcaccgtgagaaccaactgcctggactgcctggacagaaccaacagcgtgcaggccttcctgggcctggagatgctggccaagcagctggaggccctgggcctggccgagaagccccagctggtgaccagattccaggaggtgttcagaagcatgtggagcgtgaacggcgacagcatcagcaagatctacgccggcaccggcgccctggagggcaaggccaagctgaaggacggcgccagaagcgtgaccagaaccatccagaacaacttcttcgacagcagcaagcaggaggccatcgacgtgctgctgctgggcaacaccctgaacagcgacctggccgacaaggccagagccctgctgaccaccggcagcctgagagtgagcgagcagaccctgcagagcgccagcagcaaggtgctgaagagcatgtgcgagaacttctacaagtacagcaagcccaagaagatcagagtgtgcgtgggcacctggaacgtgaacggcggcaagcagttcagaagcatcgccttcaagaaccagaccctgaccgactggctgctggacgcccccaagctggccggcatccaggagttccaggacaagagaagcaagcccaccgacatcttcgccatcggcttcgaggagatggtggagctgaacgccggcaacatcgtgagcgccagcaccaccaaccagaagctgtgggccgtggagctgcagaagaccatcagcagagacaacaagtacgtgctgctggccagcgagcagctggtgggcgtgtgcctgttcgtgttcatcagaccccagcacgcccccttcatcagagacgtggccgtggacaccgtgaagaccggcatgggcggcgccaccggcaacaagggcgccgtggccatcagaatgctgttccacaccaccagcctgtgcttcgtgtgcagccacttcgccgccggccagagccaggtgaaggagagaaacgaggacttcatcgagatcgccagaaagctgagcttccccatgggcagaatgctgttcagccacgactacgtgttctggtgcggcgacttcaactacagaatcgacctgcccaacgaggaggtgaaggagctgatcagacagcagaactgggacagcctgatcgccggcgaccagctgatcaaccagaagaacgccggccaggtgttcagaggcttcctggagggcaaggtgaccttcgcccccacctacaagtacgacctgttcagcgacgactacgacaccagcgagaagtgcagaacccccgcctggaccgacagagtgctgtggagaagaagaaagtggcccttcgacagaagcgccgaggacctggacctgctgaacgccagcttccaggacgagagcaagatcctgtacacctggacccccggcaccctgctgcactacggcagagccgagctgaagaccagcgaccacagacccgtggtggccctgatcgacatcgacatcttcgaggtggaggccgaggagagacagaacatctacaaggaggtgatcgccgtgcagggcccccccgacggcaccgtgctggtgagcatcaagagcagcctgcccgagaacaacttcttcgacgacgccctgatcgacgagctgctgcagcagttcgccagcttcggcgaggtgatcctgatcagattcgtggaggacaagatgtgggtgaccttcctggagggcagcagcgccctgaacgtgctgagcctgaacggcaaggagctgctgaacagaaccatcaccatcgccctgaagagccccgactggatcaagaacctggaggaggagatgagcctggagaagatcagcatcgccctgcccagcagcaccagcagcaccctgctgggcgaggacgccgaggtggccgccgacttcgacatggagggcgacgtggacgactacagcgccgaggtggaggagctgctgccccagcacctgcagcccagcagcagcagcggcctgggcaccagccccagcagcagccccagaaccagcccctgccagagccccaccatcagcgagggccccgtgcccagcctgcccatcagacccagcagagcccccagcagaacccccggcccccccagcgcccagagcagccccatcgacgcccagcccgccacccccctgccccagaaggaccccgcccagcccctggagcccaagagaccccccccccccagacccgtggccccccccaccagacccgcccccccccagagaccccccccccccagcggcgccagaagccccgcccccaccagaaaggagttcggcggcatcggcgccccccccagccccggcgtggccagaagagagatggaggcccccaagagccccggcaccaccagaaaggacaacatcggcagaagccagcccagcccccaggccggcctggccggccccggccccgccggctacagcaccgccagacccaccatcccccccagagccggcgtgatcagcgccccccagagccacgccagagccagcgccggcagactgacccccgagagccagagcaagaccagcgagaccagcaagggcagcaccttcctgcccgagcccctgaagccccaggccgccttccccccccagagcagcctgcccccccccgcccagagactgcaggagcccctggtgcccgtggccgcccccatgccccagagcggcccccagcccaacctggagacccccccccagcccccccccagaagcagaagcagccacagcctgcccagcgaggccagcagccagccccagcaggagcagcccagcggctag

SEQ ID NO: 141810 - DNA, 4839 bp, Artificial Sequence
  derived and/or modified sequence
atgagaaagagatgggcctgctggagcggcagcgacgcccccggcggctgcggcggcggctgcggcagaagaagaagaagaagcagaagaaagagagccgccagcgaggagagaagaatggccttcagcaagggcttcagaatctaccacaagctggaccccccccccttcagcctgatcgtggagaccagacacaaggaggagtgcctgatgttcgagagcggcgccgtggccgtgctgagcagcgccgagaaggaggccatcaagggcacctacagcaaggtgctggacgcctacggcctgctgggcgtgctgagactgaacctgggcgacaccatgctgcactacctggtgctggtgaccggctgcatgagcgtgggcaagatccaggagagcgaggtgttcagagtgaccagcaccgagttcatcagcctgagaatcgacagcagcgacgaggacagaatcagcgaggtgagaaaggtgctgaacagcggcaacttctacttcgcctggagcgccagcggcatcagcctggacctgagcctgaacgcccacagaagcatgcaggagcagaccaccgacaacagattcttctggaaccagagcctgcacctgcacctgaagcactacggcgtgaactgcgacgactggctgctgagactgatgtgcggcggcgtggagatcagaaccatctacgccgcccacaagcaggccaaggcctgcctgatcagcagactgagctgcgagagagccggcaccagattcaacgtgagaggcaccaacgacgacggccacgtggccaacttcgtggagaccgagcaggtggtgtacctggacgacagcgtgagcagcttcatccagatcagaggcagcgtgcccctgttctgggagcagcccggcctgcaggtgggcagccacagagtgagaatgagcagaggcttcgaggccaacgcccccgccttcgacagacacttcagaaccctgaagaacctgtacggcaagcagatcatcgtgaacctgctgggcagcaaggagggcgagcacatgctgagcaaggccttccagagccacctgaaggccagcgagcacgccgccgacatccagatggtgaacttcgactaccaccagatggtgaagggcggcaaggccgagaagctgcacagcgtgctgaagccccaggtgcagaagttcctggactacggcttcttctacttcaacggcagcgaggtgcagagatgccagagcggcaccgtgagaaccaactgcctggactgcctggacagaaccaacagcgtgcaggccttcctgggcctggagatgctggccaagcagctggaggccctgggcctggccgagaagccccagctggtgaccagattccaggaggtgttcagaagcatgtggagcgtgaacggcgacagcatcagcaagatctacgccggcaccggcgccctggagggcaaggccaagctgaaggacggcgccagaagcgtgaccagaaccatccagaacaacttcttcgacagcagcaagcaggaggccatcgacgtgctgctgctgggcaacaccctgaacagcgacctggccgacaaggccagagccctgctgaccaccggcagcctgagagtgagcgagcagaccctgcagagcgccagcagcaaggtgctgaagagcatgtgcgagaacttctacaagtacagcaagcccaagaagatcagagtgtgcgtgggcacctggaacgtgaacggcggcaagcagttcagaagcatcgccttcaagaaccagaccctgaccgactggctgctggacgcccccaagctggccggcatccaggagttccaggacaagagaagcaagcccaccgacatcttcgccatcggcttcgaggagatggtggagctgaacgccggcaacatcgtgagcgccagcaccaccaaccagaagctgtgggccgtggagctgcagaagaccatcagcagagacaacaagtacgtgctgctggccagcgagcagctggtgggcgtgtgcctgttcgtgttcatcagaccccagcacgcccccttcatcagagacgtggccgtggacaccgtgaagaccggcatgggcggcgccaccggcaacaagggcgccgtggccatcagaatgctgttccacaccaccagcctgtgcttcgtgtgcagccacttcgccgccggccagagccaggtgaaggagagaaacgaggacttcatcgagatcgccagaaagctgagcttccccatgggcagaatgctgttcagccacgactacgtgttctggtgcggcgacttcaactacagaatcgacctgcccaacgaggaggtgaaggagctgatcagacagcagaactgggacagcctgatcgccggcgaccagctgatcaaccagaagaacgccggccaggtgttcagaggcttcctggagggcaaggtgaccttcgcccccacctacaagtacgacctgttcagcgacgactacgacaccagcgagaagtgcagaacccccgcctggaccgacagagtgctgtggagaagaagaaagtggcccttcgacagaagcgccgaggacctggacctgctgaacgccagcttccaggacgagagcaagatcctgtacacctggacccccggcaccctgctgcactacggcagagccgagctgaagaccagcgaccacagacccgtggtggccctgatcgacatcgacatcttcgaggtggaggccgaggagagacagaacatctacaaggaggtgatcgccgtgcagggcccccccgacggcaccgtgctggtgagcatcaagagcagcctgcccgagaacaacttcttcgacgacgccctgatcgacgagctgctgcagcagttcgccagcttcggcgaggtgatcctgatcagattcgtggaggacaagatgtgggtgaccttcctggagggcagcagcgccctgaacgtgctgagcctgaacggcaaggagctgctgaacagaaccatcaccatcgccctgaagagccccgactggatcaagaacctggaggaggagatgagcctggagaagatcagcatcgccctgcccagcagcaccagcagcaccctgctgggcgaggacgccgaggtggccgccgacttcgacatggagggcgacgtggacgactacagcgccgaggtggaggagctgctgccccagcacctgcagcccagcagcagcagcggcctgggcaccagccccagcagcagccccagaaccagcccctgccagagccccaccatcagcgagggccccgtgcccagcctgcccatcagacccagcagagcccccagcagaacccccggcccccccagcgcccagagcagccccatcgacgcccagcccgccacccccctgccccagaaggaccccgcccagcccctggagcccaagagaccccccccccccagacccgtggccccccccaccagacccgcccccccccagagaccccccccccccagcggcgccagaagccccgcccccaccagaaaggagttcggcggcatcggcgccccccccagccccggcgtggccagaagagagatggaggcccccaagagccccggcaccaccagaaaggacaacatcggcagaagccagcccagcccccaggccggcctggccggccccggccccgccggctacagcaccgccagacccaccatcccccccagagccggcgtgatcagcgccccccagagccacgccagagccagcgccggcagactgacccccgagagccagagcaagaccagcgagaccagcaagggcagcaccttcctgcccgagcccctgaagccccaggccgccttccccccccagagcagcctgcccccccccgcccagagactgcaggagcccctggtgcccgtggccgcccccatgccccagagcggcccccagcccaacctggagacccccccccagcccccccccagaagcagaagcagccacagcctgcccagcgaggccagcagccagccccaggtgaagaccaacggcatcagcgacggcaagagagagagccccctgaagatcgaccccttcgaggacctgagcttcaacctgctggccgtgagcaaggcccagctgagcgtgcagaccagccccgtgcccacccccgaccccaagagactgatccagctgcccagcgccacccagagcaacgtgctgagcagcgtgagctgcatgcccaccatgccccccatccccgccagaagccagagccaggagaacatgagaagcagccccaaccccttcatcaccggcctgaccagaaccaaccccttcagcgacagaaccgccgcccccggcaaccccttcagagccaagagcgaggagagcgaggccaccagctggttcagcaaggaggagcccgtgaccatcagccccttccccagcctgcagcccctgggccacaacaagagcagagccagcagcagcctggacggcttcaaggacagcttcgacctgcagggccagagcaccctgaagatcagcaaccccaagggctgggtgaccttcgaggaggaggaggacttcggcgtgaagggcaagagcaagagcgcctgcagcgacctgctgggcaaccagcccagcagcttcagcggcagcaacctgaccctgaacgacgactggaacaagggcaccaacgtgagcttctgcgtgctgcccagcagaagacccccccccccccccgtgcccctgctgccccccggcaccagcccccccgtggaccccttcaccaccctggccagcaaggccagccccaccctggacttcaccgagagatag

SEQ ID NO: 141811 - DNA, 4722 bp, Artificial Sequence
  derived and/or modified sequence
atggcattttcaaaaggcttcagaatctatcataaactggatcctccaccctttagcctcatcgtggaaactcggcataaagaggaatgtctgatgtttgaaagcggcgcagtcgctgttctgagttctgcagaaaaggaggccattaagggcacctactccaaggtcctggatgcttacggactacttggggttttaagacttaacctcggagacacaatgctccactatctggtcctggtgaccgggtgcatgtcagtgggaaagattcaggagtcagaggtatttagagtgacctccaccgagtttatttcgctccgcatcgattcttccgatgaagacaggatctccgaggtacgcaaggttttgaattctgggaacttttactttgcctggtctgcaagtggcatctcactggaccttagccttaacgcacacaggagtatgcaggagcaaaccaccgacaatcgcttcttctggaaccaaagcctgcacctccacctgaaacactatggagtaaactgcgatgattggctcctaaggctcatgtgcggcggtgtggagataagaaccatatacgctgctcacaaacaagctaaagcatgcttgatctctaggctatcttgcgaacgtgccggcactcgcttcaatgtaagaggcaccaacgacgatggtcacgtggctaacttcgttgagacagaacaggtcgtctacttggatgatagcgtgtcttctttcattcagattcgcggcagcgtcccactgttttgggagcagcccggccttcaggtgggctcccatagggttagaatgtcgaggggattcgaggcgaatgctcccgccttcgatcggcatttcagaacccttaaaaacctgtacggcaaacaaatcatcgtcaacctcttaggcagtaaagagggcgagcacatgttaagcaaagccttccagagccatctgaaagcaagcgaacatgcagcagacattcaaatggtgaacttcgactaccatcagatggtaaagggtggaaaggctgagaagttacatagcgttctgaagccccaggtccagaaatttctggattatggatttttctatttcaacggatctgaagttcagagatgtcagagcggaaccgtgagaacaaactgcctcgattgcctggaccgcacaaattcggtgcaagccttcttgggccttgaaatgctcgccaagcagctggaggctctcggactggccgaaaaaccacaactggttactcgatttcaggaggtgttcaggtccatgtggtccgttaacggagactcgattagtaaaatatacgccggcacaggagcactagaggggaaagccaagctgaaggatggggcccgtagtgtgactcgaactattcaaaacaatttcttcgatagcagcaaacaagaggctatcgacgtcctgctgctgggcaacaccttgaacagtgacctggctgataaggcacgagcgctgctcaccacaggttccctgagagtgtccgaacagacactccaatccgcatccagtaaggtccttaagtctatgtgcgagaacttctacaagtattcaaagcccaagaagatccgtgtttgcgtcgggacatggaacgtgaacgggggcaaacagtttagatctattgcgttcaaaaatcaaactctcactgattggcttctggacgcacctaaactcgcaggcattcaggaatttcaagataaacggtccaaaccaactgatatctttgccatcggtttcgaagagatggtggagctcaacgcaggtaatatcgtctcagcctccacaaccaatcagaaactctgggctgtcgaactgcagaagacgatcagccgagataataagtacgtgctactagcaagcgaacaactggtaggcgtatgcctgtttgtgttcatcagaccccaacacgccccatttattagggacgttgccgtcgacacagtgaaaaccggaatgggcggtgccaccggaaataagggagctgtggcgatcaggatgctcttccacacgacctcactttgttttgtgtgtagtcactttgccgcgggccagagtcaggtaaaggagcggaatgaagatttcatcgagatcgcgcgcaagctctcctttccaatgggacgcatgttgttcagccacgattacgtgttttggtgcggagatttcaattaccgtattgatctgcccaacgaggaggtgaaagagcttattcgtcaacagaattgggactccctcatcgcgggcgatcagctgatcaatcagaaaaatgctggacaggtgtttaggggctttctcgaaggtaaggtgacatttgctcccacatacaagtatgatctgtttagcgacgactacgacacctccgagaagtgccgaacccccgcctggaccgatcgcgtgctgtggagacgccggaaatggccctttgatcggtcagctgaagacctcgacttgctaaacgcctccttccaagacgagagcaaaattctgtatacttggacacccgggactctccttcattatggtagagccgagctgaagacatccgaccatcggccagtcgtcgccttaatcgacatagacatcttcgaggttgaagctgaggagcgtcagaatatttacaaagaggtgattgctgttcagggcccaccagatggtactgttctcgtgtccatcaagagttccctcccagagaataatttctttgacgacgccttgatcgacgaactgctgcaacagttcgcctccttcggagaagtgatcttgatcaggttcgtcgaagataagatgtgggtgaccttcctggagggttctagcgccctcaacgttttgtctctgaatggcaaggagctgttgaaccgaacgattacgatcgccctcaagagccccgactggatcaagaaccttgaggaagagatgagcttggaaaaaatcagcattgcactgccctcttcaacatcatcaaccctcctaggagaggatgcggaagtggctgccgattttgacatggaaggggatgttgacgactacagtgctgaggtggaagagttgctccctcagcacctgcagccctccagttctagtgggctggggactagtcctagtagttccccacgcacttctccctgccagtctcccaccatcagcgagggacccgtgccatcacttccaatcaggccttccagggccccctcgcgcacccccgggccacctagtgcccaaagctcccctattgacgctcagccagccacacctttgccgcaaaaagacccagctcagcctctggaacctaagaggcctcctcccccgcggcccgtcgcccctcccacaaggccagcaccgccgcaacgtccaccaccaccttctggcgccagaagtcctgcccccacacgcaaagaatttggtggaatcggcgcccctcctagtcccggggtcgcacgccgcgaaatggaagcacctaagagtcccggcacaactcgaaaggataatataggcaggagtcagccgtcaccccaggccggcctggccggccccggcccggccggatactccactgcaagaccaaccattccacctcgcgctggagtgataagcgcaccacaatcacacgcccgagcctccgctggtcggcttactcctgagtcacagagcaagacctctgaaacctctaaaggaagtacattcctgccagagcctcttaaaccccaagccgcctttcctccacagtccagtttgccgcctccggctcagaggctccaagagcctcttgtacctgtggctgccccaatgccccagagcggcccacagcctaacctagagacgccaccacagcctccgcctcgctcccgctctagccattctcttccaagcgaggcttctagccagccacaggtgaaaaccaacggaatctctgacggcaaacgcgaaagcccgctgaagattgaccctttcgaagacctctcattcaacttactggcagtttccaaagctcagttgtctgtgcagacttctccagtgccaactcccgaccctaagaggctaatccaactaccgagtgcaactcaaagcaatgtcctctcttctgtgagctgtatgccaactatgcctcccatcccggccagaagtcagtctcaggaaaatatgcgttcaagtccaaacccttttatcactggcctgacgcgcactaatccattttccgaccggacggcagccccaggaaacccgtttagggcaaaatcggaagaaagtgaagctacttcttggttcagcaaagaggagcccgtgacgatcagtcctttcccctccctccaaccattaggccataataaatcaagagccagctcctccctggacggtttcaaggatagttttgatcttcagggacagtcaacccttaaaatttctaaccctaaggggtgggtgacctttgaagaggaggaggacttcggagtgaaggggaagtctaaaagcgcctgcagtgatcttctggggaaccagccaagctccttcagcgggagcaacttaaccctgaatgacgattggaacaaagggaccaatgttagcttttgcgtcctgccatccagaagaccacccccccctcccgtgcccctgcttcctccgggcacatctcctccagtcgatcctttcaccactctggcttcaaaggccagcccgacgttagatttcacagagcgatag

SEQ ID NO: 141812 - DNA, 4053 bp, Artificial Sequence
  derived and/or modified sequence
atgcgcaagcgatgggcgtgctggtctggaagtgatgctcccggaggctgcggaggcggatgtggccggcgccgtcgaagaagccgccgcaagcgggcagcttccgaagagagacggatggcatttagcaaaggctttcggatatatcacaaactcgaccctcctccgttctccctgattgtggagacaaggcacaaagaagagtgtttgatgtttgagtctggcgccgtggcggttctgagttcagcagagaaggaagcaatcaaaggaacctatagtaaggtgttggacgcttacggtctgctcggggtcttaaggctgaatctgggggatacaatgctccactacctggtattagtgaccgggtgcatgagtgtgggaaaaattcaggagtccgaggtgtttagagttacaagtactgagttcatatctctgcggatagatagctcagatgaagacagaatttccgaggtacggaaagtgttgaattccggcaatttttacttcgcctggtctgcaagcggtatttcactggacctaagtctgaatgcccaccgtagtatgcaagagcaaaccaccgataatagatttttttggaatcagtctctgcacctgcacctgaaacactatggggtgaattgtgacgactggctcttgcgcctcatgtgtggcggtgtggaaataaggaccatttatgcagcccacaagcaggcaaaagcctgcctgatttcaagattgagctgtgagcgcgccgggacccggttcaatgtgcggggaacaaacgacgatgggcacgtcgctaactttgtggagactgagcaagtggtgtaccttgatgatagcgtctcttctttcatccaaattcgcggctctgtcccactcttctgggaacagcccggacttcaagtaggctctcacagagtacgtatgtcccggggattcgaagcaaatgcccctgcttttgataggcattttagaactctgaaaaacttatacggcaaacagatcattgtcaacctgctcggatcgaaggagggcgagcatatgttatcaaaagcgttccaaagccacctaaaagcatcggagcatgccgcagacatccagatggttaactttgactatcatcaaatggtcaagggtgggaaagctgaaaaactccacagtgtgttaaagccccaggtccagaagttcctagactacgggtttttttacttcaacggctcagaagtccaacgctgccagtctgggaccgtgcgcaccaactgcctcgattgcttagaccgcaccaattctgtgcaggcatttctgggactcgaaatgctcgcaaagcagctcgaggctttgggacttgccgagaagccccagctggtaacccggtttcaggaggtgttcagatcaatgtggtctgtgaatggtgattccatctctaagatttacgcaggtacaggcgccctagaggggaaagccaagcttaaggatggagcccgctcagtaacccgaaccatccaaaacaatttctttgactcctcgaagcaggaagcaatcgacgtgctgctgctggggaatacgctgaattccgatttagccgacaaggctagagccctgctcacgaccggtagcctgcgcgtgtcagagcagaccctccagtcggcctcttccaaggtcctgaaatcaatgtgtgaaaacttctataagtacagcaaacccaagaaaattcgggtctgcgtgggcacgtggaacgtgaatggcggtaagcagtttcgtagcattgccttcaaaaatcagaccctgactgactggctgctagacgcccccaagctcgcaggcattcaggagtttcaggacaagcgcagcaagcctacagacattttcgcaataggctttgaggagatggtggaactgaacgcggggaatatcgtgagtgcaagtaccactaaccaaaagctttgggcggtcgaactacaaaaaaccatcagccgcgataataagtacgtgcttttggcatccgagcagctggttggcgtgtgcttgttcgtgtttattcgacctcagcacgccccattcattagggacgtcgcagttgatacagtgaaaacaggaatggggggagctaccgggaacaagggcgccgtggctattcggatgctgttccatacaactagcctttgtttcgtctgctctcactttgccgccgggcagtctcaggtgaaggagcgcaacgaggactttatcgagatcgcccgaaagctgtcctttccgatgggccgcatgttattcagccacgattatgtattctggtgtggggattttaactataggatcgacctgcctaatgaagaggtgaaagagctgatcagacagcagaattgggatagcctcattgccggcgatcagctgatcaaccagaagaatgccggacaagtgttcaggggcttcctggaaggcaaagtaactttcgcccctacctataaatatgatttattctctgatgattacgatacttccgagaagtgcagaactccagcttggactgaccgagtgctgtggcgccgccgcaaatggccgtttgataggtcagcagaggacctggacctgctcaacgcctcttttcaggacgagagtaagattctttatacctggactccagggactctcctgcattacggtcgagcggagctgaaaacaagtgatcacagacccgtggtcgcactcatagatatcgacatttttgaggtggaggcggaggagcgccagaacatttacaaagaagtcatagccgtccagggccctcctgacggcacggtattggtttcaattaaaagctccttgcctgagaacaactttttcgacgacgcactgatcgatgagttgctacaacagtttgcgtccttcggggaagtgatcctgatccgcttcgtcgaggacaaaatgtgggtaacattcttggagggttccagcgccctcaatgtgctgagtctgaatggcaaagaactcctgaacaggactatcacaattgcactcaagtctcccgattggatcaagaatctggaagaggagatgagcctggaaaagatctctatcgccctgcccagcagcacctcttccacgctgctgggcgaggatgcggaggttgctgcggatttcgacatggaaggcgacgtggacgattatagcgcagaggtggaggagctgctgcctcagcatctgcaaccttcgagcagctctgggctgggcacgagtccttcttctagtccaagaacatctccctgtcagtctcctacaatttccgaggggcccgtgcctagtctgcccattagaccttccagagcaccctcacgcactcctggcccgccatcggcccagtcaagccctatcgacgcgcagccagccacaccactgccacagaaagatcctgctcagcccctggaaccaaaaaggccaccccctcccaggcccgtagctcctcctactagacctgcccctccacaacgacctccgcctccatctggtgccagaagccctgccccaacccggaaggagttcggggggattggggcaccaccatctcccggcgtggcccgccgggaaatggaggctccaaagagcccaggcacgacccgcaaagacaacattgggcgtagccagccatcaccccaggcggggcttgcaggcccagggccggctggttattccaccgcccgccctacgattcctccacgcgccggggtgatttctgccccccagtcgcacgctagggcaagtgccgggaggctgactcccgaatcccagtcgaagacttcagaaacatcaaagggctctacattccttccagaaccgttaaagccccaggccgcctttcctcctcagtctagcctgccgcctcccgctcagcgactgcaagaaccattggtgcctgtggcagcaccaatgccccagtcggggccacaaccaaatcttgagacgccaccacaacctccccctaggagtaggtcaagtcacagtttaccatcggaggcctcaagccagccccaacaggagcagccttcaggctag

SEQ ID NO: 141813 - DNA, 4839 bp, Artificial Sequence
  derived and/or modified sequence
atgcgcaaacggtgggcctgttggtcaggttcagatgctcctggtgggtgtggaggtggctgcggaaggcgccgcagaagatcaagaagaaaaagagctgcaagcgaggaacggagaatggccttttcaaaaggctttcggatttatcataaattggacccaccccctttctctctgatagtagaaacacgccataaggaggagtgtttgatgtttgaatctggtgctgtggcggtgcttagctctgccgagaaggaggccattaaaggcacttactccaaggtgttggatgcatacggtctcctcggggtccttcgactgaatttaggggatacaatgcttcactatttggtgcttgtcactggttgcatgtcagtcggcaagatacaggaatcggaagtctttcgcgtgacaagcactgagttcatctccttgcgcattgattcctcagacgaagacaggatctcagaggttcggaaagttttgaactccggtaatttttactttgcatggagcgcatctggcataagcctggacctaagtctgaatgcgcatcggtctatgcaagagcagaccacagacaatcgcttcttctggaaccagagccttcacctgcacttgaaacattacggcgtgaactgtgacgactggctcctcaggctgatgtgcggtggggtggagatcaggacaatctatgctgcccataagcaagccaaagcgtgtctaatctcaaggttatcctgtgaaagagctggaacccgatttaacgtgagaggcaccaacgacgacggccatgtcgccaacttcgtcgagacggaacaggtcgtctatcttgatgattctgtgtcctcctttatccaaattcgcggcagcgtgcccctgttttgggaacaacctggactgcaggtcgggagccatcgggtacgaatgtctaggggatttgaggctaacgctcctgcctttgataggcactttaggactctgaagaacctgtatgggaaacagatcatcgttaatctgttaggaagtaaggaaggcgaacacatgctttccaaggctttccagagccatctgaaggctagcgaacatgccgcagacatccaaatggtgaattttgactaccatcaaatggtgaaggggggcaaagccgaaaagctgcattctgtactgaaaccgcaggttcaaaagtttttggattacgggttcttttattttaatggcagcgaggtacagcgttgccagagcggaacagttaggacaaattgtcttgactgcttggacaggacaaactcagtccaagccttcctgggccttgaaatgcttgctaaacagttggaggctctgggcttagcagagaagccccagctagtcaccaggttccaagaagtctttcggtctatgtggtccgtgaacggagactctatcagtaagatctacgccggcaccggggctctcgaaggcaaggccaagctgaaggatggcgctcgctccgttactaggacaattcagaacaatttctttgactccagcaaacaggaggccattgatgtgctgctcttgggtaacactcttaattcagacctggccgacaaagcgcgcgcattgctcactaccgggtccctgagggtgtctgagcaaacgttgcagagtgctagttccaaggtgttaaagtctatgtgtgagaacttctataaatacagtaagccaaaaaagatcagggtctgcgtgggcacctggaatgtgaacgggggaaagcaattccggagtatcgctttcaaaaatcagacgttgactgattggctgctggacgcccctaagttggccgggatccaagagtttcaggacaagagatccaaaccaaccgacatattcgcaataggctttgaagagatggtggagctgaacgctgggaatatcgtgagtgccagcacaaccaaccaaaagctttgggctgttgagctccagaaaactatcagccgggacaacaagtacgttctgctggctagcgagcagctggtgggcgtgtgtttgttcgtttttattcgaccgcagcacgccccttttattagagacgtggcagtcgacactgtgaaaacggggatgggcggtgctacaggaaacaaaggggcagtcgccattagaatgctgtttcacacaacatcgctgtgctttgtgtgctcgcatttcgcggccggacagtcccaggttaaggaacggaacgaagatttcatagagatcgccagaaaactctcattccctatgggcaggatgctgttctcccatgactacgtgttctggtgtggagatttcaattaccgcatagacttaccaaacgaggaggtgaaggagttgatccgtcagcaaaactgggattctttgatagccggagaccaacttatcaaccagaaaaacgcaggtcaggtgtttcggggctttctcgaagggaaagtcacgtttgcacctacatacaagtacgatctgttctccgatgattacgacacatctgaaaagtgtcgcacacccgcttggacggacagggtcctttggcgccgacgcaaatggccttttgacagatcagcagaggacctggacttattaaacgcctcgtttcaggacgagtcaaaaatattatacacatggacacctgggaccctccttcattatggacgcgctgaactcaagacttctgaccaccgtccagtggtggcgctaatcgacatcgatatattcgaggtagaagctgaggagcggcagaacatttataaagaggtgatagctgttcaaggaccaccagacggcaccgtgctggtatccattaagtcctccctcccagagaataacttctttgacgatgctctgattgacgagctgcttcagcaatttgcctcattcggtgaggtgatactgatccgtttcgtcgaagacaaaatgtgggtgacctttctcgaaggctcctctgcccttaacgttctgtctctcaacgggaaggaactgctaaacaggacaattacaattgcgctaaagtcccctgactggattaaaaatctggaggaggaaatgtccctggagaagatctcgattgccttaccatctagtacttcctctacgcttctcggggaagacgcagaggtcgcggccgattttgatatggagggagatgtggatgactattccgctgaggttgaggagctcctgccccaacacttgcaaccgtcctcctcctcagggttaggaactagcccgagctctagccctcggacatcaccgtgccagtcacctacaatctctgaaggccccgtgccttccctgcccattcggccatcaagggcaccctcgagaacaccagggcccccatctgcccagagcagccccatcgacgcccagccggccacacctttaccccagaaggatcccgcccaaccgctcgaacctaaaaggccccccccacctaggcctgtcgcccctcctacacgtccagccccaccccagcggcctccccctccttccggtgcgcggagcccggctcccacccggaaggagtttggaggcattggtgccccaccatctcctggggttgctcgccgggagatggaagccccaaagtcacctgggaccactaggaaagacaatatcgggcggagtcagccaagcccccaggctggattggcggggcccgggcctgctggctattctactgccagacccaccatccccccacgggctggggtcatcagtgcaccacagtctcatgcccgtgccagcgctggcaggctaacacctgagtcccaatcaaaaacctccgaaacaagcaaagggtcaaccttcctgcctgagccactcaaaccgcaggccgcttttcctcctcaaagcagtttaccacctcccgcccaacgtttgcaggagccactggtcccagtcgctgcccccatgcctcagtccgggccacagccaaacctagaaacacctcctcagccaccccccagaagcaggtcttcacattctctgccttccgaggcctcctcacagcctcaagtcaagaccaacggcatctccgatggaaaaagggaatctccactgaaaatagacccattcgaggacctgagcttcaatcttcttgcggtcagcaaggcacaactgtccgtccaaacctccccagtgccgacccctgatccaaagcgcctaatccaactgcccagtgctacgcaaagtaatgtgctatccagcgtgtcatgtatgcccacaatgccaccgattcccgcaagatcccaaagtcaagagaatatgcgctctagccctaacccattcatcaccggtctcactaggactaacccattcagtgatcgtaccgctgctccagggaatccttttagggctaagagcgaggagagcgaagctacctcgtggtttagtaaggaggaacccgtgacaatttccccgtttcctagtttgcagcctctcgggcacaataagagccgagccagtagctcactggatggcttcaaggatagtttcgatctgcaagggcaaagtacgctcaaaataagtaatccgaaaggatgggtgacattcgaggaagaggaagacttcggcgtcaaaggcaaatccaaaagcgcttgttcggatctgctcggtaaccagccgtcctcgttcagcggaagcaacttgacccttaacgatgattggaataagggcactaacgtttctttctgcgtgctgccatcacgtcgtcccccccccccccctgtcccactacttccccctgggacctccccgcctgtggacccctttacaaccctggccagcaaagccagtcctacccttgactttaccgagcgatag

SEQ ID NO: 141814 - DNA, 4722 bp, Artificial Sequence
  derived and/or modified sequence
atggccttcagcaagggcttccgcatctaccacaagctggaccccccacccttcagcctgattgtggagaccaggcacaaggaggagtgcctgatgtttgaaagtggagctgtggccgtgctgagcagcgctgagaaggaggccatcaagggcacctacagcaaggtgctggatgcctacggcctgctgggcgtgctgcggctgaacctgggggacaccatgctgcactacctggtgctggtgacaggctgcatgtctgtgggcaagatccaggagagcgaggtgttccgggtgaccagcacagagttcatcagcctgagaattgacagcagtgatgaagatcgcatcagcgaggtgaggaaggtgctgaacagcggcaacttctactttgcctggagcgccagcggcatcagcctggacctgagcctgaatgcccaccgctccatgcaggagcagaccacagacaaccgcttcttctggaaccagagcctgcacctgcacctgaagcactatggagtgaactgtgatgactggctgctgcggctgatgtgtggcggcgtggagatccgcaccatctatgctgcccacaagcaggccaaggcctgcctgatcagccggctgagctgtgagcgggccggcacccgcttcaacgtgcggggcaccaatgatgatggccacgtggccaactttgtggagacagagcaggtggtgtacctggatgacagcgtgtcctccttcatccagatccggggctctgtgcccctcttctgggagcagcccggcctgcaggtgggcagccaccgggtgaggatgagccggggctttgaggccaatgccccagcctttgacagacacttccgcaccctgaagaacctgtatggcaagcagatcatcgtgaacctgctgggcagcaaggagggggagcacatgctgagcaaggccttccagagccacctgaaggccagcgagcacgccgctgacatccagatggtgaactttgactaccaccagatggtgaagggcggcaaggccgagaagctgcacagcgtgctgaagccccaggtgcagaagttcctggactatggcttcttctacttcaatggaagtgaggtgcagcgctgccagagcggcaccgtgaggaccaactgcctggactgcctggacaggaccaacagcgtgcaggccttcctgggcctggagatgctggccaagcagctggaggccctgggcctggccgagaagccccagctggtgacccgcttccaggaggtgttccgctccatgtggagcgtgaatggagacagcatcagcaagatctatgccggcactggagccctggagggcaaggccaagctgaaggatggagcccggtctgtgaccaggaccatccagaacaacttctttgacagcagcaagcaggaggccattgatgtgctgctgctgggcaacaccctgaacagcgacctggccgacaaggcccgggccctgctgaccaccggcagcctgcgggtgtctgagcagaccctgcagagcgccagcagcaaggtgctgaagtccatgtgtgagaacttctacaagtacagcaagcccaagaagatccgggtgtgtgtgggcacctggaatgtgaatggaggcaagcagttccgcagcatcgccttcaagaaccagaccctgacagactggctgctggatgcccccaagctggccggcatccaggagttccaggacaagaggagcaagcccacagacatctttgccatcggctttgaggagatggtggagctgaatgccggcaacatcgtgtctgccagcaccaccaaccagaagctgtgggccgtggagctgcagaagaccatcagccgggacaacaagtatgtgctgctggccagcgagcagctggtgggcgtgtgcctgtttgtgttcatccggccccagcacgcccccttcatcagagatgtggccgtggacacagtgaagacaggcatgggcggggccaccggcaacaagggagctgtggccatccgcatgctgttccacaccaccagcctgtgctttgtgtgcagccactttgctgctggccagagccaggtgaaggagagaaatgaagacttcattgaaattgccaggaagctgtccttccccatgggccgcatgctgttcagccatgactatgtgttctggtgtggggacttcaactacagaattgacctgcccaatgaggaggtgaaggagctgatccggcagcagaactgggacagcctgattgctggggaccagctgatcaaccagaagaatgccggccaggtgttccggggcttcctggagggcaaggtgacctttgcccccacctacaagtatgacctcttcagtgatgattatgacaccagcgagaagtgcaggaccccagcctggacagacagagtgctgtggaggaggaggaagtggccctttgacagatctgctgaggacctggacctgctgaatgccagcttccaggatgagagcaagatcctgtacacctggaccccaggcaccctgctgcactacggccgggcagagctgaagaccagtgaccacaggcctgtggtggccctgattgacatcgacatctttgaggtggaggccgaggagcggcagaacatctacaaggaggtgattgctgtgcagggccccccagatggcaccgtgctggtgtccatcaagagcagcctgcctgagaacaacttctttgatgatgccctgattgatgagctgctgcagcagtttgccagctttggagaggtgatcctgatccgctttgtggaggacaagatgtgggtgaccttcctggagggcagcagcgccctgaatgtgctgagcctgaatggcaaggagctgctgaacagaaccatcaccatcgccctgaagagcccagactggatcaagaacctggaggaggagatgagcctggagaagatcagcatcgccctgcccagcagcaccagcagcaccctgctgggagaagatgctgaggtggccgctgactttgacatggagggagatgtggatgactacagcgctgaggtggaggagctgctgccccagcacctgcagcccagcagcagcagcggcctgggcaccagccccagcagcagccccaggaccagcccctgccagagccccaccatcagcgagggccctgtgcccagcctgcccatccggcccagccgggcccccagcaggaccccaggcccccccagcgcccagagcagccccattgatgcccagcctgccacccccctgccccagaaggaccctgcccagcccctggagcccaagaggcctcctccacccaggcctgtggccccacccaccaggcctgccccaccccagaggcctcctccacccagcggggcccggagccctgcccccaccaggaaggagtttggaggcattggagccccacccagccctggggtggcccggcgggagatggaggcccccaagagccctggcaccaccaggaaggacaacatcggccgcagccagcccagcccccaggccggcctggccggccctggccctgctggctacagcacagcccggcccaccatccccccccgggccggggtcatcagcgccccccagagccacgcccgggccagcgctggccgcctgaccccagagagccagagcaagaccagcgagaccagcaagggcagcaccttcctgcctgagcccctgaagccccaggccgccttccccccccagagcagcctgcccccaccagcccagaggctgcaggagcccctggtgcctgtggccgcccccatgccccagagcggcccccagcccaacctggagaccccaccccagcccccacccaggagccgcagcagccacagcctgcccagcgaggccagcagccagccccaggtgaagaccaacggcatcagtgatggcaagcgggagagccccctgaagattgacccctttgaggacctgtccttcaacctgctggccgtgtccaaggcccagctgtctgtgcagaccagccctgtgcccaccccagaccccaagaggctcatccagctgcccagcgccacccagagcaatgtgctgagctctgtgtcctgcatgcccaccatgccacccatcccagcccggagccagagccaggagaacatgaggagcagccccaaccccttcatcaccggcctgaccaggaccaaccccttcagtgacagaacagctgcccctggcaaccccttccgggccaagtctgaggagagcgaggccacctcctggttcagcaaggaggagcctgtgaccatcagccccttccccagcctgcagcccctgggccacaacaagagccgggccagcagcagcctggatggcttcaaggacagctttgacctgcagggccagagcaccctgaagatcagcaaccccaagggctgggtgacctttgaggaggaggaggactttggagtgaagggcaagagcaagagcgcctgcagcgacctgctgggcaaccagcccagcagcttcagcggcagcaacctgaccctgaatgatgactggaacaagggcaccaacgtgtccttctgtgtgctgcccagccggcggcccccacctcctcctgtgcccctgctgcccccaggcaccagcccccctgtggaccccttcaccaccctggccagcaaggccagccccaccctggacttcacagaaagatag

SEQ ID NO: 141815 - DNA, 4053 bp, Artificial Sequence
  derived and/or modified sequence
atgaggaagcgctgggcctgctggagcggcagtgatgcccctgggggctgcggcggcggctgcggcagaagaagaagaagaagcaggaggaagagagctgccagcgaggagaggaggatggccttcagcaagggcttccgcatctaccacaagctggaccccccacccttcagcctcatcgtggagaccaggcacaaggaggagtgcctgatgtttgagagcggggctgtggccgtgctgagcagcgctgagaaggaggccatcaagggcacctacagcaaggtgctggatgcctacggcctgctgggcgtgctgcggctgaacctgggggacaccatgctgcactacctggtgctggtgacaggctgcatgtctgtgggcaagatccaggagagcgaggtgttccgggtgaccagcacagagttcatcagcctgagaattgacagcagtgatgaggaccgcatcagcgaggtgaggaaggtgctgaacagcggcaacttctactttgcctggagcgccagcggcatcagcctggacctgagcctgaatgcccaccgctccatgcaggagcagaccacagacaaccgcttcttctggaaccagagcctgcacctgcacctgaagcactacggcgtgaactgtgatgactggctgctgcggctgatgtgtggcggcgtggagatccgcaccatctatgctgcccacaagcaggccaaggcctgcctgatcagccggctgagctgtgaaagagctggcacccgcttcaacgtgcggggcaccaatgatgatggccacgtggccaactttgtggagacagagcaggtggtgtacctggatgattctgtgagcagcttcatccagatccggggctctgtgcccctcttctgggagcagcccggcctgcaggtgggcagccaccgggtgaggatgagccggggctttgaggccaatgccccagcctttgacagacacttccgcaccctgaagaacctgtatggcaagcagatcatcgtgaacctgctgggcagcaaggagggggagcacatgctgagcaaggccttccagagccacctgaaggccagcgagcacgccgctgacatccagatggtgaactttgactaccaccagatggtgaagggcggcaaggccgagaagctgcacagcgtgctgaagccccaggtgcagaagttcctggactatggcttcttctacttcaacggcagcgaggtgcagcgctgccagagcggcaccgtgaggaccaactgcctggactgcctggacaggaccaacagcgtgcaggccttcctgggcctggagatgctggccaagcagctggaggccctgggcctggccgagaagccccagctggtgacccgcttccaggaggtgttccgctccatgtggagcgtgaatggagacagcatcagcaagatctatgccggcaccggggccctggagggcaaggccaagctgaaggatggagcccggtctgtgaccaggaccatccagaacaacttctttgacagcagcaagcaggaggccattgatgtgctgctgctgggcaacaccctgaacagcgacctggccgacaaggcccgggccctgctgaccaccggcagcctgcgggtgtctgagcagaccctgcagagcgccagcagcaaggtgctgaagtccatgtgtgagaacttctacaagtacagcaagcccaagaagatccgggtgtgtgtgggcacctggaatgtgaatggaggcaagcagttccgcagcatcgccttcaagaaccagaccctgacagactggctgctggatgcccccaagctggccggcatccaggagttccaggacaagaggagcaagcccacagacatctttgccatcggctttgaggagatggtggagctgaatgccggcaacatcgtgtctgccagcaccaccaaccagaagctgtgggccgtggagctgcagaagaccatcagccgggacaacaagtatgtgctgctggccagcgagcagctggtgggcgtgtgcctgtttgtgttcatccggccccagcacgcccccttcatcagagatgtggccgtggacacagtgaagacaggcatgggcggggccactggaaacaagggagctgtggccatccgcatgctgttccacaccaccagcctgtgctttgtgtgcagccactttgctgctggccagagccaggtgaaggagagaaatgaagacttcatcgagatcgccaggaagctgtccttccccatgggccgcatgctgttcagccatgactatgtgttctggtgtggggacttcaactacagaattgacctgcccaatgaggaggtgaaggagctgatccggcagcagaactgggacagcctgattgctggggaccagctgatcaaccagaagaatgccggccaggtgttccggggcttcctggagggcaaggtgacctttgcccccacctacaagtatgacctcttcagtgatgattatgacaccagcgagaagtgcaggaccccagcctggacagacagagtgctgtggaggaggaggaagtggccctttgacagatctgctgaggacctggacctgctgaatgccagcttccaggatgagagcaagatcctgtacacctggaccccaggcaccctgctgcactacggccgggcagagctgaagaccagtgaccacaggcctgtggtggccctgattgatattgacatctttgaggtggaggccgaggagcggcagaacatctacaaggaggtgattgctgtgcagggccccccagatggcaccgtgctggtgtccatcaagagcagcctgcctgagaacaacttctttgatgatgccctgattgatgagctgctgcagcagtttgccagctttggagaggtgatcctgatccgctttgtggaggacaagatgtgggtgaccttcctggagggcagcagcgccctgaatgtgctgagcctgaatggcaaggagctgctgaacagaaccatcaccatcgccctgaagagcccagactggatcaagaacctggaggaggagatgagcctggagaagatcagcatcgccctgcccagcagcaccagcagcaccctgctgggggaggatgctgaggtggccgctgactttgacatggagggagatgtggatgactacagcgctgaggtggaggagctgctgccccagcacctgcagcccagcagcagcagcggcctgggcaccagccccagcagcagccccaggaccagcccctgccagagccccaccatcagcgagggccctgtgcccagcctgcccatccggcccagccgggcccccagcaggaccccaggccccccatctgcccagagcagccccattgatgcccagcctgccacccccctgccccagaaggaccctgcccagcccctggagcccaagaggcctcctccacccaggcctgtggccccacccaccaggcctgccccaccccagaggcctcctcctccttctggggcccggagccctgcccccaccaggaaggagtttggaggcatcggggccccacccagccctggggtggcccggcgggagatggaggcccccaagagccctggcaccaccaggaaggacaacatcggccgcagccagcccagcccccaggccggcctggccggccctggccctgctggctacagcacagcccggcccaccatcccccccagggctggggtcatcagcgccccccagagccacgcccgggccagcgctggccgcctgaccccagagagccagagcaagaccagcgagaccagcaagggcagcaccttcctgcctgagcccctgaagccccaggccgccttccccccccagagcagcctgcccccaccagcccagaggctgcaggagcccctggtgcctgtggccgcccccatgccccagagcggcccccagcccaacctggagaccccaccccagcccccacccaggagccgcagcagccacagcctgcccagcgaggccagcagccagccccagcaggagcagcccagcggctag

SEQ ID NO: 141816 - DNA, 4839 bp, Artificial Sequence
  derived and/or modified sequence
atgaggaagcgctgggcctgctggagcggcagtgatgcccctgggggctgcggcggcggctgcggcagaagaagaagaagaagcaggaggaagagagctgccagcgaggagaggaggatggccttcagcaagggcttccgcatctaccacaagctggaccccccacccttcagcctcatcgtggagaccaggcacaaggaggagtgcctgatgtttgagagcggggctgtggccgtgctgagcagcgctgagaaggaggccatcaagggcacctacagcaaggtgctggatgcctacggcctgctgggcgtgctgcggctgaacctgggggacaccatgctgcactacctggtgctggtgacaggctgcatgtctgtgggcaagatccaggagagcgaggtgttccgggtgaccagcacagagttcatcagcctgagaattgacagcagtgatgaggaccgcatcagcgaggtgaggaaggtgctgaacagcggcaacttctactttgcctggagcgccagcggcatcagcctggacctgagcctgaatgcccaccgctccatgcaggagcagaccacagacaaccgcttcttctggaaccagagcctgcacctgcacctgaagcactacggcgtgaactgtgatgactggctgctgcggctgatgtgtggcggcgtggagatccgcaccatctatgctgcccacaagcaggccaaggcctgcctgatcagccggctgagctgtgaaagagctggcacccgcttcaacgtgcggggcaccaatgatgatggccacgtggccaactttgtggagacagagcaggtggtgtacctggatgattctgtgagcagcttcatccagatccggggctctgtgcccctcttctgggagcagcccggcctgcaggtgggcagccaccgggtgaggatgagccggggctttgaggccaatgccccagcctttgacagacacttccgcaccctgaagaacctgtatggcaagcagatcatcgtgaacctgctgggcagcaaggagggggagcacatgctgagcaaggccttccagagccacctgaaggccagcgagcacgccgctgacatccagatggtgaactttgactaccaccagatggtgaagggcggcaaggccgagaagctgcacagcgtgctgaagccccaggtgcagaagttcctggactatggcttcttctacttcaacggcagcgaggtgcagcgctgccagagcggcaccgtgaggaccaactgcctggactgcctggacaggaccaacagcgtgcaggccttcctgggcctggagatgctggccaagcagctggaggccctgggcctggccgagaagccccagctggtgacccgcttccaggaggtgttccgctccatgtggagcgtgaatggagacagcatcagcaagatctatgccggcaccggggccctggagggcaaggccaagctgaaggatggagcccggtctgtgaccaggaccatccagaacaacttctttgacagcagcaagcaggaggccattgatgtgctgctgctgggcaacaccctgaacagcgacctggccgacaaggcccgggccctgctgaccaccggcagcctgcgggtgtctgagcagaccctgcagagcgccagcagcaaggtgctgaagtccatgtgtgagaacttctacaagtacagcaagcccaagaagatccgggtgtgtgtgggcacctggaatgtgaatggaggcaagcagttccgcagcatcgccttcaagaaccagaccctgacagactggctgctggatgcccccaagctggccggcatccaggagttccaggacaagaggagcaagcccacagacatctttgccatcggctttgaggagatggtggagctgaatgccggcaacatcgtgtctgccagcaccaccaaccagaagctgtgggccgtggagctgcagaagaccatcagccgggacaacaagtatgtgctgctggccagcgagcagctggtgggcgtgtgcctgtttgtgttcatccggccccagcacgcccccttcatcagagatgtggccgtggacacagtgaagacaggcatgggcggggccactggaaacaagggagctgtggccatccgcatgctgttccacaccaccagcctgtgctttgtgtgcagccactttgctgctggccagagccaggtgaaggagagaaatgaagacttcatcgagatcgccaggaagctgtccttccccatgggccgcatgctgttcagccatgactatgtgttctggtgtggggacttcaactacagaattgacctgcccaatgaggaggtgaaggagctgatccggcagcagaactgggacagcctgattgctggggaccagctgatcaaccagaagaatgccggccaggtgttccggggcttcctggagggcaaggtgacctttgcccccacctacaagtatgacctcttcagtgatgattatgacaccagcgagaagtgcaggaccccagcctggacagacagagtgctgtggaggaggaggaagtggccctttgacagatctgctgaggacctggacctgctgaatgccagcttccaggatgagagcaagatcctgtacacctggaccccaggcaccctgctgcactacggccgggcagagctgaagaccagtgaccacaggcctgtggtggccctgattgatattgacatctttgaggtggaggccgaggagcggcagaacatctacaaggaggtgattgctgtgcagggccccccagatggcaccgtgctggtgtccatcaagagcagcctgcctgagaacaacttctttgatgatgccctgattgatgagctgctgcagcagtttgccagctttggagaggtgatcctgatccgctttgtggaggacaagatgtgggtgaccttcctggagggcagcagcgccctgaatgtgctgagcctgaatggcaaggagctgctgaacagaaccatcaccatcgccctgaagagcccagactggatcaagaacctggaggaggagatgagcctggagaagatcagcatcgccctgcccagcagcaccagcagcaccctgctgggggaggatgctgaggtggccgctgactttgacatggagggagatgtggatgactacagcgctgaggtggaggagctgctgccccagcacctgcagcccagcagcagcagcggcctgggcaccagccccagcagcagccccaggaccagcccctgccagagccccaccatcagcgagggccctgtgcccagcctgcccatccggcccagccgggcccccagcaggaccccaggccccccatctgcccagagcagccccattgatgcccagcctgccacccccctgccccagaaggaccctgcccagcccctggagcccaagaggcctcctccacccaggcctgtggccccacccaccaggcctgccccaccccagaggcctcctcctccttctggggcccggagccctgcccccaccaggaaggagtttggaggcatcggggccccacccagccctggggtggcccggcgggagatggaggcccccaagagccctggcaccaccaggaaggacaacatcggccgcagccagcccagcccccaggccggcctggccggccctggccctgctggctacagcacagcccggcccaccatcccccccagggctggggtcatcagcgccccccagagccacgcccgggccagcgctggccgcctgaccccagagagccagagcaagaccagcgagaccagcaagggcagcaccttcctgcctgagcccctgaagccccaggccgccttccccccccagagcagcctgcccccaccagcccagaggctgcaggagcccctggtgcctgtggccgcccccatgccccagagcggcccccagcccaacctggagaccccaccccagcccccacccaggagccgcagcagccacagcctgcccagcgaggccagcagccagccccaggtgaagaccaacggcatcagtgatggcaagcgggagagccccctgaagattgacccctttgaggacctgtccttcaacctgctggccgtgtccaaggcccagctgtctgtgcagaccagccctgtgcccaccccagaccccaagaggctcatccagctgcccagcgccacccagagcaatgtgctgagctctgtgtcctgcatgcccaccatgccacccatcccagcccggagccagagccaggagaacatgaggagcagccccaaccccttcatcaccggcctgaccaggaccaaccccttcagtgacagaacagctgcccctggcaaccccttccgggccaagtctgaggagagcgaggccacctcctggttcagcaaggaggagcctgtgaccatcagccccttccccagcctgcagcccctgggccacaacaagagccgggccagcagcagcctggatggcttcaaggacagctttgacctgcagggccagagcaccctgaagatcagcaaccccaagggctgggtgacctttgaggaggaggaggactttggagtgaagggcaagagcaagagcgcctgcagcgacctgctgggcaaccagcccagcagcttcagcggcagcaacctgaccctgaatgatgactggaacaagggcaccaacgtgtccttctgtgtgctgcccagcagaagacctcctcctcctcctgtgcccctgctgcccccaggcaccagcccccctgtggaccccttcaccaccctggccagcaaggccagccccaccctggacttcacagagaggtag

SEQ ID NO: 141817 - DNA, 4722 bp, Artificial Sequence
  derived and/or modified sequence
atggccttcagcaagggcttccggatctaccacaagctggacccccctcccttttcgctcatcgtggaaaccagacacaaggaagagtgtttaatgtttgagagtggtgcagtcgcggtgctgagttctgccgaaaaggaagctatcaaagggacatattcgaaagtgctggacgcctatggcctgctgggtgtcctgaggctgaatctcggagatacgatgctccactacttagttcttgtcaccggctgcatgtcagtgggcaagatccaagagtctgaggtgttccgtgtcacctcaacggagttcattagtctgcgcatcgacagttctgacgaagatcgtatcagcgaggtgcgcaaggtcctgaactcaggaaacttttattttgcatggagcgctagcggtatcagcctcgacctgtctcttaatgcgcaccggtctatgcaggagcaaaccacggacaacaggtttttctggaatcaaagtcttcacctccacctgaagcactatggagttaactgtgacgactggctactacgactcatgtgtggcggagtcgagatccgaactatctacgcagctcataagcaagctaaagcttgcctcattagccggctctcttgtgagcgagctggtactcgattcaacgtgaggggaacgaatgatgatggtcacgttgccaatttcgtggaaacggagcaggttgtgtacttggacgactcagtctcaagtttcatccaaatccgggggtctgttcctctgttctgggaacagcctggtctgcaagtcggctcccaccgcgttcgaatgagtagggggttcgaagcaaacgcgcccgcctttgataggcacttccgcacactcaaaaatctgtatggaaaacaaattatcgtgaacctcctaggatctaaggaaggcgagcatatgttatcaaaagcattccagagtcatctaaaagcttcagagcacgctgccgacatccagatggtgaacttcgactaccaccagatggtgaagggcggaaaagccgagaaattacacagcgtgctaaagcctcaggtgcagaaattcctggactatggctttttttacttcaatggttctgaggtacagaggtgccagtctggcaccgttcggaccaactgccttgactgtcttgatcgaacaaatagcgttcaggcattcttaggactcgaaatgcttgcaaaacagttggaggccctggggcttgctgagaagcctcagctggtcaccagatttcaagaagtgttccggagcatgtggtctgtgaacggggattctatttcaaagatttacgcggggaccggcgcacttgagggaaaagccaagctgaaagacggggcccgatccgttaccaggacaatccagaataatttcttcgatagttctaagcaggaggcaattgatgttctgctgctcggcaacactttaaattcagacctcgccgataaggcccgggcactcctcactaccggcagccttcgagtgtccgagcaaacgctacagtccgccagtagcaaggtgctgaagagcatgtgcgaaaacttttataaatattctaagcctaagaagatccgggtgtgcgttggtacttggaatgtaaatggtggaaaacagtttcgcagtattgcctttaaaaaccaaaccttaactgactggctgttagatgcccctaaactcgcaggcatccaagagttccaagataagcgctccaagccaacagacattttcgctatcggtttcgaggagatggtggaattgaatgcagggaacattgtttctgcatctaccaccaatcagaaactatgggcggtggaactgcagaagactataagcagagacaacaagtacgtgcttctcgctagcgagcaattggtaggtgtgtgtctctttgtgttcatccgcccacagcacgcgcctttcattcgggatgtggctgtggatactgtcaaaactgggatgggtggggccactggcaacaagggtgccgtcgcaatcaggatgcttttccataccaccagcctgtgctttgtctgtagtcacttcgctgccgggcaaagccaggttaaagaaagaaacgaagactttattgagatcgcgcggaagctcagttttcccatgggcagaatgctgttctcacacgattacgttttctggtgcggcgactttaattaccggattgatttacctaacgaggaggtaaaagaactgatcaggcaacagaattgggattcactgattgcgggagaccaacttatcaatcagaagaacgcaggtcaggtgtttcgaggatttctggaaggcaaagtcactttcgctccaacatacaagtatgacctgttcagtgacgattatgatacaagcgagaaatgcagaacccccgcttggactgaccgggtcctgtggaggcgaaggaaatggccattcgaccgctcagctgaagatcttgatcttctcaacgcgtcctttcaggatgaatcaaaaattctgtacacatggacgccaggaacccttctgcactacggtcgagcagagttgaagacttccgatcaccggcctgtggttgctctcatcgacattgacatcttcgaagtcgaagccgaggagaggcagaacatctacaaggaggtcattgcagtacagggacctccagacgggactgtcctcgtgagcatcaagtcttctctgcctgagaacaacttctttgacgatgctctgatcgacgagttactccaacagttcgccagcttcggcgaggtgattttaatccggtttgtcgaagataagatgtgggtgacctttctcgagggaagctcagcacttaacgtgctttctttgaatggaaaagagctcttaaaccggactatcaccattgcacttaagtctcctgactggattaaaaatctagaggaagagatgagcctcgaaaaaatatccattgccctgccatcaagcacttcttcgacactgcttggtgaagacgcagaggtggctgcagacttcgacatggaaggtgatgtagacgactactcagcagaggtcgaagagcttctgcctcaacatctgcagccttcttcctcgtctgggctgggcacctcgccttccagcagccccaggacttcaccgtgtcagtcaccaaccatatccgaggggcctgttccctcactaccaatacgtccttcacgcgcgcctagcagaaccccaggccccccttccgcgcaatcttctcctatcgatgcacagcccgcaacacccttgcctcaaaaagatcccgctcagcccctcgagccaaaaagacctccgccacctcggcctgtcgcaccccctactagaccagcccctccgcaacgtccaccacccccatctggggcccgctctcctgcacccactcgcaaggaatttggagggattggagctcctccttcacctggtgttgccaggcgcgaaatggaggctccgaaatcccctggtacgactcggaaggacaatatcggtcggtcccagccctctcctcaagctgggctggccggcccgggtccagcggggtactctacagcaagaccgaccataccaccaagagctggagtaatatcagctccacagtctcatgccagggcatcagcgggcaggctaacccctgagtcccagtcaaagacttcggagaccagtaaggggagtacctttttgccggaaccccttaaaccacaggccgcgttcccacctcaatcatccctacctccccctgctcagagactgcaggagccattagtgcctgttgccgcccccatgccacaaagtggacctcaacccaacttagaaacacctccccagccaccacccagatctaggagctcccactctctaccctcagaggcgtctagccagccccaggtcaagactaacggcattagcgatggcaaaagagagagtcctctgaagatcgacccctttgaagacctgtcatttaatctcttggcagtgtctaaggcgcagctgagcgtgcagacttctccagttcccactcccgatcccaagcgcttaattcagttgccctcagccacacagtccaatgtcttaagttctgtgtcgtgtatgccgactatgccccccattcccgcaaggtcgcagtcacaagagaatatgcggtcttctccaaatccgttcatcactggcctcaccaggactaaccccttctctgaccgcacagctgctccaggaaacccctttagggcaaaatcagaggaatccgaagcaacatcttggttctctaaggaagagccagtaacgatctcgccatttccttcacttcagcccttagggcacaataaaagccgggccagctctagcttagatggctttaaagatagttttgatttacaaggacagtctaccctcaagattagcaatccgaaggggtgggtcaccttcgaagaagaagaggatttcggcgtgaagggcaaatctaagtctgcttgctccgaccttctggggaatcagcccagctcattttccggaagtaaccttaccttgaatgacgattggaacaagggcacgaatgtgagcttctgcgtgctcccttcacgtaggccccctcccccacctgtacccctgctgccacccgggacttcccctcccgtggacccttttaccaccctggcttcaaaggctagtcccaccctggattttacagaaaggtag

SEQ ID NO: 141818 - DNA, 4053 bp, Artificial Sequence
  derived and/or modified sequence
atgcggaagcggtgggcctgctggagcggcagcgacgcccccggcggctgtggcggtgggtgcggaaggaggaggagaagatcgagacggaaacgggccgcctctgaggaacggagaatggccttctctaagggcttcagaatctaccacaagctggaccctccccccttctctcttattgttgagacccgacataaagaagagtgtcttatgttcgagagtggcgctgtggcagttctgagcagtgctgaaaaagaagctatcaaggggacatactccaaagtgctagacgcctatgggctgttaggtgtgcttcgcctgaatctgggagataccatgctccactacctcgtgctggtgacagggtgcatgtctgttggcaagattcaggaaagcgaggtttttagagtgacatctaccgaattcatcagtttaagaattgactctagcgacgaagatcggatctccgaggttaggaaagtactcaattctggtaacttctactttgcatggtcggccagtggaatatctctggacctttcacttaatgcccatcgttccatgcaagagcaaaccaccgataatagattcttttggaaccagagcttgcacctccacttgaagcactacggcgtgaattgtgacgattggttgctgcggctcatgtgcggaggggtggagatccgtaccatttacgccgcacataagcaggccaaagcgtgcctgatctcccgtctcagctgtgagagagcagggaccagatttaatgtgcggggcacaaatgatgatggccatgtcgccaactttgttgaaaccgagcaggttgtatatctggatgattctgtgagttctttcatccagattaggggcagtgtcccactcttctgggagcagccggggttgcaggtcggctcacatcgggtgagaatgtctcgaggattcgaggcaaacgcccccgcgttcgatcgtcacttccggactctaaagaacctgtatggcaagcagatcatcgtgaatctgcttggctcaaaggagggcgaacacatgttgagtaaggcctttcagagccacctgaaggcttctgaacacgctgccgacattcagatggttaattttgactatcaccaaatggtgaaagggggcaaggccgagaaactacattcagtgttgaaaccacaggttcagaagttcctcgattacggcttcttttacttcaatggctccgaagtccagcgctgccagtccggtacggtccgaactaactgtctggattgcttggatcgcactaattcagtgcaggcctttttaggactagaaatgctggccaaacagttagaggctctgggactggcggagaaaccccaactagtgacacgtttccaggaagtgttcagatccatgtggtccgtcaacggagattccatttcgaagatttacgctgggaccggagcactggaagggaaggctaaactgaaagacggcgcccgcagcgtcacaaggaccattcaaaataatttttttgacagttctaaacaagaagccattgatgttctgttgctggggaatacactgaattcagacctggctgataaggctagagccctgttgaccactggatctctcagagtcagtgagcagactctccaatcagcgtccagtaaggtgctgaagagcatgtgcgagaatttttacaaatactcaaagcccaagaagattcgagtgtgcgtgggaacttggaacgtgaacggaggaaagcagttccgcagtatcgcttttaagaaccagaccctaaccgactggctgcttgacgctcctaagcttgccggcattcaggaattccaggataaaaggtccaaaccaacagacatcttcgccatcggttttgaggaaatggtggagctgaatgctggaaacatcgtgtccgcaagtaccactaaccagaagctctgggccgttgaactgcagaagaccatctcacgagacaataagtatgtgttactggcgagtgagcagctcgttggggtatgcctgttcgttttcatacgacctcagcacgcccctttcattagggacgttgcggtggatacagttaaaaccgggatgggcggtgcaactggaaataaaggcgctgtcgccatcaggatgctcttccacactacttccctgtgtttcgtgtgttctcattttgctgctggtcagtcacaggtgaaggaaaggaacgaagatttcattgaaattgcccgcaaactctctttcccaatgggcaggatgctgttcagtcatgactatgtgttctggtgcggagatttcaattaccgcatcgatcttcctaatgaggaggtgaaggagctgatcaggcaacagaactgggactcgctgattgctggagaccagctcataaatcagaagaacgctggtcaggtgttccgaggctttttggaagggaaagtcaccttcgcccctacctataaatacgacctgttctccgacgattacgacacgtcagagaagtgtcggaccccagcctggactgacagggttctatggaggagacgcaagtggcctttcgatcgatcagccgaagacttagatttgctgaacgcatcttttcaggacgagtcaaagatcctgtacacttggacccctggcactctcttgcattacgggagagctgagctgaagacttcagaccatcgcccagtcgtggccttaatcgacatcgacattttcgaggtcgaggcagaggaacgtcagaacatttataaagaagttatcgctgtgcaaggccccccagatggtaccgtcctggtttctatcaaatccagcctccctgagaataactttttcgatgacgctttaatcgatgagctcctccagcagtttgcctcattcggagaagtaatactgattaggttcgtcgaggataagatgtgggtgacattcttagaaggctcctccgcccttaatgtcctgagtcttaacgggaaggaactcctgaacagaactataacaattgccctgaagtcacccgattggattaagaatctggaagaagaaatgtctctagaaaagatctctattgccttacccagcagcacctcgtctaccctactgggtgaggacgccgaggtggcagcagatttcgacatggagggagatgtggacgactacagcgctgaagtggaagagctcttgccacagcatcttcagccatcatctagctcaggtctcggcacaagcccatctagtagccctcgcacatccccctgccagtctccaaccatctcagagggcccagttccctccctgcctatccgaccatctcgggcccctagccgaacacctggaccgccaagtgcccagtcctcacctatcgacgcgcagccagccacacctctgccccagaaagatcctgcccagcccctggaaccgaaacggcctccccccccgcgaccagtggcaccccctaccaggcccgcaccaccccagcgacctccacctccctctggtgctcgatctcctgctccgacaaggaaggaatttggagggatcggggccccccctagccccggtgttgccagacgcgagatggaggctcctaagagccccggcacgactaggaaggacaacattggccgttcacagccgtcaccacaagcaggcttggcgggcccaggccctgctggttattctacagctcgcccaactattccgcccagggccggcgtcattagtgccccccaatcccacgcacgtgcgagcgcggggcggctgactcccgaatcacagagtaagacttcggagaccagcaaggggagtacatttttgcctgagcccctcaagcctcaggcagcctttcctcctcaatcctctttgccacctccggcacagagactacaggaacctctggtgccagtggctgccccaatgcctcaatctggcccacagcctaaccttgagactccaccccagccccctccaaggagcaggtcgagccattctcttccctcagaggccagctctcagcctcagcaggaacagcccagtggttag

SEQ ID NO: 141819 - DNA, 4839 bp, Artificial Sequence
  derived and/or modified sequence
atgcggaagcggtgggcctgctggagcggcagcgacgcccccggcgggtgcggaggcgggtgcggccgccggcggcgcaggtcccgacgaaagagggccgccagcgaagaacgaaggatggctttctctaaaggatttcggatctatcacaagctggacccgccacctttttccctcatagtagaaactaggcacaaagaagagtgcctgatgttcgaaagcggggccgtagccgttctctcttctgccgaaaaagaagccatcaaaggtacatattccaaagtcctggatgcatatggcctcctcggcgtgctgcgcctcaatctcggagatactatgctgcattacctagtactagtcactggctgtatgtcagtcggaaagatccaggagagtgaggttttccgcgtcacaagtacggaattcatctcccttcgtatagattcctcagatgaggacaggatatctgaggttaggaaagtgctgaactctggaaatttttacttcgcttggtctgcctcaggtatctcactcgatctgtcccttaatgcacataggtctatgcaggagcagaccacagacaacaggtttttttggaatcaaagtctccaccttcaccttaaacactacggagtgaactgcgatgattggctgttacgccttatgtgtggtggagtcgaaatcaggacaatttatgccgcacataaacaagccaaggcctgccttatttcccggctgtcctgtgagcgagcaggcaccagatttaatgtccgcggcaccaacgacgatgggcacgtggctaacttcgtggaaacagagcaggtagtgtacctggacgatagtgtctcttcctttatccagatacgcggcagtgttccattgttttgggagcagccggggctgcaggttggtagccatagagtgcgaatgtctagagggttcgaggctaacgctcctgccttcgatcgtcacttcaggaccttgaagaacctctacgggaagcagataatcgtgaatctcttgggaagcaaagaaggtgagcacatgctaagcaaagccttccagtctcatttgaaagcctcagagcacgccgccgatatccagatggtcaattttgattatcaccaaatggttaagggcggcaaggctgagaagctgcactcagtgctcaagcctcaggttcagaaattcctggattacggcttcttttatttcaatggctccgaagtgcaacgttgtcagtccggcacagttagaaccaactgcttagactgccttgatcggacaaattctgtgcaggcgtttctgggcctggagatgctggccaagcaactggaagccctcggcctggccgagaagccacaactggtgacccgctttcaagaggtgtttcgttctatgtggagtgtgaatggtgacagcatctccaaaatttacgcaggcactggcgctcttgaaggcaaagctaaactgaaagatggagctaggtctgtgacacggaccatccaaaacaacttcttcgatagctcaaaacaggaagctattgacgtactgctactggggaacaccctgaactctgatctcgctgataaagctcgcgctctcctcaccaccggctccctcagggttagcgagcaaacactccagagtgcttccagtaaggtcttgaagtctatgtgcgagaatttctacaagtattcaaaacccaagaagattagggtgtgcgtcggaacgtggaacgtcaatgggggtaaacagttccggtccattgccttcaagaaccagaccctgaccgactggctgctggacgcacccaaactcgccgggatccaggagttccaggataagagatccaagcccaccgacatatttgctattgggtttgaagaaatggtggaactcaacgcaggcaatatcgtttctgcctcaaccacgaatcagaaactgtgggctgtggaactgcagaaaaccatcagcagggacaataagtacgtgctgttagcctccgagcagctagtgggtgtttgtctctttgtattcatcagaccccagcatgcgccatttatcagggatgtggctgtggacacagtaaaaaccggcatggggggcgctacagggaacaagggagccgtcgcaatacgtatgctgtttcataccaccagtctgtgcttcgtgtgcagccactttgcagcagggcaatctcaggtaaaggaacgtaatgaggactttattgagattgctcggaagctctcattcccaatgggacggatgctgttctctcacgactatgtgttctggtgtggcgactttaattaccgcattgatttgccaaacgaagaggtgaaggaactgatcagacagcagaactgggactcccttattgccggagatcagctaattaatcagaagaacgcgggacaggtgttccgcggttttctggaaggcaaagtgacctttgcccccacatacaaatacgacctgttttccgatgattacgatacctccgagaaatgtcggacccctgcgtggaccgaccgcgtgctttggagaagacggaaatggccctttgaccgctccgctgaagacctggacttgctcaatgcttctttccaagatgagagcaagatcctgtacacatggacacccggaaccttgcttcactatggtcgtgcggagttaaagactagtgaccaccgcccggttgtcgcactcatcgatatagacatttttgaagtggaagctgaagagcggcagaatatttacaaagaagtcatagccgtgcaggggccgccggatgggacagtcctcgtaagcataaaaagcagccttccggaaaacaattttttcgatgatgccttgattgatgagcttctccagcagtttgcaagctttggcgaagtgattcttatacgcttcgtcgaagacaagatgtgggtgaccttcctagaagggtccagtgctctgaatgtcctgagtttgaacggcaaggaattgttaaatcgtacaataacaattgcgctaaagagccctgattggattaagaacctagaagaggaaatgagcctggagaaaatttctatcgccctccccagttccaccagttccaccctcctcggcgaggatgcagaagtggctgccgacttcgatatggagggagacgtggatgattattccgctgaggtggaagaactcttgccgcagcatctgcagccttcctcatctagcgggctggggacttctccttcctcttctccacgaacttcgccatgtcagtcccccactatctcggaaggccccgtgccttcactgcccatcaggccctcacgggccccttccagaacccccgggcctcccagtgcacagtccagccctatagacgcccagcccgcgaccccgctgccccaaaaagaccctgcccagccactcgaacctaagcgtccccctccaccacgccccgtcgccccaccgacaaggcctgcaccaccacaacgccccccgccgcccagcggggccagaagccccgcccctaccagaaaagaattcggcgggatcggcgcacctcccagtcctggggtagcaagacgcgagatggaggcaccaaaatcgccagggaccacaagaaaggacaatattgggagaagtcagcctagtccacaggcaggcctggccgggcctggacccgccggatattccactgccagacctacaattccccctagggccggagttattagtgctccccagtcgcacgcccgcgcctccgcaggtcggctcacaccagagtcacagtcaaagaccagcgaaaccagcaagggatcaaccttcttacccgaacccctaaaaccccaggccgcattcccaccccaatcatcccttccaccaccggcccagcgcttgcaggaacctcttgtcccagttgccgcgcccatgccgcagtccggcccacagcctaatctggagacacccccccagccacctccacgttccaggagttcccatagcctgccctccgaagcatcttcccagccccaagtgaaaaccaatgggataagcgatgggaagcgtgagagccccttgaagatcgaccctttcgaggatttgtcatttaatctgctggcagtatccaaggcccaactttccgtgcagacatcaccagtgcctaccccggaccctaaacgcttaatccagctccctagcgcgacgcagagcaatgttctgagctccgttagctgtatgcctacaatgcctccgattcctgctcgctctcagagtcaagaaaacatgaggagcagccctaatccgttcattacggggctaacaaggactaatccatttagcgatcgaaccgctgctcccgggaaccctttccgcgccaagagtgaggaatcggaagcaacctcatggttcagtaaagaagagccagtgacaatttctccctttcccagtttgcagccgctcgggcacaataagtcccgggcctccagctctctggacggattcaaagactccttcgacctgcagggccagagtaccttgaaaatctcaaacccaaaaggttgggtcacatttgaggaggaggaggacttcggagtgaagggtaagtccaaatctgcgtgtagtgacttgttgggaaatcagcctagctctttctcaggttccaatctcactctgaatgatgattggaataagggaactaacgtgtcgttttgcgtactgcctagtcgccggccgccaccccctcccgtgcctctcctaccccccggcacatctccaccagtggacccttttactaccctcgctagcaaggctagtcctactctggatttcactgagagatag

SEQ ID NO: 141820 - DNA, 4722 bp, Artificial Sequence
  derived and/or modified sequence
atggccttcagcaaaggtttcagaatctaccacaagctggatccacccccattcagcctcattgtggaaactaggcacaaggaagagtgtctaatgtttgaatccggggctgttgccgtgctttctagtgctgaaaaagaagccatcaaaggcacctattctaaagtcctggatgcttatgggttactgggcgtcctgcgcctgaacctgggtgacaccatgctacattatctcgttttagtgaccggatgtatgtccgtcggcaaaattcaggaaagcgaggttttccgggtgacaagcactgagtttatttctttgaggatcgactcatccgacgaggatcggatttccgaggttagaaaggtactcaactccggcaacttttatttcgcttggtcggcctcagggatttccctggaccttagtctaaacgcacacaggagtatgcaggaacagacaaccgacaacaggtttttttggaatcagtctctgcacctgcatttgaagcattatggagttaattgtgacgactggctccttagattgatgtgcggaggagtggagataaggacgatttacgccgctcacaagcaggcaaaagcttgcctgatttctcgcttgtcatgcgagagagccggtacacgatttaacgtgcgtggaactaacgacgacggccatgtggcaaactttgtggaaaccgaacaggtggtttatctggacgatagtgtcagctcttttatccaaatcagaggaagcgtccccctgttctgggaacaaccaggtctacaagtgggctcccacagggttcgcatgagccgcggtttcgaagctaacgcccctgcatttgataggcactttcggacattgaaaaatctgtacggaaagcagatcatagtaaacctcttggggtctaaggagggcgagcatatgctgtccaaagcattccagtctcacctcaaggcgagcgagcatgccgcagatatccagatggtgaatttcgactatcatcagatggttaagggagggaaggccgaaaaactgcactccgtgctaaagccccaggttcagaaattcctggactacgggttcttctactttaacgggagcgaggttcagcggtgtcagagtggcacagtgcggactaattgtttggattgtctggaccgaacaaactctgtgcaagcattcctgggccttgagatgctagctaaacagttggaggcactggggttggccgaaaagccacaattagtgaccagattccaggaagtgtttcgctcaatgtggtctgtgaacggtgattcaatctccaagatctacgcaggtacaggcgctcttgaggggaaggccaagttgaaagacggtgctcggtcagtcacgcgtactatacagaataatttttttgattcttccaagcaagaggccatcgacgtgttgcttctcgggaacaccctcaactccgacttggccgacaaggcaagggccctcctgaccaccggttctcttagggtaagtgagcagaccctgcagagcgcatcctccaaggtcttgaaaagtatgtgtgagaacttctataaatactcaaaacccaaaaagattcgtgtatgtgtgggaacatggaacgtgaatgggggaaagcaatttcgatccatcgcatttaagaaccaaaccttaactgactggcttctcgacgctccaaagttggccggtattcaagaatttcaggataagcgttctaagcctactgacatcttcgccatcggatttgaagagatggtggagctaaacgccggtaacattgtctcagcttcaactaccaaccagaagctctgggccgtggagcttcagaagacgatctcgagggataacaagtacgtcctactggctagtgagcaacttgtaggagtgtgcctattcgtgtttatcaggccgcagcatgctccatttattcgcgatgtggccgtggacacggtgaagacagggatggggggagctacagggaataagggcgctgtggccatccggatgttgtttcacacaacttctttatgtttcgtgtgttctcacttcgctgccggtcagagtcaggtgaaagaacggaatgaagacttcatcgagatcgcacggaaactgtccttccccatgggccgaatgctgttttcccacgactacgtcttttggtgcggagactttaactaccgcatcgacctgccaaatgaggaggtgaaagaacttatccgccaacaaaactgggattcgctcattgctggagatcagctcattaatcagaaaaatgccggacaggtctttaggggctttttggagggcaaagtcacattcgctcctacttataagtatgacctgttttctgacgattacgacacgtctgagaagtgtagaacacctgcctggacagatagagtcctctggagacgcagaaaatggccctttgataggtcagctgaagatcttgatctcctcaatgctagctttcaggatgaatcaaagattctgtatacgtggacaccaggcaccctgctccactatggcagggccgaactcaagacatccgaccatcgacctgtcgtggcgttgatagacatcgacatctttgaagtggaggctgaggaaaggcaaaatatctataaagaagttattgccgtgcagggacctcctgacggtaccgttctggtgagcattaagtcctcacttcccgagaacaacttctttgacgacgcactgatagacgagttgcttcagcagtttgcgagtttcggtgaggtgatcctaattcgattcgtcgaagacaaaatgtgggtgaccttcctggaggggtcttctgcactgaacgtactctcactcaacggtaaggaacttctaaataggaccattacaatagctttgaagtcaccagattggataaagaatctggaggaggaaatgtcccttgaaaagatcagtatcgctctcccttcaagcaccagcagtaccctgctgggcgaagacgccgaggtagctgcagactttgatatggaaggtgacgtggacgactactctgcagaagtcgaagagctcctgcctcagcacttgcaaccgagcagtagctcaggcctgggtacatctccaagtagctcccctcgcactagtccatgccaatcgcccactatttcagagggacccgtaccaagtctgccaatcaggcctagtcgtgcaccgagtaggacccccggaccgccaagtgcccagagcagtcccatcgacgcccagcctgccactcccctgccacagaaggatccggctcagccgttagaaccaaagcggcctccccctccgcgtcctgtcgccccaccaactcgccctgccccaccacagaggcccccacccccatcgggtgctcgttctcctgcccctactagaaaagagtttggcggaataggagctcctccaagccccggagtcgccagacgggagatggaggcaccaaagtcgcctggaacaactcggaaggacaacatcggacggtctcaacccagcccccaagcaggtctagccggtcctgggccagcaggctattctactgccaggcccacaatacctcctagggccggagtgatctctgctcctcagtcccacgccagggcatccgccggaaggttgacgcctgaatcgcagagcaaaactagcgagaccagcaagggctctacctttctgccagaacctttaaaaccacaggccgctttccctccacagtcatctttgcctccccctgcgcagaggctgcaggaaccactcgtgccggtcgccgctcctatgccacaaagtggcccacaacccaatctggaaacacccccacagccaccacctcggtcacgatcatcccatagcttgccctcggaagcttcctcccagcctcaggtcaaaactaacggcatctcggatggcaagcgcgaaagcccactgaaaatcgatcccttcgaggacctctcgtttaaccttctggccgtctccaaggcgcagctcagtgtgcaaaccagcccagtgcctactcccgatcccaaacggttaatccagttgccatccgccacccagtccaacgtgctctcctcagtgagttgcatgccaaccatgccacccattccagcccgttctcagtcccaggagaatatgagatcgtctcctaacccttttatcacaggtttaacccgaacgaatcccttctccgaccggaccgcggcaccgggaaatccattcagagcaaagagtgaggagagcgaggctacctcctggttcagtaaggaagagcccgtgactatcagtccgtttccaagcctgcaacctctgggccataacaagtctcgggcttcctcaagcttggacggtttcaaagacagttttgatctgcagggacagtctaccttaaaaatctccaacccaaagggctgggtgacgttcgaagaggaagaagacttcggcgtgaagggaaaatccaagtccgcatgctcagatctgctgggaaatcagccgtccagtttctccggctccaacctgactcttaacgacgactggaacaagggcacgaacgtgagcttttgcgtgctcccaagccgtcggcctcctccaccccctgtcccgctcttacctcccggtacctcacctcccgttgatccattcactaccctcgcctccaaagcgagccctactctcgacttcactgaacgctag

SEQ ID NO: 141821 - DNA, 4053 bp, Artificial Sequence
  derived and/or modified sequence
atgagaaagcggtgggcctgttggtcaggtagtgatgctccaggaggatgtggtggcggatgcgggcgtcgcagacgtcgcagtcgacgcaagcgcgcagccagcgaagagagaaggatggctttcagcaaaggatttcgcatctaccacaaactggatccccctcctttttcactcatcgtggaaacacggcataaagaagagtgtctcatgttcgagagcggtgccgtcgctgtgctctccagtgcggagaaggaagcaattaagggtacttattctaaggtgctcgacgcttacggattgcttggggtgctgcggctgaacctcggcgacacaatgctgcactacctggtcttggtgacagggtgcatgagcgtcgggaaaattcaagaatccgaggtgttccgggtgacatccacagagttcatcagcctgcgcatcgactcctcagacgaggatcgaatctctgaggtgaggaaagtcctcaacagtggaaatttctatttcgcttggtctgcctccgggatttcgctggatttgagtcttaacgcacatcggtcgatgcaggaacagaccaccgataatagatttttttggaatcagtcactgcacctccacctcaaacattacggcgtgaattgcgacgattggctcttaagactcatgtgtggaggagtagagatcaggacaatctatgccgctcataaacaagctaaggcctgtctgatttctagactgtcctgcgaaagagctggtacacggttcaatgtcagaggcaccaatgacgatgggcatgtagctaactttgtggagacagagcaggtggtctatttggacgactccgtgtcttccttcatccagattcgcggttccgtgccactcttctgggaacagccgggtctgcaggttggctcacaccgggtgagaatgagccgagggtttgaggcaaacgcccctgccttcgaccgccattttcgaaccttgaaaaacctatacgggaaacagatcattgtcaacctcctgggatcaaaagaaggggaacacatgttgagcaaggcattccagagccatttaaaggctagcgagcatgctgccgacattcagatggtgaactttgactatcaccagatggtcaagggagggaaagcagaaaaactacacagcgttctcaaaccacaagtgcagaagttcttggactacggcttcttctatttcaatggcagcgaggtccagcggtgccagtcaggaacagtgaggacaaattgccttgattgcttggaccggactaattctgtgcaggcttttctggggctagaaatgctggccaaacagctcgaagcactgggcctggcagagaaacctcagctcgtgacaaggtttcaggaagtctttcgctccatgtggtcagtgaatggagacagcatatccaagatatacgctggaacaggcgctttagagggaaaggctaaactgaaggacggagcccgttctgttactcggactatccagaataactttttcgatagcagtaagcaggaggcaatagatgtgctcctgctgggtaacaccctcaactctgatctggctgacaaagccagagccctcctgacaactggatctcttagggtgagtgaacaaaccctgcaaagcgcatcgtctaaggtactgaaatctatgtgtgagaacttttacaagtactccaaacccaagaagatccgtgtgtgtgtgggaacctggaacgtaaatggcggtaaacagtttcgctcaatcgcctttaagaatcagacgcttaccgattggctgctggatgcacccaagctggctgggatccaggaattccaggataagaggtccaaacccacagacatcttcgccatcgggtttgaggaaatggtggagctgaacgccggtaatatcgtgtctgcgtcaacaactaatcagaaattgtgggcggtggagttgcagaagacgatatccagagataataaatatgttttgctggcaagcgaacagctggtgggggtatgcctgttcgtgtttatcaggccccagcacgcccctttcatccgcgacgtcgctgtggatactgtcaaaacaggcatgggaggggcaaccggaaataaaggagctgtcgctattcgcatgctgtttcacactacttccctgtgcttcgtgtgcagccactttgcagccggtcagtcacaggtgaaggagaggaacgaggacttcatcgagattgcaagaaagctcagttttcccatgggcagaatgcttttctctcatgattatgttttctggtgcggggatttcaattaccgtattgacctgcctaacgaggaggttaaagaactgatacggcagcagaattgggattctctgatcgccggtgaccaactgatcaaccagaaaaatgcaggacaggtgttcagggggttcctggagggtaaggttaccttcgctccgacttacaaatatgacctcttttctgatgactacgacacatctgaaaaatgtcggacccctgcatggactgaccgcgtcctctggagacgcagaaagtggccctttgatcgcagcgccgaggatctggatcttctgaatgcttccttccaggacgagtcgaagattctgtatacatggacaccaggcacactcctgcactacggaagggccgaattgaagacaagcgatcaccggccagtggtcgccctaattgacatagacatattcgaagttgaggcagaagagcgccagaacatctacaaagaggtaattgccgtgcaagggccacctgacggaactgtattagtatccatcaagagctccttgcctgagaacaatttctttgatgacgctctgatcgacgaactgctccagcagttcgcctcatttggcgaagtaatattgattaggttcgtggaagacaagatgtgggtcaccttcctagaaggatctagtgccctaaacgttctcagcttgaatgggaaggaactgctgaacaggacaattaccatagccctgaaaagtccagattggataaagaacctcgaggaagagatgagtctggagaaaatttcaatcgcgctgccctcctcaaccagcagcaccctgctaggagaagacgcagaagttgctgctgacttcgacatggaaggggacgttgacgattactctgccgaggtggaggagctcttgcctcaacacctgcagccatcaagttcttccggcctcgggacaagcccgtcctcatctccccgtacatctccatgccagagccctactatttcagaaggacctgtgccgtctcttccaattcgaccatcgcgggcaccaagccgcactcccggtcctcccagtgcacaatcctcccccattgatgctcaacccgcaacccctctcccccagaaagaccctgcacagccactggaaccaaaaagacctcctccacctcgccctgtcgctccacccacgcgcccagcaccacctcaacgaccaccccctccatcaggagcacgcagccccgctcctacgcgcaaagaatttggaggaattggcgctcccccttctcccggtgtggccagacgtgaaatggaggcaccaaaaagccctggtacgactcggaaggacaacatcggaaggtcacagcccagcccacaagcaggactggccggaccgggaccggcaggatattcaaccgctcggcctaccattcccccacgggctggggtaatcagcgctcctcagtcccacgctagggcaagtgcaggacggttgacacctgaatctcagagcaaaacatcagagacctcaaaaggtagtacctttctgcccgagccactgaagccacaggctgccttcccacctcagtctagcctgccgccacccgcacagcgattacaggaacctctggtcccagtcgccgcaccaatgccacagtctgggcctcaaccaaatctggaaaccccccctcaacctccccctagaagccgctctagtcatagcctaccctcggaggcctccagccaaccgcagcaggagcagccaagcggctag

SEQ ID NO: 141822 - DNA, 4839 bp, Artificial Sequence
  derived and/or modified sequence
atgagaaagagatgggcttgttggagtggatcagacgctccaggaggctgtggaggaggctgcgggcgtcgcagacgacggagcaggcgcaagcgagccgcttccgaggaacgtcgaatggctttcagcaaaggctttcgcatctatcacaaactagacccaccccctttttcacttatcgttgagacacgtcacaaggaggaatgcctgatgttcgagtctggagcggtggctgtgctctcatctgctgaaaaagaagctataaaaggaacttacagcaaggtgctcgatgcctacgggctccttggagtcttgcggctaaatcttggggacactatgctgcactaccttgtactggtaactggctgcatgtcggtggggaagatccaggaaagcgaggtcttccgggtcacttccacagaattcatcagcctgcgtattgacagcagtgatgaggaccgtatctccgaggtgagaaaggtcttaaatagcgggaatttctacttcgcctggagcgcaagcggaatctctttggacctaagtttaaacgcgcatcggtcaatgcaggagcaaacaacagacaaccgattcttctggaaccagagcctgcacttgcacttgaagcattacggcgtcaactgcgacgattggttgctgcggcttatgtgcggcggagtggagatcagaaccatctacgccgctcacaagcaggccaaagcttgccttatttcccgcttgtcctgcgaacgggctggtaccagatttaatgttcggggaactaatgacgacggccacgtcgccaacttcgtagagacagaacaggtggtgtacctggacgactcagtgtcttctttcatacagatacgaggatcagtgcctctcttttgggaacagcctggactccaggtgggcagccatcgcgtcaggatgtcccggggtttcgaggccaacgctccagcatttgacaggcacttccgcaccctgaagaatctctatggaaaacagatcatagtgaatcttctgggcagcaaagagggggaacacatgctctctaaggccttccagagccaccttaaggcctccgaacacgctgcagatatccagatggtcaattttgattatcaccaaatggttaaggggggaaaggctgaaaagctgcactctgtgcttaaacctcaggtgcagaagtttttagattatggtttcttctattttaacggcagcgaagtgcagcgatgccagtctggaactgtgcgcacaaactgccttgactgtcttgacagaaccaactctgtccaagctttcctgggcctagagatgctggcaaaacagttggaggccctggggctagcagagaaacctcagcttgtaacccgatttcaggaagtgtttcgtagtatgtggagcgtgaatggggattctatctcaaagatttatgccggaaccggggcactggaaggtaaggctaaacttaaggacggcgcaaggtcagtgaccagaacaatccagaacaacttcttcgattcttctaagcaggaggcgatcgatgttctgctgttgggcaacaccctcaattccgacttagctgacaaagctagggctctattaaccacaggatcccttagggttagtgaacagacactgcaatcggcatcatcaaaggttctgaagtccatgtgtgaaaatttttataagtatagcaagcctaagaaaattagagtatgcgtcggcacctggaacgtgaatggtggtaagcagtttaggtcgatcgccttcaaaaaccagactttgactgactggcttctggacgcccctaaattggctgggatccaggaattccaggataagaggtctaaaccaaccgatatttttgccatcggcttcgaggaaatggttgagctcaacgcaggtaatatcgtgtccgcttctacaaccaaccagaaactttgggcagtggagctgcagaagacaatctctcgggataacaagtatgtcctgcttgcctctgagcagcttgtgggtgtgtgcctgttcgtgttcattagacctcagcacgccccttttatcagggacgtggctgtggataccgttaaaacgggaatgggaggtgctacaggcaataaaggcgctgtggccattagaatgctgttccacacaacctctctgtgtttcgtgtgctcccacttcgctgcaggacagtcccaggtgaaggagcgtaacgaagattttatagagattgcacgcaagctgagttttcctatggggagaatgctgttctcccatgactatgtgttttggtgtggagacttcaattaccgcatagatctgcctaatgaggaagtcaaggaattgatcaggcagcagaactgggatagtttaatcgcaggcgatcaactcatcaaccagaaaaatgcgggacaggtttttaggggatttttagaaggcaaagttacgttcgctcccacttataagtacgacctattctctgacgactacgacactagcgagaaatgcagaactccagcatggacggatagggtgctctggaggaggcgcaagtggcctttcgacaggtcggccgaagatctcgacttactgaatgcctctttccaggacgagagtaagattttgtacacttggacacctggtaccctgctgcactacggccgagccgagctgaagaccagcgaccatagacccgtcgtcgccctcatcgacatcgacatctttgaagtggaagcagaggagcgccagaacatctataaagaagtcatcgctgtgcagggccctccggacggaactgtgctcgttagcattaagagttcactacctgaaaataacttctttgatgatgcactgatcgatgagctacttcagcagttcgccagtttcggggaggtcattctgatacggtttgtagaggataaaatgtgggtcacattcctggaaggctcctccgcactcaacgttctctccctcaacggcaaggagctgctaaaccgtaccatcacaattgccttgaagtcgcctgactggatcaagaacctcgaggaggaaatgagcctggaaaagatcagcattgccctgcccagtagcacctcaagtacccttctgggggaggacgcggaagtggccgcagacttcgatatggagggcgatgtggatgactattcagcagaagtagaagagttgctgccgcaacatcttcagccctccagtagctctggcctcggaaccagcccaagcagcagtcccagaaccagcccctgccaaagccccacaatcagtgagggcccagttccatcattgccgatcaggccttctcgggcaccctcgaggactcctggacctccttccgcccagtcatcacctattgacgcacaacccgctacgcccttacctcagaaagaccccgctcagcctctggagcctaaaagaccacctcctcctaggcccgttgcgccacccactaggccagcaccaccccagcgaccaccaccccctagtggcgctcggtcaccagcccctacccgtaaggaattcggcggaattggcgctcccccaagtcctggcgtggcccgtcgcgaaatggaggcgcctaaaagcccagggaccacgcggaaagataatattggcagatcacagcccagcccccaggctgggctcgctggccctggccctgccggttatagtactgcaaggcccacaattccaccaagggcgggagtgataagcgctccacagtcacacgccagagcaagcgcagggcgtttgacaccagaaagccagagcaaaactagtgaaacttctaaaggttccacattcttgccagagccactgaagcctcaggctgcgttccctccacagtctagcttgccacctccagcacaacggctgcaggaacccctggtgcccgttgcagccccaatgccccagtcagggccacagcccaacttggaaaccccaccacagccaccacctcggtctcgaagtagccattccttgccctccgaagcttccagccagccgcaggttaagacgaatggaatctccgatggcaagcgggagagtcctctaaagatcgacccatttgaggacttgtcatttaacctgcttgctgtaagtaaggctcaacttagcgtgcagacaagtccagtaccaaccccagatcccaaacggcttatacagctgcctagcgcaacacaatccaacgtgctgtccagtgtttcctgtatgcccaccatgcctcccatccctgctcgttctcagagccaggaaaacatgaggtcatctcctaacccatttatcacaggcctgacccgcacaaaccccttttctgatagaactgctgcccctggcaatccatttcgagccaaaagtgaggaaagcgaggccacgtcttggttcagcaaggaagaaccagtcacgatcagtccttttccatccttacagcccctgggacataataagagtagggcctccagttctctggacggattcaaggactcctttgatctgcaaggccagagtaccctgaagatcagcaatcctaaagggtgggtgacttttgaagaagaggaggacttcggcgtgaaaggtaaatctaaatctgcctgttcagatttactcggtaaccagccttcttcttttagtggctctaacctcacactgaatgacgattggaataaaggtacgaatgtatcgttttgcgtgctgccatctaggaggccaccaccacctccagtgcccctgctgcccccaggaactagcccccctgtggacccttttactaccctggccagtaaggcgagtcccacccttgattttactgagcgctag

SEQ ID NO: 141823 - DNA, 4722 bp, Artificial Sequence
  derived and/or modified sequence
atggcgttcagtaaaggattccggatctatcacaaattggatcccccacctttcagcctcatagtggaaactaggcataaggaagaatgtctcatgttcgagtctggggctgtcgctgtgctctcatctgcagaaaaagaggcaatcaagggtacatactccaaagtactggatgcatatggactcttaggtgttctgcggttaaatcttggtgatactatgttacattatctggtcctagtcactggatgtatgtctgttggaaaaattcaagaatctgaagttttccgagttacttccactgagtttatatcactgcgaatcgattcttcagatgaggatcgcatttcagaagtgcggaaagttttgaattcaggaaacttttattttgcatggtctgcatctggcatcagtttagatttgagtcttaatgcgcatcgtagcatgcaagaacagacaactgataatagatttttctggaatcagtctttgcatttgcatctcaaacactatggcgtgaattgtgatgactggttattacgtcttatgtgtggaggagtagaaatcagaacaatttatgctgctcataaacaggcgaaggcttgcctcatttcaagattaagctgtgaacgagctgggaccaggtttaatgtccggggaacaaatgatgatggtcatgttgccaattttgtagaaacagaacaggttgtgtacttagatgactcagtttcttccttcatacaaatccgaggatctgttccattgttctgggagcaaccagggttgcaagtgggatctcatcgtgtccgtatgtcaaggggatttgaagccaatgcacctgcttttgacaggcattttagaacacttaagaacttatatggtaaacaaataatagtaaatttgcttggatctaaggaaggtgaacatatgctaagtaaagctttccagagtcatttgaaagcttctgaacatgctgctgatatccagatggtgaattttgactatcatcaaatggttaagggaggaaaggcagaaaaattacatagtgttcttaaacctcaagtccagaagtttctagattatggatttttttatttcaatggaagtgaagttcaaagatgccagagtggtacagttcgaacaaactgcttggattgtcttgatagaacaaatagtgtgcaggcatttcttggcttagagatgctagctaaacagttggaagctcttggtttagctgaaaagcctcagttggtgactcgctttcaagaagtttttcggtcaatgtggtccgtgaatggtgattcaatcagtaagatatatgcaggaactggagctcttgaagggaaagcgaagttaaaagatggtgctcgctctgttacccgaacaattcagaataacttctttgacagctccaagcaagaggccattgatgttttgctactgggaaatactctgaatagtgatttagctgacaaagctcgagcacttttaactactggaagtttgcgtgtttctgagcagacattacagtcagcatcttctaaagtactaaagagcatgtgtgagaatttctacaaatattcaaagcctaagaaaattcgagtatgtgtcggaacctggaatgtgaatggtgggaagcaatttcgcagcatagcttttaagaatcagacactcactgactggcttcttgatgcacccaagttagctggcatccaggagtttcaagataaaagaagtaagccaactgatatatttgcaattggttttgaagaaatggtagaattgaatgctggaaacattgtgagtgcaagcacaacaaatcagaagctctgggctgtagaacttcagaagacaatctccagagacaacaagtatgtgctgctggcttctgaacagttggtgggcgtctgtttgtttgtttttatcagaccacagcatgctccttttatcagggatgttgcagttgatactgtgaagactggaatgggaggtgcaactggaaataagggagcagttgcaatccgaatgctcttccatacaaccagcctttgcttcgtctgtagccactttgctgcagggcagtcacaagtcaaagaaagaaatgaagattttatagaaatagcacgaaaattgagttttcctatgggaaggatgctattttcccatgactatgtattttggtgtggtgatttcaactatcgaatcgatctccctaacgaagaagttaaagagctcataagacagcaaaattgggattctcttatagcaggagatcaacttatcaatcagaaaaatgctggacaggtttttagaggatttttagaaggaaaggtaacctttgctccgacatataagtatgacttgttttctgacgactatgacaccagtgaaaagtgccgcacccctgcctggacagaccgtgtcctttggagaaggaggaaatggccttttgatagatcagctgaagatctagatcttctaaatgctagttttcaagatgaaagcaaaattctgtacacgtggactccaggcactttgctgcactatggaagagctgagctgaagacttctgaccacaggcctgtcgttgccctgattgatatagatatatttgaagttgaagctgaagagaggcaaaacatttataaagaagtaattgcagttcagggtccaccagatggtacagtattggtctcaatcaaaagttctttaccagaaaataatttttttgatgatgccttgattgatgagcttctgcagcagtttgcaagttttggtgaagttatacttataagatttgtagaagataaaatgtgggttacatttttggagggaagctctgccttgaatgttctgagcctaaatggtaaagagttattgaatcggactataactattgctttaaaaagtccagactggatcaaaaatttggaagaagaaatgagtttagagaaaattagcattgcattgccatcatcaacaagctctaccctgcttggtgaagatgcagaggttgcagcagattttgatatggaaggtgatgttgatgactatagtgctgaagtggaggaacttcttcctcagcatctccagccatcttcaagttccggccttggtacttcccccagctcttcaccccgaactagtccctgccagtcacctacaatatcagagggtcctgtaccttcccttcccatcagaccaagccgagcaccgtcaagaactcctgggcctcccagtgcacagagttctcctattgacgcgcagccagcaacgccgctgccgcagaaagaccccgcccagcccttggagcccaagcggccgccgccgccccgcccggtcgcccctcccacacgcccggctcccccacagagacctcctccgccttcaggggctaggagtcctgcacccactagaaaggaatttggaggtattggagcccctcccagtcctggggtagctaggagagagatggaagcacccaaaagccctggaacaacaaggaaagataatataggacgcagtcagccttcacctcaagcaggacttgcaggcccaggacctgctggatacagtacagccagaccgacgattcctcctcgtgctggagttatcagtgccccacagagccacgcgcgggcatctgctggaagactgactcctgaaagccaaagcaaaacatcagaaacgtcgaaaggttcaactttccttcctgaaccactgaagcctcaggctgcttttcctccgcagtcttctttgcccccgcctgctcaaaggttgcaagagcctcttgtccctgtggcagcacctatgcctcagtctggcccccagccaaatttggaaaccccaccacaaccaccacctcgaagcaggtcatcccatagcttgccttcagaagcttcctcacaaccgcaagtaaaaacaaatggaatctctgatggcaaaagagaatcaccattaaagattgacccatttgaagatctgtcatttaatctgcttgctgtatcaaaggctcagctatctgttcaaacgtcacctgttcccaccccagacccaaagaggttgattcagttgccttctgcaacgcaaagtaatgttttgagttctgtaagttgcatgccaacaatgcctccaattccagctcggagtcaatcccaggaaaatatgcgaagttctccaaacccatttattactggcttgaccaggacaaatcctttcagtgacaggactgctgctcctggaaacccatttagagccaagtctgaagaatcagaggcaacttcatggttctccaaagaagagcccgttactatcagtcctttcccttctctgcagcctcttggtcataacaaaagcagggcttcatcttcacttgatggctttaaggacagttttgatctacagggccagtctacattaaaaattagcaacccgaaaggatgggtaaccttcgaggaagaagaggattttggtgtgaaagggaagtcaaagtcagcttgttcagacttactgggtaatcagccaagttcattttctggctccaacctgacattgaatgatgactggaataaaggtacaaatgtctccttctgtgtgttgccgtcaagaagacctcctccacctcctgtccctctgctcccgcccggcaccagccctccagtagatcctttcacgaccttggcctctaaggcttcacccacactggactttacagaaagataa

SEQ ID NO: 141824 - DNA, 7059 bp, Artificial Sequence
  derived and/or modified sequence
aagccggcggggggcggggagctgctgcggccagacccacgggcagccgggcgggcggacgcctccaagaccagtctctgcctccgcagcgtcagcgggagcgggctgcctccgaagaaaggagaatggcgttcagtaaaggattccggatctatcacaaattggatcccccacctttcagcctcatagtggaaactaggcataaggaagaatgtctcatgttcgagtctggggctgtcgctgtgctctcatctgcagaaaaagaggcaatcaagggtacatactccaaagtactggatgcatatggactcttaggtgttctgcggttaaatcttggtgatactatgttacattatctggtcctagtcactggatgtatgtctgttggaaaaattcaagaatctgaagttttccgagttacttccactgagtttatatcactgcgaatcgattcttcagatgaggatcgcatttcagaagtgcggaaagttttgaattcaggaaacttttattttgcatggtctgcatctggcatcagtttagatttgagtcttaatgcgcatcgtagcatgcaagaacagacaactgataatagatttttctggaatcagtctttgcatttgcatctcaaacactatggcgtgaattgtgatgactggttattacgtcttatgtgtggaggagtagaaatcagaacaatttatgctgctcataaacaggcgaaggcttgcctcatttcaagattaagctgtgaacgagctgggaccaggtttaatgtccggggaacaaatgatgatggtcatgttgccaattttgtagaaacagaacaggttgtgtacttagatgactcagtttcttccttcatacaaatccgaggatctgttccattgttctgggagcaaccagggttgcaagtgggatctcatcgtgtccgtatgtcaaggggatttgaagccaatgcacctgcttttgacaggcattttagaacacttaagaacttatatggtaaacaaataatagtaaatttgcttggatctaaggaaggtgaacatatgctaagtaaagctttccagagtcatttgaaagcttctgaacatgctgctgatatccagatggtgaattttgactatcatcaaatggttaagggaggaaaggcagaaaaattacatagtgttcttaaacctcaagtccagaagtttctagattatggatttttttatttcaatggaagtgaagttcaaagatgccagagtggtacagttcgaacaaactgcttggattgtcttgatagaacaaatagtgtgcaggcatttcttggcttagagatgctagctaaacagttggaagctcttggtttagctgaaaagcctcagttggtgactcgctttcaagaagtttttcggtcaatgtggtccgtgaatggtgattcaatcagtaagatatatgcaggaactggagctcttgaagggaaagcgaagttaaaagatggtgctcgctctgttacccgaacaattcagaataacttctttgacagctccaagcaagaggccattgatgttttgctactgggaaatactctgaatagtgatttagctgacaaagctcgagcacttttaactactggaagtttgcgtgtttctgagcagacattacagtcagcatcttctaaagtactaaagagcatgtgtgagaatttctacaaatattcaaagcctaagaaaattcgagtatgtgtcggaacctggaatgtgaatggtgggaagcaatttcgcagcatagcttttaagaatcagacactcactgactggcttcttgatgcacccaagttagctggcatccaggagtttcaagataaaagaagtaagccaactgatatatttgcaattggttttgaagaaatggtagaattgaatgctggaaacattgtgagtgcaagcacaacaaatcagaagctctgggctgtagaacttcagaagacaatctccagagacaacaagtatgtgctgctggcttctgaacagttggtgggcgtctgtttgtttgtttttatcagaccacagcatgctccttttatcagggatgttgcagttgatactgtgaagactggaatgggaggtgcaactggaaataagggagcagttgcaatccgaatgctcttccatacaaccagcctttgcttcgtctgtagccactttgctgcagggcagtcacaagtcaaagaaagaaatgaagattttatagaaatagcacgaaaattgagttttcctatgggaaggatgctattttcccatgactatgtattttggtgtggtgatttcaactatcgaatcgatctccctaacgaagaagttaaagagctcataagacagcaaaattgggattctcttatagcaggagatcaacttatcaatcagaaaaatgctggacaggtttttagaggatttttagaaggaaaggtaacctttgctccgacatataagtatgacttgttttctgacgactatgacaccagtgaaaagtgccgcacccctgcctggacagaccgtgtcctttggagaaggaggaaatggccttttgatagatcagctgaagatctagatcttctaaatgctagttttcaagatgaaagcaaaattctgtacacgtggactccaggcactttgctgcactatggaagagctgagctgaagacttctgaccacaggcctgtcgttgccctgattgatatagatatatttgaagttgaagctgaagagaggcaaaacatttataaagaagtaattgcagttcagggtccaccagatggtacagtattggtctcaatcaaaagttctttaccagaaaataatttttttgatgatgccttgattgatgagcttctgcagcagtttgcaagttttggtgaagttatacttataagatttgtagaagataaaatgtgggttacatttttggagggaagctctgccttgaatgttctgagcctaaatggtaaagagttattgaatcggactataactattgctttaaaaagtccagactggatcaaaaatttggaagaagaaatgagtttagagaaaattagcattgcattgccatcatcaacaagctctaccctgcttggtgaagatgcagaggttgcagcagattttgatatggaaggtgatgttgatgactatagtgctgaagtggaggaacttcttcctcagcatctccagccatcttcaagttccggccttggtacttcccccagctcttcaccccgaactagtccctgccagtcacctacaatatcagagggtcctgtaccttcccttcccatcagaccaagccgagcaccgtcaagaactcctgggcctcccagtgcacagagttctcctattgacgcgcagccagcaacgccgctgccgcagaaagaccccgcccagcccttggagcccaagcggccgccgccgccccgcccggtcgcccctcccacacgcccggctcccccacagagacctcctccgccttcaggggctaggagtcctgcacccactagaaaggaatttggagcacccaaaagccctggaacaacaaggaaagataatataggacgcagtcagccttcacctcaagcaggacttgcaggcccaggacctgctggatacagtacagccagaccgacgattcctcctcgtgctggagttatcagtgccccacagagccacgcgcgggcatctgctggaagactgactcctgaaagccaaagcaaaacatcagaaacgtcgaaaggttcaactttccttcctgaaccactgaagcctcaggctgcttttcctccgcagtcttctttgcccccgcctgctcaaaggttgcaagagcctcttgtccctgtggcagcacctatgcctcagtctggcccccagccaaatttggaaaccccaccacaaccaccacctcgaagcaggtcatcccatagcttgccttcagaagcttcctcacaaccgcaacaggagcaaccatcagggtaacaggtaaaaacaaatggaatctctgatggcaaaagagaatcaccattaaagattgacccatttgaagatctgtcatttaatctgcttgctgtatcaaaggctcagctatctgttcaaacgtcacctgttcccaccccagacccaaagaggttgattcagttgccttctgcaacgcaaagtaatgttttgagttctgtaagttgcatgccaacaatgcctccaattccagctcggagtcaatcccaggaaaatatgcgaagttctccaaacccatttattactggcttgaccaggacaaatcctttcagtgacaggactgctgctcctggaaacccatttagagccaagtctgaagaatcagaggcaacttcatggttctccaaagaagagcccgttactatcagtcctttcccttctctgcagcctcttggtcataacaaaagcagggcttcatcttcacttgatggctttaaggacagttttgatctacagggccagtctacattaaaaattagcaacccgaaaggatgggtaaccttcgaggaagaagaggattttggtgtgaaagggaagtcaaagtcagcttgttcagacttactgggtaatcagccaagttcattttctggctccaacctgacattgaatgatgactggaataaaggtacaaatgtctccttctgtgtgttgccgtcaagaagacctcctccacctcctgtccctctgctcccgcccggcaccagccctccagtagatcctttcacgaccttggcctctaaggcttcacccacactggactttacagaaagataacgccatgcaatagaaaacagtgggtacttgcttttggcaggatagagctaagagaattgggcattagtatttcattatgtgcaataagtcattgtaagtgcactgatatcttcacaaaacaccactatttgatgtgtacagagttggactatgtgtatattggaaataaggaaaaacccttctcattgttaactggagttttgatgtatttctctttggatgaataggagacagtagtagccataaaaagtacttatactttagaaaacagtccttattcagaaacttttcggtcagtcttctgaagaatctcaaaaagcccacccaactttcagctgacatttccaccagccctctcatacttgttaacaattggtatctttgagtatttaccaaagagctgccaaggttacagtgaacagagttttgaaaggcattgctttaaaggaaaaaagtataggtatgtgtacatatataatacatacaaacacatgtacttctgtatacatttacatatttttacaattcatactttaatttctaggctataactcagaccaaattatacctaaaagttccaacaaagtccctttttcaatatcacattaccaaaaagatggctgcaaatgtaatttggacctttcattaattttgttttcaaaactagaataatctcaccacagaatcagaattttctaccgttccacacccaaccccttcaaatacacacaaccttgttacttttcactccagcaccttcatacgcttttctccaggaggaggttcttgcagctggaaacagcctattttgtggtcactgtcaagtggatggatattctagcgctcccaaaaaagcactatggccttatatgcagggaaggcacataccaccaagttcaatgagaaatattagagctaaccgtactctcttctctgcgtacgttcgagtatacgttgcccatatccctcccatattttctttttgctgcttttgctctggaactttgcttttagcagggaaagcagctgtcccctgagtgctttgaattgggaatatacccagtgtgtgttctcccccctcttacgaggctacataacacatctatgatgctgctttaagtttttagaggctatacctcaaagtagctgcggattttgtctcctgcactgccaatatgcaactgatcccgcttttattaattttttgaagaagtacacagaatttttacagaatgtagtattttgatatcattaagtaaaccaatcagaaaactccttgagcaatagttgtttctttgtcagtttcagttacaatcatctttacccattaagacttacattaacattccttttatataaagagttgtatatgtccacctaaattcctatgtccacacttaacctttaaagatgtacattgagggaatatcaaaaaatagcgttcatggctacgaatatgtagaatgttaaaagcacagcaaactgcactgcacttataaagcaaatctattagaaaaaaagcatttttctaaatgctcaaatgttatcaaaatactatatttatagaagtaatcttctctgttaacagccaagatttgctgttagaaataactcttgtgagttttatattgtgctttttggaggttctaatcatttcagcagtagcgtcttaaacagcagtattactataagcagttgcttcaaaatgtgaattaacttgttgaaactgtggctttaacatccatgtgactagtgtatatggtatttgctctccattagcaaaataattcattgttaggtaaacttcactagtgcaaattgcagatctgtgagcaatgtttcctattgaatataaactactgtctaaaatatacatatcagcagcccagcctttatcaggaaaattatacttggcaagttgctgaaaatgcacaaagttatgaaagttaaaggtatgctgcaaataactagccattattctatgtattattaaatatttactagttctgttaaaagcagagcagaagttagacactaaggatctctttgtgaactctgtgttctctatattagattgctgtttatatgtaagaattttattgcttatgtggcatacaatatttataactataaactttatagaagtacagtattaaagtcagtggtacacagacattctgtacatatcctgtgaaacgtgctgtcatatgaaataaatatatctgtctttaccatg

SEQ ID NO: 141825 - DNA, 7094 bp, Artificial Sequence
  derived and/or modified sequence
atgcggaagagatgggcctgctggagcggaagtgacgctcccggcggctgtggcggcggctgcgggagaaggaggaggaggagccggaggaagagggctgcctccgaagaaaggagaatggcgttcagtaaaggattccggatctatcacaaattggatcccccacctttcagcctcatagtggaaactaggcataaggaagaatgtctcatgttcgagtctggggctgtcgctgtgctctcatctgcagaaaaagaggcaatcaagggtacatactccaaagtactggatgcatatggactcttaggtgttctgcggttaaatcttggtgatactatgttacattatctggtcctagtcactggatgtatgtctgttggaaaaattcaagaatctgaagttttccgagttacttccactgagtttatatcactgcgaatcgattcttcagatgaggatcgcatttcagaagtgcggaaagttttgaattcaggaaacttttattttgcatggtctgcatctggcatcagtttagatttgagtcttaatgcgcatcgtagcatgcaagaacagacaactgataatagatttttctggaatcagtctttgcatttgcatctcaaacactatggcgtgaattgtgatgactggttattacgtcttatgtgtggaggagtagaaatcagaacaatttatgctgctcataaacaggcgaaggcttgcctcatttcaagattaagctgtgaacgagctgggaccaggtttaatgtccggggaacaaatgatgatggtcatgttgccaattttgtagaaacagaacaggttgtgtacttagatgactcagtttcttccttcatacaaatccgaggatctgttccattgttctgggagcaaccagggttgcaagtgggatctcatcgtgtccgtatgtcaaggggatttgaagccaatgcacctgcttttgacaggcattttagaacacttaagaacttatatggtaaacaaataatagtaaatttgcttggatctaaggaaggtgaacatatgctaagtaaagctttccagagtcatttgaaagcttctgaacatgctgctgatatccagatggtgaattttgactatcatcaaatggttaagggaggaaaggcagaaaaattacatagtgttcttaaacctcaagtccagaagtttctagattatggatttttttatttcaatggaagtgaagttcaaagatgccagagtggtacagttcgaacaaactgcttggattgtcttgatagaacaaatagtgtgcaggcatttcttggcttagagatgctagctaaacagttggaagctcttggtttagctgaaaagcctcagttggtgactcgctttcaagaagtttttcggtcaatgtggtccgtgaatggtgattcaatcagtaagatatatgcaggaactggagctcttgaagggaaagcgaagttaaaagatggtgctcgctctgttacccgaacaattcagaataacttctttgacagctccaagcaagaggccattgatgttttgctactgggaaatactctgaatagtgatttagctgacaaagctcgagcacttttaactactggaagtttgcgtgtttctgagcagacattacagtcagcatcttctaaagtactaaagagcatgtgtgagaatttctacaaatattcaaagcctaagaaaattcgagtatgtgtcggaacctggaatgtgaatggtgggaagcaatttcgcagcatagcttttaagaatcagacactcactgactggcttcttgatgcacccaagttagctggcatccaggagtttcaagataaaagaagtaagccaactgatatatttgcaattggttttgaagaaatggtagaattgaatgctggaaacattgtgagtgcaagcacaacaaatcagaagctctgggctgtagaacttcagaagacaatctccagagacaacaagtatgtgctgctggcttctgaacagttggtgggcgtctgtttgtttgtttttatcagaccacagcatgctccttttatcagggatgttgcagttgatactgtgaagactggaatgggaggtgcaactggaaataagggagcagttgcaatccgaatgctcttccatacaaccagcctttgcttcgtctgtagccactttgctgcagggcagtcacaagtcaaagaaagaaatgaagattttatagaaatagcacgaaaattgagttttcctatgggaaggatgctattttcccatgactatgtattttggtgtggtgatttcaactatcgaatcgatctccctaacgaagaagttaaagagctcataagacagcaaaattgggattctcttatagcaggagatcaacttatcaatcagaaaaatgctggacaggtttttagaggatttttagaaggaaaggtaacctttgctccgacatataagtatgacttgttttctgacgactatgacaccagtgaaaagtgccgcacccctgcctggacagaccgtgtcctttggagaaggaggaaatggccttttgatagatcagctgaagatctagatcttctaaatgctagttttcaagatgaaagcaaaattctgtacacgtggactccaggcactttgctgcactatggaagagctgagctgaagacttctgaccacaggcctgtcgttgccctgattgatatagatatatttgaagttgaagctgaagagaggcaaaacatttataaagaagtaattgcagttcagggtccaccagatggtacagtattggtctcaatcaaaagttctttaccagaaaataatttttttgatgatgccttgattgatgagcttctgcagcagtttgcaagttttggtgaagttatacttataagatttgtagaagataaaatgtgggttacatttttggagggaagctctgccttgaatgttctgagcctaaatggtaaagagttattgaatcggactataactattgctttaaaaagtccagactggatcaaaaatttggaagaagaaatgagtttagagaaaattagcattgcattgccatcatcaacaagctctaccctgcttggtgaagatgcagaggttgcagcagattttgatatggaaggtgatgttgatgactatagtgctgaagtggaggaacttcttcctcagcatctccagccatcttcaagttccggccttggtacttcccccagctcttcaccccgaactagtccctgccagtcacctacaatatcagagggtcctgtaccttcccttcccatcagaccaagccgagcaccgtcaagaactcctgggcctcccagtgcacagagttctcctattgacgcgcagccagcaacgccgctgccgcagaaagaccccgcccagcccttggagcccaagcggccgccgccgccccgcccggtcgcccctcccacacgcccggctcccccacagagacctcctccgccttcaggggctaggagtcctgcacccactagaaaggaatttggaggtattggagcccctcccagtcctggggtagctaggagagagatggaagcacccaaaagccctggaacaacaaggaaagataatataggacgcagtcagccttcacctcaagcaggacttgcaggcccaggacctgctggatacagtacagccagaccgacgattcctcctcgtgctggagttatcagtgccccacagagccacgcgcgggcatctgctggaagactgactcctgaaagccaaagcaaaacatcagaaacgtcgaaaggttcaactttccttcctgaaccactgaagcctcaggctgcttttcctccgcagtcttctttgcccccgcctgctcaaaggttgcaagagcctcttgtccctgtggcagcacctatgcctcagtctggcccccagccaaatttggaaaccccaccacaaccaccacctcgaagcaggtcatcccatagcttgccttcagaagcttcctcacaaccgcaacaggagcaaccatcagggtaacaggtaaaaacaaatggaatctctgatggcaaaagagaatcaccattaaagattgacccatttgaagatctgtcatttaatctgcttgctgtatcaaaggctcagctatctgttcaaacgtcacctgttcccaccccagacccaaagaggttgattcagttgccttctgcaacgcaaagtaatgttttgagttctgtaagttgcatgccaacaatgcctccaattccagctcggagtcaatcccaggaaaatatgcgaagttctccaaacccatttattactggcttgaccaggacaaatcctttcagtgacaggactgctgctcctggaaacccatttagagccaagtctgaagaatcagaggcaacttcatggttctccaaagaagagcccgttactatcagtcctttcccttctctgcagcctcttggtcataacaaaagcagggcttcatcttcacttgatggctttaaggacagttttgatctacagggccagtctacattaaaaattagcaacccgaaaggatgggtaaccttcgaggaagaagaggattttggtgtgaaagggaagtcaaagtcagcttgttcagacttactgggtaatcagccaagttcattttctggctccaacctgacattgaatgatgactggaataaaggtacaaatgtctccttctgtgtgttgccgtcaagaagacctcctccacctcctgtccctctgctcccgcccggcaccagccctccagtagatcctttcacgaccttggcctctaaggcttcacccacactggactttacagaaagataacgccatgcaatagaaaacagtgggtacttgcttttggcaggatagagctaagagaattgggcattagtatttcattatgtgcaataagtcattgtaagtgcactgatatcttcacaaaacaccactatttgatgtgtacagagttggactatgtgtatattggaaataaggaaaaacccttctcattgttaactggagttttgatgtatttctctttggatgaataggagacagtagtagccataaaaagtacttatactttagaaaacagtccttattcagaaacttttcggtcagtcttctgaagaatctcaaaaagcccacccaactttcagctgacatttccaccagccctctcatacttgttaacaattggtatctttgagtatttaccaaagagctgccaaggttacagtgaacagagttttgaaaggcattgctttaaaggaaaaaagtataggtatgtgtacatatataatacatacaaacacatgtacttctgtatacatttacatatttttacaattcatactttaatttctaggctataactcagaccaaattatacctaaaagttccaacaaagtccctttttcaatatcacattaccaaaaagatggctgcaaatgtaatttggacctttcattaattttgttttcaaaactagaataatctcaccacagaatcagaattttctaccgttccacacccaaccccttcaaatacacacaaccttgttacttttcactccagcaccttcatacgcttttctccaggaggaggttcttgcagctggaaacagcctattttgtggtcactgtcaagtggatggatattctagcgctcccaaaaaagcactatggccttatatgcagggaaggcacataccaccaagttcaatgagaaatattagagctaaccgtactctcttctctgcgtacgttcgagtatacgttgcccatatccctcccatattttctttttgctgcttttgctctggaactttgcttttagcagggaaagcagctgtcccctgagtgctttgaattgggaatatacccagtgtgtgttctcccccctcttacgaggctacataacacatctatgatgctgctttaagtttttagaggctatacctcaaagtagctgcggattttgtctcctgcactgccaatatgcaactgatcccgcttttattaattttttgaagaagtacacagaatttttacagaatgtagtattttgatatcattaagtaaaccaatcagaaaactccttgagcaatagttgtttctttgtcagtttcagttacaatcatctttacccattaagacttacattaacattccttttatataaagagttgtatatgtccacctaaattcctatgtccacacttaacctttaaagatgtacattgagggaatatcaaaaaatagcgttcatggctacgaatatgtagaatgttaaaagcacagcaaactgcactgcacttataaagcaaatctattagaaaaaaagcatttttctaaatgctcaaatgttatcaaaatactatatttatagaagtaatcttctctgttaacagccaagatttgctgttagaaataactcttgtgagttttatattgtgctttttggaggttctaatcatttcagcagtagcgtcttaaacagcagtattactataagcagttgcttcaaaatgtgaattaacttgttgaaactgtggctttaacatccatgtgactagtgtatatggtatttgctctccattagcaaaataattcattgttaggtaaacttcactagtgcaaattgcagatctgtgagcaatgtttcctattgaatataaactactgtctaaaatatacatatcagcagcccagcctttatcaggaaaattatacttggcaagttgctgaaaatgcacaaagttatgaaagttaaaggtatgctgcaaataactagccattattctatgtattattaaatatttactagttctgttaaaagcagagcagaagttagacactaaggatctctttgtgaactctgtgttctctatattagattgctgtttatatgtaagaattttattgcttatgtggcatacaatatttataactataaactttatagaagtacagtattaaagtcagtggtacacagacattctgtacatatcctgtgaaacgtgctgtcatatgaaataaatatatctgtcttta

SEQ ID NO: 141826 - DNA, 4852 bp, Artificial Sequence
  derived and/or modified sequence
gcggcgcaatgcggaagagatgggcctgctggagcggaagtgacgctcccggcggctgtggcggcggctgcgggagaaggaggaggaggagccggaggaagagggctgcctccgaagaaaggagaatggcgttcagtaaaggattccggatctatcacaaattggatcccccacctttcagcctcatagtggaaactaggcataaggaagaatgtctcatgttcgagtctggggctgtcgctgtgctctcatctgcagaaaaagaggcaatcaagggtacatactccaaagtactggatgcatatggactcttaggtgttctgcggttaaatcttggtgatactatgttacattatctggtcctagtcactggatgtatgtctgttggaaaaattcaagaatctgaagttttccgagttacttccactgagtttatatcactgcgaatcgattcttcagatgaggatcgcatttcagaagtgcggaaagttttgaattcaggaaacttttattttgcatggtctgcatctggcatcagtttagatttgagtcttaatgcgcatcgtagcatgcaagaacagacaactgataatagatttttctggaatcagtctttgcatttgcatctcaaacactatggcgtgaattgtgatgactggttattacgtcttatgtgtggaggagtagaaatcagaacaatttatgctgctcataaacaggcgaaggcttgcctcatttcaagattaagctgtgaacgagctgggaccaggtttaatgtccggggaacaaatgatgatggtcatgttgccaattttgtagaaacagaacaggttgtgtacttagatgactcagtttcttccttcatacaaatccgaggatctgttccattgttctgggagcaaccagggttgcaagtgggatctcatcgtgtccgtatgtcaaggggatttgaagccaatgcacctgcttttgacaggcattttagaacacttaagaacttatatggtaaacaaataatagtaaatttgcttggatctaaggaaggtgaacatatgctaagtaaagctttccagagtcatttgaaagcttctgaacatgctgctgatatccagatggtgaattttgactatcatcaaatggttaagggaggaaaggcagaaaaattacatagtgttcttaaacctcaagtccagaagtttctagattatggatttttttatttcaatggaagtgaagttcaaagatgccagagtggtacagttcgaacaaactgcttggattgtcttgatagaacaaatagtgtgcaggcatttcttggcttagagatgctagctaaacagttggaagctcttggtttagctgaaaagcctcagttggtgactcgctttcaagaagtttttcggtcaatgtggtccgtgaatggtgattcaatcagtaagatatatgcaggaactggagctcttgaagggaaagcgaagttaaaagatggtgctcgctctgttacccgaacaattcagaataacttctttgacagctccaagcaagaggccattgatgttttgctactgggaaatactctgaatagtgatttagctgacaaagctcgagcacttttaactactggaagtttgcgtgtttctgagcagacattacagtcagcatcttctaaagtactaaagagcatgtgtgagaatttctacaaatattcaaagcctaagaaaattcgagtatgtgtcggaacctggaatgtgaatggtgggaagcaatttcgcagcatagcttttaagaatcagacactcactgactggcttcttgatgcacccaagttagctggcatccaggagtttcaagataaaagaagtaagccaactgatatatttgcaattggttttgaagaaatggtagaattgaatgctggaaacattgtgagtgcaagcacaacaaatcagaagctctgggctgtagaacttcagaagacaatctccagagacaacaagtatgtgctgctggcttctgaacagttggtgggcgtctgtttgtttgtttttatcagaccacagcatgctccttttatcagggatgttgcagttgatactgtgaagactggaatgggaggtgcaactggaaataagggagcagttgcaatccgaatgctcttccatacaaccagcctttgcttcgtctgtagccactttgctgcagggcagtcacaagtcaaagaaagaaatgaagattttatagaaatagcacgaaaattgagttttcctatgggaaggatgctattttcccatgactatgtattttggtgtggtgatttcaactatcgaatcgatctccctaacgaagaagttaaagagctcataagacagcaaaattgggattctcttatagcaggagatcaacttatcaatcagaaaaatgctggacaggtttttagaggatttttagaaggaaaggtaacctttgctccgacatataagtatgacttgttttctgacgactatgacaccagtgaaaagtgccgcacccctgcctggacagaccgtgtcctttggagaaggaggaaatggccttttgatagatcagctgaagatctagatcttctaaatgctagttttcaagatgaaagcaaaattctgtacacgtggactccaggcactttgctgcactatggaagagctgagctgaagacttctgaccacaggcctgtcgttgccctgattgatatagatatatttgaagttgaagctgaagagaggcaaaacatttataaagaagtaattgcagttcagggtccaccagatggtacagtattggtctcaatcaaaagttctttaccagaaaataatttttttgatgatgccttgattgatgagcttctgcagcagtttgcaagttttggtgaagttatacttataagatttgtagaagataaaatgtgggttacatttttggagggaagctctgccttgaatgttctgagcctaaatggtaaagagttattgaatcggactataactattgctttaaaaagtccagactggatcaaaaatttggaagaagaaatgagtttagagaaaattagcattgcattgccatcatcaacaagctctaccctgcttggtgaagatgcagaggttgcagcagattttgatatggaaggtgatgttgatgactatagtgctgaagtggaggaacttcttcctcagcatctccagccatcttcaagttccggccttggtacttcccccagctcttcaccccgaactagtccctgccagtcacctacaatatcagagggtcctgtaccttcccttcccatcagaccaagccgagcaccgtcaagaactcctgggcctcccagtgcacagagttctcctattgacgcgcagccagcaacgccgctgccgcagaaagaccccgcccagcccttggagcccaagcggccgccgccgccccgcccggtcgcccctcccacacgcccggctcccccacagagacctcctccgccttcaggggctaggagtcctgcacccactagaaaggaatttggaggtattggagcccctcccagtcctggggtagctaggagagagatggaagcacccaaaagccctggaacaacaaggaaagataatataggacgcagtcagccttcacctcaagcaggacttgcaggcccaggacctgctggatacagtacagccagaccgacgattcctcctcgtgctggagttatcagtgccccacagagccacgcgcgggcatctgctggaagactgactcctgaaagccaaagcaaaacatcagaaacgtcgaaaggttcaactttccttcctgaaccactgaagcctcaggctgcttttcctccgcagtcttctttgcccccgcctgctcaaaggttgcaagagcctcttgtccctgtggcagcacctatgcctcagtctggcccccagccaaatttggaaaccccaccacaaccaccacctcgaagcaggtcatcccatagcttgccttcagaagcttcctcacaaccgcaagtaaaaacaaatggaatctctgatggcaaaagagaatcaccattaaagattgacccatttgaagatctgtcatttaatctgcttgctgtatcaaaggctcagctatctgttcaaacgtcacctgttcccaccccagacccaaagaggttgattcagttgccttctgcaacgcaaagtaatgttttgagttctgtaagttgcatgccaacaatgcctccaattccagctcggagtcaatcccaggaaaatatgcgaagttctccaaacccatttattactggcttgaccaggacaaatcctttcagtgacaggactgctgctcctggaaacccatttagagccaagtctgaagaatcagaggcaacttcatggttctccaaagaagagcccgttactatcagtcctttcccttctctgcagcctcttggtcataacaaaagcagggcttcatcttcacttgatggctttaaggacagttttgatctacagggccagtctacattaaaaattagcaacccgaaaggatgggtaaccttcgaggaagaagaggattttggtgtgaaagggaagtcaaagtcagcttgttcagacttactgggtaatcagccaagttcattttctggctccaacctgacattgaatgatgactggaataaaggtacaaatgtctccttctgtgtgttgccgtcaagaagacctcctccacctcctgtccctctgctcccgcccggcaccagccctccagtagatcctttcacgaccttggcctctaaggcttcacccacactggactttacagaaagataacgcca

SEQ ID NO: 141827 - protein, 418 aa, Artificial Sequence
  derived and/or modified sequence
MRTKAAGCAERRPLQPRTEAAAAPAGRAMPSEYTYVKLRSDCSRPSLQWYTRAQSKMRRPSLLLKDILKCTLLVFGVWILYILKLNYTTEECDMKKMHYVDPDHVKRAQKYAQQVLQKECRPKFAKTSMALLFEHRYSVDLLPFVQKAPKDSEAESKYDPPFGFRKFSSKVQTLLELLPEHDLPEHLKAKTCRRCVVIGSGGILHGLELGHTLNQFDVVIRLNSAPVEGYSEHVGNKTTIRMTYPEGAPLSDLEYYSNDLFVAVLFKSVDFNWLQAMVKKETLPFWVRLFFWKQVAEKIPLQPKHFRILNPVIIKETAFDILQYSEPQSRFWGRDKNVPTIGVIAVVLATHLCDEVSLAGFGYDLNQPRTPLHYFDSQCMAAMNFQTMHNVTTETKFLLKLVKEGVVKDLSGGIDREF

SEQ ID NO: 141828 - protein, 123 aa, Artificial Sequence
  derived and/or modified sequence
MYEIAAPNVAFMTLRSMCNTSKMVTCAKIFFYFLVFFSLSQNVPTIGVIAVVLATHLCDEVSLAGFGYDLNQPRTPLHYFDSQCMAAMNFQTMHNVTTETKFLLKLVKEGVVKDLSGGIDREF

SEQ ID NO: 141829 - protein, 390 aa, Artificial Sequence
  derived and/or modified sequence
MPSEYTYVKLRSDCSRPSLQWYTRAQSKMRRPSLLLKDILKCTLLVFGVWILYILKLNYTTEECDMKKMHYVDPDHVKRAQKYAQQVLQKECRPKFAKTSMALLFEHRYSVDLLPFVQKAPKDSEAESKYDPPFGFRKFSSKVQTLLELLPEHDLPEHLKAKTCRRCVVIGSGGILHGLELGHTLNQFDVVIRLNSAPVEGYSEHVGNKTTIRMTYPEGAPLSDLEYYSNDLFVAVLFKSVDFNWLQAMVKKETLPFWVRLFFWKQVAEKIPLQPKHFRILNPVIIKETAFDILQYSEPQSRFWGRDKNVPTIGVIAVVLATHLCDEVSLAGFGYDLNQPRTPLHYFDSQCMAAMNFQTMHNVTTETKFLLKLVKEGVVKDLSGGIDREF

SEQ ID NO: 141830 - DNA, 1257 bp, Artificial Sequence
  derived and/or modified sequence
atgagaaccaaggccgccggctgcgccgagagaagacccctgcagcccagaaccgaggccgccgccgcccccgccggcagagccatgcccagcgagtacacctacgtgaagctgagaagcgactgcagcagacccagcctgcagtggtacaccagagcccagagcaagatgagaagacccagcctgctgctgaaggacatcctgaagtgcaccctgctggtgttcggcgtgtggatcctgtacatcctgaagctgaactacaccaccgaggagtgcgacatgaagaagatgcactacgtggaccccgaccacgtgaagagagcccagaagtacgcccagcaggtgctgcagaaggagtgcagacccaagttcgccaagaccagcatggccctgctgttcgagcacagatacagcgtggacctgctgcccttcgtgcagaaggcccccaaggacagcgaggccgagagcaagtacgacccccccttcggcttcagaaagttcagcagcaaggtgcagaccctgctggagctgctgcccgagcacgacctgcccgagcacctgaaggccaagacctgcagaagatgcgtggtgatcggcagcggcggcatcctgcacggcctggagctgggccacaccctgaaccagttcgacgtggtgatcagactgaacagcgcccccgtggagggctacagcgagcacgtgggcaacaagaccaccatcagaatgacctaccccgagggcgcccccctgagcgacctggagtactacagcaacgacctgttcgtggccgtgctgttcaagagcgtggacttcaactggctgcaggccatggtgaagaaggagaccctgcccttctgggtgagactgttcttctggaagcaggtggccgagaagatccccctgcagcccaagcacttcagaatcctgaaccccgtgatcatcaaggagaccgccttcgacatcctgcagtacagcgagccccagagcagattctggggcagagacaagaacgtgcccaccatcggcgtgatcgccgtggtgctggccacccacctgtgcgacgaggtgagcctggccggcttcggctacgacctgaaccagcccagaacccccctgcactacttcgacagccagtgcatggccgccatgaacttccagaccatgcacaacgtgaccaccgagaccaagttcctgctgaagctggtgaaggagggcgtggtgaaggacctgagcggcggcatcgacagagagttctag

SEQ ID NO: 141831 - DNA, 1257 bp, Artificial Sequence
  derived and/or modified sequence
atgagaactaaggctgccggatgcgccgaaaggcgtcccttacagccgcggaccgaagccgccgctgctccggcagggcgggccatgccctcggagtacacatatgtaaaattgaggtccgattgctcgcggccttctctgcagtggtacacacgggctcagagtaaaatgcgccgacctagcctgctcttgaaagatatcttaaaatgtacccttttggtgttcggcgtttggatactgtatattcttaaactgaattacaccacagaagagtgcgatatgaagaaaatgcattatgttgacccagatcatgtcaagcgcgcccagaagtatgcccagcaggtactccaaaaggagtgtcgcccaaagttcgccaagacatccatggctctgttgtttgaacatcggtattccgtggacctcttgccatttgtccagaaggctcctaaggattctgaggccgagtccaagtacgaccctccattcgggttccgaaaattcagctccaaggtgcagacgttactcgagcttttacctgagcacgacctgcccgaacaccttaaggctaaaacatgtaggcgctgcgtggtgattggcagtggcggcatcctgcacggccttgaactgggccatacattgaaccagttcgacgtcgtgatccgtttgaactcagccccggtcgaagggtactcggagcacgtgggtaataagactactatcaggatgacctacccagaaggcgctccgctgagcgatttggagtattattccaatgatctgtttgtcgcagtgcttttcaagagcgttgatttcaattggctccaggctatggttaaaaaggaaaccctccccttctgggtgagattgtttttttggaagcaggtagccgagaaaataccactgcaacctaagcacttcagaattctcaatcctgttattatcaaagaaacagcattcgatatcctccaatattctgagccacagagcaggttttggggaagggataagaatgttccaacaataggagtgattgccgtggtgttagccactcacctgtgcgacgaagtgtcccttgccggtttcggttacgatctgaatcagccccgtaccccactgcattatttcgacagtcagtgcatggcagccatgaattttcagaccatgcacaatgtgactacggagacgaagttcctcctcaagctggtgaaagaaggagtggtcaaggacctcagcggaggaatcgacagagaattttag

SEQ ID NO: 141832 - DNA, 1257 bp, Artificial Sequence
  derived and/or modified sequence
atgaggaccaaggccgccggctgtgccgagcggcggcccctgcagcccaggacagaggccgccgccgccccagctggccgggccatgcccagcgagtacacctacgtgaagctgcggagtgactgcagccggcccagcctgcagtggtacacccgggcccagagcaagatgaggcggcccagcctgctgctgaaggacatcctgaagtgcaccctgctggtgtttggagtgtggatcctgtacatcctgaagctgaactacaccacagaagaatgtgacatgaagaagatgcactacgtggaccctgaccacgtgaagagggcccagaagtatgcccagcaggtgctgcagaaggaatgtcggcccaagtttgccaagacctccatggccctgctgtttgagcaccgctacagcgtggacctgctgccctttgtgcagaaggcccccaaggacagcgaggccgagagcaaatatgacccccccttcggcttcaggaagttcagcagcaaggtgcagaccctgctggagctgctgcctgagcatgacctgcctgagcacctgaaggccaagacctgcagaagatgtgtggtgattggcagcggcggcatcctgcacggcctggagctgggccacaccctgaaccagtttgatgtggtgatccggctgaacagcgcccctgtggagggctacagcgagcacgtgggcaacaagaccaccatccgcatgacctacccagagggcgcccccctgagtgacctggagtactacagcaatgacctgtttgtggccgtgctcttcaagtctgtggacttcaactggctgcaggccatggtgaagaaggagaccctgcccttctgggtgcggctcttcttctggaagcaggtggccgagaagatccccctgcagcccaagcacttccgcatcctgaaccctgtgatcatcaaggagacagcctttgacatcctgcagtacagcgagccccagagccgcttctggggccgggacaagaatgtgcccaccatcggcgtgattgctgtggtgctggccacccacctgtgtgatgaggtgtccctggccggcttcggctatgacctgaaccagcccaggacccccctgcactactttgacagccagtgcatggccgccatgaacttccagaccatgcacaacgtgaccacagagaccaagttcctgctgaagctggtgaaggagggcgtggtgaaggacctgagcggcggcatcgaccgggagttctag

SEQ ID NO: 141833 - DNA, 1257 bp, Artificial Sequence
  derived and/or modified sequence
atgcggaccaaggccgccggctgcgccgagcggcggcccctgcagccaagaactgaagctgctgccgccccggcaggcagggctatgccttctgagtatacgtacgttaaactgcgtagtgactgttcccggccgtccctgcagtggtacacgcgagctcagtcaaagatgcgaagaccatcactgctactaaaagacatcctaaagtgcacgctgctcgtgttcggagtgtggattctgtacattctgaagctcaactacacaaccgaagagtgcgacatgaaaaagatgcactatgtagacccggatcacgtgaaacgagcgcagaagtacgctcagcaggttctgcagaaggaatgtaggcctaagttcgctaagacatccatggccttattattcgaacatcggtacagtgtggatctgttgccattcgtgcagaaagcccccaaggactctgaggccgagtcaaagtacgatcccccctttggctttagaaaatttagtagtaaggtgcagaccctcctggaactcctgcctgagcatgacctgccagaacatctgaaggcaaaaacctgcagaagatgtgtagtgattgggagtggtggcatccttcatggactggagcttggccatacgcttaaccaattcgacgtcgtgattcgtctgaatagtgcccccgtggagggatatagcgagcacgtggggaacaaaactactattcgtatgacttaccccgaaggagcccctctctccgatctcgagtattactcaaacgatctcttcgtcgccgtcctgttcaagagtgtggactttaattggctgcaggcaatggtgaaaaaggagactcttccattctgggtgaggcttttcttctggaaacaagtcgctgaaaagattcccctccaacccaaacacttccgtattctcaatccagtaatcatcaaagaaaccgctttcgacatacttcaatactcagagcctcagtcacgattttgggggcgtgacaagaatgtacctaccattggcgtgattgccgtagttctcgccacacacctgtgtgatgaggtttcactcgctggctttggatatgacctgaatcagccccggactcctcttcattattttgactcccaatgcatggccgcaatgaatttccagactatgcataatgtcactaccgaaactaaatttctgctaaagctggtgaaggagggcgtagttaaagatctgagcggcggaattgatagagagttctag

SEQ ID NO: 141834 - DNA, 1257 bp, Artificial Sequence
  derived and/or modified sequence
atgcgcaccaaggcggcaggctgtgctgagcggcgacctctccaaccgcgaactgaggcggcagctgcccctgccggtcgtgcgatgccctcagagtatacttatgtgaaactgaggtccgactgtagcaggccctcacttcagtggtatactcgagcgcagagcaagatgcgccgtccatcccttctgctgaaggatatccttaaatgcaccttactggtgttcggggtctggatcctctacatactcaaactcaattacacaaccgaagagtgtgacatgaaaaagatgcattatgttgaccctgatcatgtgaagagagcccaaaaatacgcccagcaggtcctccaaaaggagtgtaggcctaagttcgcaaaaaccagcatggcacttctgttcgagcacaggtactcagtggaccttttaccgttcgtccagaaagcacctaaagactctgaagccgagagcaagtacgatccaccttttggattcaggaaattcagcagcaaagtgcagaccctgctggagttgctccctgagcacgacctgcccgaacatttgaaagccaagacttgccgcaggtgcgttgtgatcggtagcggtgggatactccatggtttagagttggggcatacactgaaccagtttgatgttgttatccggctcaatagcgcacccgtggagggatactccgaacatgttggaaacaagacaaccatcagaatgacctaccccgagggggcacctctgtccgacctggaatactacagcaacgacctctttgtagcggtactcttcaagagcgttgacttcaactggcttcaggccatggttaagaaggagaccctgccattttgggtgaggctcttcttctggaagcaggtggccgaaaagattcccttgcaacctaaacacttcagaattcttaaccctgtgattattaaggagacagcatttgacattctgcagtactccgagcctcagtcccgattctgggggcgtgacaagaacgttccaacaatcggagtgatcgcagtcgtcctggctacccatctgtgtgacgaagtcagtctcgccggtttcgggtatgatctgaatcaaccccgtacccctctgcattacttcgatagccaatgtatggctgcaatgaatttccaaacaatgcataatgtgacaactgaaactaaattcctactgaaattagttaaagaaggcgtggtaaaagacctgagtggcggtatcgacagggaattctag

SEQ ID NO: 141835 - DNA, 2366 bp, Artificial Sequence
  derived and/or modified sequence
ctgagcgggggagcggcggcccccagctgaatgggcgcgagagcggcgctgggggcgggtgggggcgcggggtaccgggctggcggccggccggcgccccctcattagtatgcggacgaaggcggcgggctgcgcggagcggcgtcccctgcagccgcggaccgaggcagcggcggcacctgccggccgagcaatgccaagtgagtacacctatgtgaaactgagaagtgattgctcgaggccttccctgcaatggtacacccgagctcaaagcaagatgagaaggcccagcttgttattaaaagacatcctcaaatgtacattgcttgtgtttggagtgtggatcctttatatcctcaagttaaattatactactgaagaatgtgacatgaaaaaaatgcattatgtggaccctgaccatgtaaagagagctcagaaatatgctcagcaagtcttgcagaaggaatgtcgtcccaagtttgccaagacatcaatggcgctgttatttgagcacaggtatagcgtggacttactcccttttgtgcagaaggcccccaaagacagtgaagctgagtccaagtacgatcctccttttgggttccggaagttctccagtaaagtccagaccctcttggaactcttgccagagcacgacctccctgaacacttgaaagccaagacctgtcggcgctgtgtggttattggaagcggaggaatactgcacggattagaactgggccacaccctgaaccagttcgatgttgtgataaggttaaacagtgcaccagttgagggatattcagaacatgttggaaataaaactactataaggatgacttatccagagggcgcaccactgtctgaccttgaatattattccaatgacttatttgttgctgttttatttaagagtgttgatttcaactggcttcaagcaatggtaaaaaaggaaaccctgccattctgggtacgactcttcttttggaagcaggtggcagaaaaaatcccactgcagccaaaacatttcaggattttgaatccagttatcatcaaagagactgcctttgacatccttcagtactcagagcctcagtcaaggttctggggccgagataagaacgtccccacaatcggtgtcattgccgttgtcttagccacacatctgtgcgatgaagtcagtttggcgggttttggatatgacctcaatcaacccagaacacctttgcactacttcgacagtcaatgcatggctgctatgaactttcagaccatgcataatgtgacaacggaaaccaagttcctcttaaagctggtcaaagagggagtggtgaaagatctcagtggaggcattgatcgtgaattttgaacacagaaaacctcagttgaaaatgcaactctaactctgagagctgtttttgacagccttcttgatgtatttctccatcctgcagatactttgaagtgcagctcatgtttttaacttttaatttaaaaacacaaaaaaaattttagctcttcccactttttttttcctatttatttgaggtcagtgtttgtttttgcacaccattttgtaaatgaaacttaagaattgaattggaaagacttctcaaagagaattgtatgtaacgatgttgtattgatttttaagaaagtaatttaatttgtaaaacttctgctcgtttacactgcacattgaatacaggtaactaattggaaggagaggggaggtcactcttttgatggtggccctgaacctcattctggttccctgctgcgctgcttggtgtgacccacggaggatccactcccaggatgacgtgctccgtagctctgctgctgatactgggtctgcgatgcagcggcgtgaggcctgggctggttggagaaggtcacaacccttctctgttggtctgccttctgctgaaagactcgagaaccaaccagggaagctgtcctggaggtccctggtcggagagggacatagaatctgtgacctctgacaactgtgaagccaccctgggctacagaaaccacagtcttcccagcaattattacaattcttgaattccttggggattttttactgccctttcaaagcacttaagtgttagatctaacgtgttccagtgtctgtctgaggtgacttaaaaaatcagaacaaaacttctattatccagagtcatgggagagtacaccctttccaggaataatgttttgggaaacactgaaatgaaatcttcccagtattataaattgtgtatttaaaaaaaagaaacttttctgaatgcctacctggcggtgtataccaggcagtgtgccagtttaaaaagatgaaaaagaataaaaacttttgaggaactctc

SEQ ID NO: 141836 - DNA, 2318 bp, Artificial Sequence
  derived and/or modified sequence
tgcgagagcatataaccagcatgtcttgagtcttttacccatgtgcctgttatatggatgctgctgtttttgtaagatgaaatgacccttggatattctgggttatgatcagcatttcttcgtctaggcgagaaaagaaacagcaatgccaagtgagtacacctatgtgaaactgagaagtgattgctcgaggccttccctgcaatggtacacccgagctcaaagcaagatgagaaggcccagcttgttattaaaagacatcctcaaatgtacattgcttgtgtttggagtgtggatcctttatatcctcaagttaaattatactactgaagaatgtgacatgaaaaaaatgcattatgtggaccctgaccatgtaaagagagctcagaaatatgctcagcaagtcttgcagaaggaatgtcgtcccaagtttgccaagacatcaatggcgctgttatttgagcacaggtatagcgtggacttactcccttttgtgcagaaggcccccaaagacagtgaagctgagtccaagtacgatcctccttttgggttccggaagttctccagtaaagtccagaccctcttggaactcttgccagagcacgacctccctgaacacttgaaagccaagacctgtcggcgctgtgtggttattggaagcggaggaatactgcacggattagaactgggccacaccctgaaccagttcgatgttgtgataaggttaaacagtgcaccagttgagggatattcagaacatgttggaaataaaactactataaggatgacttatccagagggcgcaccactgtctgaccttgaatattattccaatgacttatttgttgctgttttatttaagagtgttgatttcaactggcttcaagcaatggtaaaaaaggaaaccctgccattctgggtacgactcttcttttggaagcaggtggcagaaaaaatcccactgcagccaaaacatttcaggattttgaatccagttatcatcaaagagactgcctttgacatccttcagtactcagagcctcagtcaaggttctggggccgagataagaacgtccccacaatcggtgtcattgccgttgtcttagccacacatctgtgcgatgaagtcagtttggcgggttttggatatgacctcaatcaacccagaacacctttgcactacttcgacagtcaatgcatggctgctatgaactttcagaccatgcataatgtgacaacggaaaccaagttcctcttaaagctggtcaaagagggagtggtgaaagatctcagtggaggcattgatcgtgaattttgaacacagaaaacctcagttgaaaatgcaactctaactctgagagctgtttttgacagccttcttgatgtatttctccatcctgcagatactttgaagtgcagctcatgtttttaacttttaatttaaaaacacaaaaaaaattttagctcttcccactttttttttcctatttatttgaggtcagtgtttgtttttgcacaccattttgtaaatgaaacttaagaattgaattggaaagacttctcaaagagaattgtatgtaacgatgttgtattgatttttaagaaagtaatttaatttgtaaaacttctgctcgtttacactgcacattgaatacaggtaactaattggaaggagaggggaggtcactcttttgatggtggccctgaacctcattctggttccctgctgcgctgcttggtgtgacccacggaggatccactcccaggatgacgtgctccgtagctctgctgctgatactgggtctgcgatgcagcggcgtgaggcctgggctggttggagaaggtcacaacccttctctgttggtctgccttctgctgaaagactcgagaaccaaccagggaagctgtcctggaggtccctggtcggagagggacatagaatctgtgacctctgacaactgtgaagccaccctgggctacagaaaccacagtcttcccagcaattattacaattcttgaattccttggggattttttactgccctttcaaagcacttaagtgttagatctaacgtgttccagtgtctgtctgaggtgacttaaaaaatcagaacaaaacttctattatccagagtcatgggagagtacaccctttccaggaataatgttttgggaaacactgaaatgaaatcttcccagtattataaattgtgtatttaaaaaaaagaaacttttctgaatgcctacctggcggtgtataccaggcagtgtgccagtttaaaaagatgaaaaagaataaaaacttttgaggaactctc

SEQ ID NO: 141837 - protein, 156 aa, Artificial Sequence
  derived and/or modified sequence
MCHSRSCHPTMTILQAPTPAPSTIPGPRRGSGPEIFTFDPLPEPAAAPAGRPSASRGHRKRSRRVLYPRVVRRQLPVEEPNPAKRLLFLLLTIVFCQILMAEEGVPAPLPPEDAPNAASLAPTPVSAVLEPFNLTSEPSDYALDLSTFLQQHPAAF

SEQ ID NO: 141838 - protein, 138 aa, Artificial Sequence
  derived and/or modified sequence
MCHSRSCHPTMTILQAPTPAPSTIPGPRRGSGPEIFTFDPLPEPAAAPAGRPSASRGHRKRSRRVLYPRVVSIAEVGIRGVRCPGVTGERPDSRGLDLTCLLFCLPLGPAPAASRGTEPSQKASLSAAHHRLLPDPDG

SEQ ID NO: 141839 - protein, 192 aa, Artificial Sequence
  derived and/or modified sequence
MCHSRSCHPTMTILQAPTPAPSTIPGPRRGSGPEIFTFDPLPEPAAAPAGRPSASRGHRKRSRRVLPSSGEYRRSGHSRGALPWSHWGTTRLQGLDLTCLLFCLPLVRRQLPVEEPNPAKRLLFLLLTIVFCQILMAEEGVPAPLPPEDAPNAASLAPTPVSAVLEPFNLTSEPSDYALDLSTFLQQHPAAF

SEQ ID NO: 141840 - protein, 156 aa, Artificial Sequence
  derived and/or modified sequence
MCHSRSCHPTMTILQAPTPAPSTIPGPRRGSGPEIFTFDPLPEPAAAPAGRPSASRGHRKRSRRVLYPRVVRRQLPVEEPNPAKRLLFLLLTIVFCQILMAEEGVPAPLPPEDAPNAASLAPTPVSPVLEPFNLTSEPSDYALDLSTFLQQHPAAF

SEQ ID NO: 141841 - DNA, 471 bp, Artificial Sequence
  derived and/or modified sequence
atgtgccactcgaggtcttgccacccaacaatgactattctgcaggcccctaccccagccccgagtacaattccagggccaagaagaggcagcggcccggagatcttcacctttgaccctctacctgagcccgccgccgcgcctgccggcaggccttcggcttctcgagggcatcgcaaacgctcccggcgggtgctgtaccctagagtggtcaggcggcagctgcctgtagaggaacccaatcctgcgaaacgtttactgttccttctgctcacaatcgtgttttgtcagatcctgatggccgaggaaggggttcccgcccctttgcccccagaagacgcgccaaacgcagcctccctggccccgacacccgtgtcagcagtactcgagccattcaatctcacaagtgagcctagcgactatgccctggacctctccacgtttctgcaacaacatcccgcagcattctag

SEQ ID NO: 141842 - DNA, 417 bp, Artificial Sequence
  derived and/or modified sequence
atgtgtcatagtaggagttgccacccaacgatgaccatcctgcaagcaccaacgcctgcgcctagcactatccccggccctaggcggggctcaggacccgagatatttacgttcgacccactccccgagccagctgccgctcctgccgggcggccttccgccagtagggggcacagaaagaggagtcgccgcgtcctctacccacgagttgtgagtatagccgaggtggggatccgaggagtgcgttgcccaggggtgactggggagagacctgattccagaggcctggacctaacttgtctgctcttttgtctgccattggggcccgctcccgcagctagtcggggtaccgagccgtcacagaaagcctctctgtctgccgcccaccacagactccttcctgaccctgacgggtag

SEQ ID NO: 141843 - DNA, 579 bp, Artificial Sequence
  derived and/or modified sequence
atgtgccacagtcgtagttgtcacccaacaatgacaatcttgcaggcacccacccccgccccgtcaacaattccaggaccacgaagaggcagtggccctgagatattcacctttgaccccctccctgagcctgccgctgctcccgctggtcgtcccagtgcgtctcgcggacacaggaaacggtctaggcgagtgctaccttctagcggcgaatacaggcgttcgggccacagccggggagccctcccctggagtcactggggtacgacacgtctacagggtctggacctgacttgtttattattttgcctgcccctggtgcgtcgacagttaccagtcgaagagcctaaccccgcaaagaggctgctgttcctcctgctcacaatcgtattctgccagatcctcatggcagaggagggagtgccggctcctttacctccagaggacgctccaaatgcggcctcactggccccaacaccagtgtcagccgtgctggaaccatttaatttgacttcagaaccaagcgattacgccctggatttgtcaacatttctgcagcagcatcctgctgcgttttag

SEQ ID NO: 141844 - DNA, 471 bp, Artificial Sequence
  derived and/or modified sequence
atgtgccactcgagatcctgtcatccaacaatgacaattctgcaggctccaacccccgctccaagtaccattcctgggccgcggagaggcagtggacccgagatctttactttcgatcctcttcccgagccggccgcggctcccgccgggagaccatctgcctcccgggggcacaggaagagatctcgcagagtgttgtacccacgcgttgtccgccggcaactgccagtggaagagcccaatcctgccaaacgactcctctttcttctcttaaccatcgtcttttgccagatacttatggccgaagaaggggtccctgcccccctgccacccgaggacgctcccaacgctgcgagcctagctcctaccccggtgagccccgtattggaacctttcaatcttacatccgagccatctgattacgcgctagatttgtccaccttcctgcagcaacacccggctgcattttag

SEQ ID NO: 141845 - DNA, 417 bp, Artificial Sequence
  derived and/or modified sequence
atgtgccacagcaggtcttgtcaccccacaatgacaatcctgcaggccccaacccctgcaccatcaactatcccaggtccccgacggggttcggggcctgagattttcacattcgatccgttgccggagcccgccgccgctccagccggccgcccctcagcctcacgcggacacaggaaaaggtcacgacgtgtgctctatccccgggtcgttagcatagccgaggtgggaatacggggggtgcgttgccctggggtcacaggagagcgaccagactcccgcgggcttgaccttacgtgtctgctgttttgtctcccactgggccccgctcctgcagctagccgaggaacagagcccagccagaaagcttccctctcagcagcacaccatcgcctgctacctgacccagacgggtag

SEQ ID NO: 141846 - DNA, 417 bp, Artificial Sequence
  derived and/or modified sequence
atgtgtcatagtcgcagctgccaccctaccatgacaattctccaggctcccacccctgcacctagcacaataccaggccctagacgcggctctgggcctgaaattttcacatttgatcctctgccagagccagcagcggctcccgctggaagaccctccgcaagcagaggacacaggaagcggtccaggcgtgtgctttaccctcgcgtcgtttccatagctgaagtggggattagaggggtcaggtgccctggcgtcacgggcgaacgccccgactctcggggactggacctgacatgcttgcttttttgccttcctctgggacctgctcccgccgcttctaggggtaccgagccgtcccagaaagcctctttgagcgcagcacatcaccgcctcctgcctgacccggacggatag

SEQ ID NO: 141847 - DNA, 471 bp, Artificial Sequence
  derived and/or modified sequence
atgtgtcactctagatcttgccaccccaccatgactatcctgcaggccccaacacctgctcccagcacaatcccagggccacgccgcggctctggccccgagatcttcacttttgaccccctcccggaacctgccgctgctcctgcaggccggcccagtgcatctagagggcatcggaaacggagcaggagggtgctctatcctagggttgtgcgtaggcaactgccagtggaggaacctaaccccgccaaacgcctgctctttctattgctgacaattgttttttgccagatcctgatggccgaggaaggagtccccgcgcctctgccgcctgaggatgcccccaacgctgcttccctggcaccaaccccagtgtcacccgtgctggaacctttcaatctcacctctgagccttctgattacgccctggatctctccacgttcctgcagcaacaccccgcagctttttag

SEQ ID NO: 141848 - DNA, 417 bp, Artificial Sequence
  derived and/or modified sequence
atgtgtcatagtcgcagttgtcacccgaccatgacgatcctgcaggctcctacacctgcaccctctacaatccctggtcctcggagaggtagcggccccgagatcttcactttcgacccccttcctgagcccgctgctgcccccgctggacgtccttctgcgagtagagggcaccgcaaacgcagtaggcgcgtgctttatcctagggtagtgtccatcgcagaagtaggcattagaggcgtcaggtgtcccggcgtgactggggagcggcccgattcgagaggcctggatctgacctgcttgctgttttgcctgccgctgggccctgctcccgcagcaagcagaggtacagagccctcacagaaggcctctctgtcagctgctcatcaccgcctgttgcctgatcccgacggctag

SEQ ID NO: 141849 - DNA, 471 bp, Artificial Sequence
  derived and/or modified sequence
atgtgccactctcgcagctgccatcccacaatgacaatcttgcaggctcctacaccggcacccagcacaattcctggccctagaagaggctccggccccgaaatctttactttcgacccactccccgagcctgcagccgctcctgccggcaggccctcagcttctagaggacacagaaagcgctcccggagagttttgtaccccagggtggtccggcgccagctgccagtagaagagcctaatcccgctaagcgcctcctgtttctgctccttaccatcgttttttgtcaaattctgatggcagaggagggggtcccggcgccactacccccggaggatgccccaaacgccgcctccctagcaccgacaccagtgagccctgtcctggaacctttcaatcttaccagcgagcccagcgattatgccctggatctgtcgacatttttgcaacagcacccggcagcgttctag

SEQ ID NO: 141850 - DNA, 417 bp, Artificial Sequence
  derived and/or modified sequence
atgtgccatagccgctcttgccatcccacaatgactattctacaggctccaacacccgccccttccacaatccccggtcctagaagaggaagcggccctgagatcttcacttttgacccacttcctgagcctgctgccgctccagcgggtcggccctctgcttcacgcggccataggaaacgttcccgcagagtgctgtaccccagagtggtgtcgatcgcagaagtggggatccgaggtgtgagatgcccgggagttaccggggaacgcccagattccagaggtctggacctgacttgtctgctgttctgtttgcctttgggtccagcccccgctgcaagtagaggaactgagccaagccagaaggcatctctgtcagccgcacaccatcgtctgcttccggatccggatggctag

SEQ ID NO: 141851 - DNA, 471 bp, Artificial Sequence
  derived and/or modified sequence
atgtgccatagcagaagctgtcatccgacgatgacaattctgcaggctcctacaccagccccctccaccatccccgggcctaggcggggctccggacctgaaatcttcactttcgacccgctgccagagcctgcagctgctcctgccggcagaccttccgcctcacggggccacagaaagcgaagccgcagggttctttatccccgggtggttaggaggcagctcccagtggaggagccaaatccagctaagagactgctctttcttctgctgaccatcgttttttgccaaatactgatggccgaggagggagttccagcaccactcccacctgaagacgccccaaacgccgcctctctggcacctacaccggtgagcccggtattagaaccatttaatctcacctcggagcctagtgattatgcgctggatctgagcacttttctccagcagcaccctgcagccttttag

SEQ ID NO: 141852 - DNA, 417 bp, Artificial Sequence
  derived and/or modified sequence
atgtgtcacagtaggagttgccaccccaccatgaccattctgcaggccccgaccccagcaccaagcacaatcccaggtccccgccgaggatctggaccagaaatattcactttcgatccattaccagagccagctgcagctccagccggtcgccccagcgctagtcggggccatcggaaacgaagtcgccgcgtcctgtatccacgggtggtctcgatcgcagaagtaggaatccgcggggtcagatgtccaggggtgacgggcgagcgccctgacagcagagggttggacctgacatgcctgcttttttgtctccccctcggcccagccccggctgcaagtcgcgggacagagcctagtcaaaaagctagcctatcagcagcacatcacagactcctgcctgaccccgacgggtag

SEQ ID NO: 141853 - DNA, 471 bp, Artificial Sequence
  derived and/or modified sequence
atgtgtcacagccgcagttgtcatcctaccatgaccattcttcaggcacccacaccagcccccagcacaatccccgggcctcggcgcggctccgggcctgagattttcacctttgaccctctgcctgaacccgcggccgcacccgcaggccggccttctgcaagccgcggacaccgcaagcggtccaggcgtgttttataccccagggtggtgcgcagacagctgcctgtagaggagcctaaccccgccaagcgccttctttttctgttgctgaccatcgttttctgccagatcctcatggcagaggaaggcgtgcccgccccactgccccctgaagacgctcccaacgcagcgagcctggccccaacccctgtaagccccgtcctggagccattcaatctgacctccgagccatctgactatgccctcgatctgtccaccttccttcagcagcatccagccgccttttag

SEQ ID NO: 141854 - DNA, 1244 bp, Artificial Sequence
  derived and/or modified sequence
gaccctcacttggccttacactccgctcggctcaccatgtgtcactctcgcagctgccacccgaccatgaccatcctgcaggccccgaccccggccccctccaccatcccgggaccccggcggggctccggtcctgagatcttcaccttcgaccctctcccggagcccgcagcggcccctgccgggcgccccagcgcctctcgcgggcaccgaaagcgcagccgcagggttctctaccctcgagtggtccggcgccagctgccagtcgaggaaccgaacccagccaaaaggcttctctttctgctgctcaccatcgtcttctgccagatcctgatggctgaagagggtgtgccggcgcccctgcctccagaggacgcccctaacgccgcatccctggcgcccacccctgtgtccgccgtcctcgagccctttaatctgacttcggagccctcggactacgctctggacctcagcactttcctccagcaacacccggccgccttctaactgtgactccccgcactccccaaaaagaatccgaaaaaccacaaagaaacaccaggcgtacctggtgcgcgagagcgtatccccaactgggacttccgaggcaacttgaactcagaacactacagcggagacgccacccggtgcttgaggcgggaccgaggcgcacagagaccgaggcgcatagagaccgaggcacagcccagctggggctaggcccggtgggaaggagagcgtcgttaatttatttcttattgctcctaattaatatttatatgtatttatgtacgtcctcctaggtgatggagatgtgtacgtaatatttattttaacttatgcaagggtgtgagatgttccccctgctgtaaatgcaggtctcttggtatttattgagctttgtgggactggtggaagcaggacacctggaactgcggcaaagtaggagaagaaatggggaggactcgggtgggggaggacgtcccggctgggatgaagtctggtggtgggtcgtaagtttaggaggtgactgcatcctccagcatctcaactccgtctgtctactgtgtgagacttcggcggaccattaggaatgagatccgtgagatccttccatcttcttgaagtcgcctttagggtggctgcgaggtagagggttgggggttggtgggctgtcacggagcgactgtcgagatcgcctagtatgttctgtgaacacaaataaaattgatttactgtctgca

SEQ ID NO: 141855 - DNA, 1350 bp, Artificial Sequence
  derived and/or modified sequence
cacttggccttacactccgctcggctcaccatgtgtcactctcgcagctgccacccgaccatgaccatcctgcaggccccgaccccggccccctccaccatcccgggaccccggcggggctccggtcctgagatcttcaccttcgaccctctcccggagcccgcagcggcccctgccgggcgccccagcgcctctcgcgggcaccgaaagcgcagccgcagggttctctaccctcgagtggtgagtatcgccgaagtgggcattcgcggggtgcgctgccctggagtcactggggaacgacccgactccagaggcctcgacctgacctgtctcctgttttgtctccccttaggtccggcgccagctgccagtcgaggaaccgaacccagccaaaaggcttctctttctgctgctcaccatcgtcttctgccagatcctgatggctgaagagggtgtgccggcgcccctgcctccagaggacgcccctaacgccgcatccctggcgcccacccctgtgtccgccgtcctcgagccctttaatctgacttcggagccctcggactacgctctggacctcagcactttcctccagcaacacccggccgccttctaactgtgactccccgcactccccaaaaagaatccgaaaaaccacaaagaaacaccaggcgtacctggtgcgcgagagcgtatccccaactgggacttccgaggcaacttgaactcagaacactacagcggagacgccacccggtgcttgaggcgggaccgaggcgcacagagaccgaggcgcatagagaccgaggcacagcccagctggggctaggcccggtgggaaggagagcgtcgttaatttatttcttattgctcctaattaatatttatatgtatttatgtacgtcctcctaggtgatggagatgtgtacgtaatatttattttaacttatgcaagggtgtgagatgttccccctgctgtaaatgcaggtctcttggtatttattgagctttgtgggactggtggaagcaggacacctggaactgcggcaaagtaggagaagaaatggggaggactcgggtgggggaggacgtcccggctgggatgaagtctggtggtgggtcgtaagtttaggaggtgactgcatcctccagcatctcaactccgtctgtctactgtgtgagacttcggcggaccattaggaatgagatccgtgagatccttccatcttcttgaagtcgcctttagggtggctgcgaggtagagggttgggggttggtgggctgtcacggagcgactgtcgagatcgcctagtatgttctgtgaacacaaataaaattgatttactgtctgca

SEQ ID NO: 141856 - DNA, 1308 bp, Artificial Sequence
  derived and/or modified sequence
atgtgtcactctcgcagctgccacccgaccatgaccatcctgcaggccccgaccccggccccctccaccatcccgggaccccggcggggctccggtcctgagatcttcaccttcgaccctctcccggagcccgcagcggcccctgccgggcgccccagcgcctctcgcgggcaccgaaagcgcagccgcagggttctcccctcgagtggtgagtatcgccgaagtgggcattcgcggggtgcgctgccctggagtcactggggaacgacccgactccagggcctcgacctgacctgtctcctgttttgtctccccttagtccggcgccagctgccagtcgaggaaccgaacccagccaaaaggcttctctttctgctgctcaccatcgtcttctgccagatcctgatggctgaagagggtgtgccggcgcccctgcctccagaggacgcccctaacgccgcatccctggcgcccacccctgtgtccgccgtcctcgagccctttaatctgacttcggagccctcggactacgctctggacctcagcactttcctccagcaacacccggccgccttctaactgtgactccccgcactccccaaaaagaatccgaaaaaccacaaagaaacaccaggcgtacctggtgcgcgagagcgtatccccaactgggacttccgaggcaacttgaactcagaacactacagcggagacgccacccggtgcttgaggcgggaccgaggcgcacagagaccgaggcgcatagagaccgaggcacagcccagctggggctaggcccggtgggaaggagagcgtcgttaatttatttcttattgctcctaattaatatttatatgtatttatgtacgtcctcctaggtgatggagatgtgtacgtaatatttattttaacttatgcaagggtgtgagatgttccccctgctgtaaatgcaggtctcttggtatttattgagctttgtgggactggtggaagcaggacacctggaactgcggcaaagtaggagaagaaatggggaggactcgggtgggggaggacgtcccggctgggatgaagtctggtggtgggtcgtaagtttaggaggtgactgcatcctccagcatctcaactccgtctgtctactgtgtgagacttcggcggaccattaggaatgagatccgtgagatccttccatcttcttgaagtcgcctttagggtggctgcgaggtagagggttgggggttggtgggctgtcacggagcgactgtcgagatcgcctagtatgttctgtgaacacaaataaaattgatttac

SEQ ID NO: 141857 - DNA, 1244 bp, Artificial Sequence
  derived and/or modified sequence
gaccctcacttggccttacactccgctcggctcaccatgtgtcactctcgcagctgccacccgaccatgaccatcctgcaggccccgaccccggccccctccaccatcccgggaccccggcggggctccggtcctgagatcttcaccttcgaccctctcccggagcccgcagcggcccctgccgggcgccccagcgcctctcgcgggcaccgaaagcgcagccgcagggttctctaccctcgagtggtccggcgccagctgccagtcgaggaaccgaacccagccaaaaggcttctctttctgctgctcaccatcgtcttctgccagatcctgatggctgaagagggtgtgccggcgcccctgcctccagaggacgcccctaacgccgcatccctggcgcccacccctgtgtcccccgtcctcgagccctttaatctgacttcggagccctcggactacgctctggacctcagcactttcctccagcaacacccggccgccttctaactgtgactccccgcactccccaaaaagaatccgaaaaaccacaaagaaacaccaggcgtacctggtgcgcgagagcgtatccccaactgggacttccgaggcaacttgaactcagaacactacagcggagacgccacccggtgcttgaggcgggaccgaggcgcacagagaccgaggcgcatagagaccgaggcacagcccagctggggctaggcccggtgggaaggagagcgtcgttaatttatttcttattgctcctaattaatatttatatgtatttatgtacgtcctcctaggtgatggagatgtgtacgtaatatttattttaacttatgcaagggtgtgagatgttccctctgctgtaaatgcaggtctcttggtatttattgagctttgtgggactggtggaagcaggacacctggaactgcggcaaagtaggagaagaaatggggaggactcgggtgggggaggacgtcccggctgggatgaagtctggtggtgggtcgtaagtttaggaggtgactgcatcctccagcatctcaactccgtctgtctactgtgtgagacttcggcggaccattaggaatgagatccgtgagatccttccatcttcttgaagtcgcctttagggtggctgcgaggtagagggttgggggttggtgggctgtcacggagcgactgtcgagatcgcctagtatgttctgtgaacacaaataaaattgatttactgtctgca

SEQ ID NO: 141858 - DNA, 1350 bp, Artificial Sequence
  derived and/or modified sequence
cacttggccttacactccgctcggctcaccatgtgtcactctcgcagctgccacccgaccatgaccatcctgcaggccccgaccccggccccctccaccatcccgggaccccggcggggctccggtcctgagatcttcaccttcgaccctctcccggagcccgcagcggcccctgccgggcgccccagcgcctctcgcgggcaccgaaagcgcagccgcagggttctctaccctcgagtggtgagtatcgccgaagtgggcattcgcggggtgcgctgccctggagtcactggggaacgacccgactccagaggcctcgacctgacctgtctcctgttttgtctccccttaggtccggcgccagctgccagtcgaggaaccgaacccagccaaaaggcttctctttctgctgctcaccatcgtcttctgccagatcctgatggctgaagagggtgtgccggcgcccctgcctccagaggacgcccctaacgccgcatccctggcgcccacccctgtgtcccccgtcctcgagccctttaatctgacttcggagccctcggactacgctctggacctcagcactttcctccagcaacacccggccgccttctaactgtgactccccgcactccccaaaaagaatccgaaaaaccacaaagaaacaccaggcgtacctggtgcgcgagagcgtatccccaactgggacttccgaggcaacttgaactcagaacactacagcggagacgccacccggtgcttgaggcgggaccgaggcgcacagagaccgaggcgcatagagaccgaggcacagcccagctggggctaggcccggtgggaaggagagcgtcgttaatttatttcttattgctcctaattaatatttatatgtatttatgtacgtcctcctaggtgatggagatgtgtacgtaatatttattttaacttatgcaagggtgtgagatgttccctctgctgtaaatgcaggtctcttggtatttattgagctttgtgggactggtggaagcaggacacctggaactgcggcaaagtaggagaagaaatggggaggactcgggtgggggaggacgtcccggctgggatgaagtctggtggtgggtcgtaagtttaggaggtgactgcatcctccagcatctcaactccgtctgtctactgtgtgagacttcggcggaccattaggaatgagatccgtgagatccttccatcttcttgaagtcgcctttagggtggctgcgaggtagagggttgggggttggtgggctgtcacggagcgactgtcgagatcgcctagtatgttctgtgaacacaaataaaattgatttactgtctgca

SEQ ID NO: 141859 - DNA, 1350 bp, Artificial Sequence
  derived and/or modified sequence
cacttggccttacactccgctcggctcaccatgtgtcactctcgcagctgccacccgaccatgaccatcctgcaggccccgaccccggccccctccaccatcccgggaccccggcggggctccggtcctgagatcttcaccttcgaccctctcccggagcccgcagcggcccctgccgggcgccccagcgcctctcgcgggcaccgaaagcgcagccgcagggttctctaccctcgagtggtgagtatcgccgaagtgggcattcgcggggtgcgctgccctggagtcactggggaacgacccgactccagaggcctcgacctgacctgtctcctgttttgtctccccttaggtccggcgccagctgccagtcgaggaaccgaacccagccaaaaggcttctctttctgctgctcaccatcgtcttctgccagatcctgatggctgaagagggtgtgccggcgcccctgcctccagaggacgcccctaacgccgcatccctggcgcccacccctgtgtcccccgtcctcgagccctttaatctgacttcggagccctcggactacgctctggacctcagcactttcctccagcaacacccggccgccttctaactgtgactccccgcactccccaaaaagaatccgaaaaaccacaaagaaacaccaggcgtacctggtgcgcgagagcgtatccccaactgggacttccgaggcaacttgaactcagaacactacagcggagacgccacccggtgcttgaggcgggaccgaggcgcacagagaccgaggcgcatagagaccgaggcacagcccagctggggctaggcccggtgggaaggagagcgtcgttaatttatttcttattgctcctaattaatatttatatgtatttatgtacgtcctcctaggtgatggagatgtgtacgtaatatttattttaacttatgcaagggtgtgagatgttccccctgctgtaaatgcaggtctcttggtatttattgagctttgtgggactggtggaagcaggacacctggaactgcggcaaagtaggagaagaaatggggaggactcgggtgggggaggacgtcccggctgggatgaagtctggtggtgggtcgtaagtttaggaggtgactgcatcctccagcatctcaactccgtctgtctactgtgtgagacttcggcggaccattaggaatgagatccgtgagatccttccatcttcttgaagtcgcctttagggtggctgcgaggtagagggttgggggttggtgggctgtcacggagcgactgtcgagatcgcctagtatgttctgtgaacacaaataaaattgatttactgtctgca

SEQ ID NO: 141860 - DNA, 1244 bp, Artificial Sequence
  derived and/or modified sequence
gaccctcacttggccttacactccgctcggctcaccatgtgtcactctcgcagctgccacccgaccatgaccatcctgcaggccccgaccccggccccctccaccatcccgggaccccggcggggctccggtcctgagatcttcaccttcgaccctctcccggagcccgcagcggcccctgccgggcgccccagcgcctctcgcgggcaccgaaagcgcagccgcagggttctctaccctcgagtggtccggcgccagctgccagtcgaggaaccgaacccagccaaaaggcttctctttctgctgctcaccatcgtcttctgccagatcctgatggctgaagagggtgtgccggcgcccctgcctccagaggacgcccctaacgccgcatccctggcgcccacccctgtgtcccccgtcctcgagccctttaatctgacttcggagccctcggactacgctctggacctcagcactttcctccagcaacacccggccgccttctaactgtgactccccgcactccccaaaaagaatccgaaaaaccacaaagaaacaccaggcgtacctggtgcgcgagagcgtatccccaactgggacttccgaggcaacttgaactcagaacactacagcggagacgccacccggtgcttgaggcgggaccgaggcgcacagagaccgaggcgcatagagaccgaggcacagcccagctggggctaggcccggtgggaaggagagcgtcgttaatttatttcttattgctcctaattaatatttatatgtatttatgtacgtcctcctaggtgatggagatgtgtacgtaatatttattttaacttatgcaagggtgtgagatgttccccctgctgtaaatgcaggtctcttggtatttattgagctttgtgggactggtggaagcaggacacctggaactgcggcaaagtaggagaagaaatggggaggactcgggtgggggaggacgtcccggctgggatgaagtctggtggtgggtcgtaagtttaggaggtgactgcatcctccagcatctcaactccgtctgtctactgtgtgagacttcggcggaccattaggaatgagatccgtgagatccttccatcttcttgaagtcgcctttagggtggctgcgaggtagagggttgggggttggtgggctgtcacggagcgactgtcgagatcgcctagtatgttctgtgaacacaaataaaattgatttactgtctgca

SEQ ID NO: 141861 - DNA, 471 bp, Artificial Sequence
  derived and/or modified sequence
atgtgccacagccgcagctgccaccccaccatgaccatcctgcaggcccccaccccagcccccagcaccatccctggcccccggcggggcagcggccctgagatcttcacctttgaccccctgcctgagcctgctgctgccccagctggccggcccagcgccagccggggccacaggaagaggagcagaagagtgctgtacccccgggtggtgcggcggcagctgcctgtggaggagcccaacccagccaagaggctgctcttcctgctgctgaccatcgtgttctgccagatcctgatggccgaggagggcgtgcctgcccccctgcccccagaagatgccccaaatgctgccagcctggcccccacccctgtgtctgctgtgctggagcccttcaacctgaccagcgagcccagcgactatgccctggacctgagcaccttcctgcagcagcaccctgctgccttctag

SEQ ID NO: 141862 - DNA, 417 bp, Artificial Sequence
  derived and/or modified sequence
atgtgccacagccgcagctgccaccccaccatgaccatcctgcaggcccccaccccagcccccagcaccatccctggcccccggcggggcagcggccctgagatcttcacctttgaccccctgcctgagcctgctgctgccccagctggccggcccagcgccagccggggccacaggaagaggagcagaagagtgctgtacccccgggtggtgtccattgctgaggtgggcatccggggcgtgcgctgccctggggtgactggagagaggccagacagccggggcctggacctgacctgcctgctcttctgcctgcccctgggccctgccccagctgccagccggggcacagagcccagccagaaggccagcctgtctgctgcccaccaccggctgctgcctgaccctgatggatag

SEQ ID NO: 141863 - DNA, 579 bp, Artificial Sequence
  derived and/or modified sequence
atgtgccacagccgcagctgccaccccaccatgaccatcctgcaggcccccaccccagcccccagcaccatccctggcccccggcggggcagcggccctgagatcttcacctttgaccccctgcctgagcctgctgctgccccagctggccggcccagcgccagccggggccacaggaagaggagcagaagagtgctgcccagcagtggagagtacagaagaagtggccacagcagaggagccctgccctggagccactggggcaccacccggctgcagggcctggacctgacctgcctgctcttctgcctgcccctggtgcggcggcagctgcctgtggaggagcccaacccagccaagaggctgctcttcctgctgctgaccatcgtgttctgccagatcctgatggccgaggagggcgtgcctgcccccctgcccccagaagatgccccaaatgctgccagcctggcccccacccctgtgtctgctgtgctggagcccttcaacctgaccagcgagcccagcgactatgccctggacctgagcaccttcctgcagcagcaccctgctgccttctag

SEQ ID NO: 141864 - DNA, 471 bp, Artificial Sequence
  derived and/or modified sequence
atgtgccacagccgcagctgccaccccaccatgaccatcctgcaggcccccaccccagcccccagcaccatccctggcccccggcggggcagcggccctgagatcttcacctttgaccccctgcctgagcctgctgctgccccagctggccggcccagcgccagccggggccacaggaagaggagcagaagagtgctgtacccccgggtggtgcggcggcagctgcctgtggaggagcccaacccagccaagaggctgctcttcctgctgctgaccatcgtgttctgccagatcctgatggccgaggagggcgtgcctgcccccctgcccccagaagatgccccaaatgctgccagcctggcccccacccctgtgtcccctgtgctggagcccttcaacctgaccagcgagcccagcgactatgccctggacctgagcaccttcctgcagcagcaccctgctgccttctag

SEQ ID NO: 141865 - DNA, 471 bp, Artificial Sequence
  derived and/or modified sequence
atgtgccacagccggagctgccaccccaccatgaccatcctgcaggcccctaccccagctccttcaacaataccaggacctcgcaggggctctggtcctgaaatcttcacctttgatcctttgccggaaccagcagcagcccccgcaggacgaccaagcgcctccagaggccatagaaaaagatcaaggagggtactgtacccaagagtggtcaggagacagctacctgtcgaggagccaaatccagctaagagactgctctttcttctgctgactatcgtattctgtcaaatcctaatggctgaagagggcgtgcccgccccactgcccccagaggacgccccgaacgctgcaagtctggctcctactcccgtttcggctgtcctcgagccattcaatctgacttcagaaccttcggactatgcactggatctctccacattcctgcagcaacacccggctgctttttag

SEQ ID NO: 141866 - DNA, 417 bp, Artificial Sequence
  derived and/or modified sequence
atgtgccacagccggagctgccaccccaccatgaccatcctgcaggctcctacacctgcaccatccaccattcctgggccaaggcgaggctcaggcccagaaatctttacctttgacccactgcccgagcctgccgctgctcccgctggtcgcccctccgcaagccgcggacaccgcaagcgaagcaggcgcgtactctatccacgggttgtcagcattgccgaggtcggaattaggggggttcgctgccccggagttactggcgaacggcccgacagcagagggctcgaccttacatgcttgcttttttgcttgccactgggtcccgcacctgcggcctctaggggaacagaacccagtcaaaaggccagcctttcagctgcccaccatagactactgcctgatccggacggctag

SEQ ID NO: 141867 - DNA, 579 bp, Artificial Sequence
  derived and/or modified sequence
atgtgccacagccggagctgccaccccaccatgaccatcctgcaggcccctactccagcaccttcaactatccctggccccaggaggggctcaggtcctgagatcttcacatttgatcctttgcctgaacctgccgccgcgcccgccggacggcccagcgcatcccgtggccatcgcaaacgtagtcggcgtgttctgccaagcagtggtgaataccgcaggtctggacacagtaggggcgcgctgccctggagtcactggggtactactaggctgcaggggctggaccttacatgtctgttgttctgcctacctctcgtgcgcagacagctacctgtcgaagagccgaatcccgcgaagaggcttctgtttctgcttctgacgattgtgttctgccagatcctcatggcggaggagggagtcccggcgcccctcccacccgaggatgcacccaacgccgccagtctggcaccgactccagtttctgccgtcctcgagccattcaacctgactagtgagccttctgattatgccctggatctgtctacctttctccagcagcacccggctgctttctag

SEQ ID NO: 141868 - DNA, 471 bp, Artificial Sequence
  derived and/or modified sequence
atgtgccacagccggagctgccaccccaccatgaccatcctgcaggcccctacccctgccccatctacaatacctggtccccgcaggggcagcggcccggagatcttcactttcgatcctttaccagagcccgcggcagcccctgccggtcggccttctgccagccgtggacataggaagcgctctcgccgggtcttgtatcccagagtcgttaggaggcaacttccagtggaggaacccaatcccgccaagaggctgttgtttcttctactgactatcgtgttctgccagatcctgatggcagaggagggcgtacctgcgccattaccacctgaggacgccccaaacgctgcgagtctggcgcctacacccgtgagccctgttctcgagccattcaatctgacatccgaaccaagcgactacgccctggacctatcaaccttcctgcaacagcaccctgctgccttctag

SEQ ID NO: 141869 - DNA, 417 bp, Artificial Sequence
  derived and/or modified sequence
atgtgccacagccggagctgccaccccaccatgaccatcctgcaggcccctactcctgccccttcaacgattccaggtccaagacgcggttccgggcccgagatatttactttcgatcctctcccagagccagccgcagcaccagctggcagacctagcgcgagtagggggcaccggaaacgttccagacgggtgctctacccccgggttgtgtcaatcgccgaggttggaatccggggcgtaaggtgccccggcgtgacaggcgaaagacctgactcacgcgggcttgatctcacgtgcttactattctgtctgccgcttggtcccgctcccgccgcctcaagagggacggagccatctcaaaaagcatccttgagcgctgcacaccatcgccttctcccagatcctgacggctag

SEQ ID NO: 141870 - DNA, 417 bp, Artificial Sequence
  derived and/or modified sequence
atgtgccacagccggagctgccaccccaccatgaccatcctgcaggcccccaccccggcccctagtaccatccctggtccacgaagaggcagtggaccagagatttttacctttgatcccctgcctgagcctgcagccgcgcctgctggccgtccttccgcaagtcgcggacatagaaagcggagccgcagagttctttaccctagagtggtctccatcgcggaggtgggaattaggggagttcgatgcccgggcgtgaccggggagaggcctgactcgaggggcctggacctgacctgtctcctcttttgtttgcctctggggcctgctccagcggcctcgaggggtactgaacccagtcagaaggccagtttgtccgcagcacatcaccggctgcttcctgatccagacgggtag

SEQ ID NO: 141871 - DNA, 471 bp, Artificial Sequence
  derived and/or modified sequence
atgtgccacagccggagctgccaccccaccatgaccatcctgcaggcaccgacccctgcaccgtccactattcccggaccccgaagaggatcaggccctgagatattcactttcgacccgctgccagaacctgcggccgccccagccggccgtccatcagcctcacgcggccaccggaagcggtcacgcagagtgctatatcctagagtggtgagacggcaattacccgttgaggagccaaaccccgccaaacgattgctgttcctgctgttaaccatcgtgttctgccaaatactgatggccgaagaaggtgtcccagcacctctgccgcctgaagatgcgcctaatgccgcctctttggctccaactccagtcagtccagtattggaaccatttaacctgaccagcgaacctagcgactatgcactcgacctttccacctttttacaacagcacccggcggccttctag

SEQ ID NO: 141872 - DNA, 417 bp, Artificial Sequence
  derived and/or modified sequence
atgtgccacagccggagctgccaccccaccatgaccatcctgcaggcccctacgcccgcgccttctacgatccccgggccaagaagagggagcggccccgagatcttcaccttcgatcctctgccagagcctgcggccgctcctgccgggcgaccatccgcttctaggggtcaccggaaacgcagccgcagggtgttatatccccgagtagtgtccatagctgaggtgggcatccgcggcgtgaggtgccctggcgtcaccggagaaagacctgactctagaggcttagatctgacttgcctattattctgtctgcctctggggccggctccagcggcctcccgaggtactgaaccaagccagaaagcgtccctcagtgccgcccatcacaggttgttaccagaccccgatggctag

SEQ ID NO: 141873 - DNA, 471 bp, Artificial Sequence
  derived and/or modified sequence
atgtgccacagccggagctgccaccccaccatgaccatcctgcaggcaccaacaccagccccatcaacaatccctggtccccggaggggctctgggccagagatctttacatttgatccactccctgaacccgctgccgcaccggccggaaggccttctgcgtccagaggtcaccggaagcgctcccgtcgagttctttaccccagagtcgtccggcggcagcttcctgtggaagagccaaatccagccaagagactcctcttcctgctgctgaccatcgtattttgtcagatcctgatggccgaggagggcgtcccggcacccttgccaccagaggatgcccccaacgctgcaagccttgctcccactcctgtgagtcctgtgctggaacccttcaatttgacgagtgaaccctctgactatgcactcgacttgagtactttcctgcagcagcaccccgccgccttctag

SEQ ID NO: 141874 - DNA, 417 bp, Artificial Sequence
  derived and/or modified sequence
atgtgccacagccggagctgccaccccaccatgaccatcctgcaggcccctactcccgccccgtccaccatcccgggaccaaggcgcgggagcggccctgagatattcacttttgaccctctgccagaacccgccgctgcacctgcggggcgaccaagcgcctctaggggccatcgaaaaagatccaggagggtgctgtaccctcgagtagtgagtattgcagaggtgggaatcagaggtgtgcgctgtcccggggttaccggggagcgacccgattcacgggggctggacttaacctgccttttgttctgtctgccactgggccccgctccggcggcttctaggggtacagagccatctcagaaggcttcactgagcgccgcccatcatcgtctgctgcctgaccctgatggctag

SEQ ID NO: 141875 - DNA, 471 bp, Artificial Sequence
  derived and/or modified sequence
atgtgccacagccggagctgccaccccaccatgaccatcctgcaggcaccaacaccagccccgtccacaattcccgggccccgtcggggcagtggccccgagatctttactttcgatccccttccagagcccgccgctgcacctgccggccgtcccagcgcttccagaggccatcgcaaacgtagtagacgggtgctttatccgcgggtggtgagacgccaattgcctgtcgaggaacctaatcccgccaagagactgttgttccttctgctgactattgttttctgtcaaatcctcatggccgaggagggggtccctgccccactcccaccggaggacgcacccaatgcagcaagcctggcacccacccctgtgagccctgtgttagagccctttaacttaacttctgaaccctccgactatgctctggacttatcaacttttctccagcagcatcccgccgctttctag

SEQ ID NO: 141876 - DNA, 417 bp, Artificial Sequence
  derived and/or modified sequence
atgtgccacagccggagctgccaccccaccatgaccatcctgcaggcccccacaccagccccatcaaccattccgggtccacgccggggcagcgggccagagatcttcacgttcgatcccttgccagaacccgccgccgcacccgccggtcggccaagcgcttcaagggggcacagaaagcggtcacggcgagtgctctacccacgggtggtttcaatcgcagaggtgggaattcgtggggtgcggtgtcctggagtgaccggtgaacgcccagactcacgaggattggacctgacctgtctgttgttttgtctgcctcttggacctgcaccagcagcatcccgtggtacagagccatctcaaaaggcttcattgtcagcagcccatcatcgcttattacctgatcctgacgggtag

SEQ ID NO: 141877 - DNA, 471 bp, Artificial Sequence
  derived and/or modified sequence
atgtgccacagccggagctgccaccccaccatgaccatcctgcaggctcccacacctgctcccagcacaatcccgggacctaggcgggggtctggccctgagatttttaccttcgaccctcttcctgagcctgcggcagctccagcaggacgcccctccgcaagcaggggccacaggaaacgaagtaggcgggttttgtatccccgcgtcgtccgtcgccagttacccgtcgaagagcctaaccctgccaagaggctgctattcctgcttctgactatcgtgttttgccagatcttgatggccgaagaaggcgttccggcgcccctgcctcccgaggacgcgcctaatgccgcctccctggcacctacaccagtaagccccgtgctagagcccttcaacctcacctcagagccttctgattatgctctggacttatcaacattcctccagcagcaccctgccgcattttag

SEQ ID NO: 141878 - DNA, 471 bp, Artificial Sequence
  derived and/or modified sequence
atgtgccattcacgcagctgtcatcccactatgaccattctgcaggcacctacccctgcacctagtacgatccccggacccagacgtggctcgggacctgaaatcttcacctttgatcctctgcccgagcccgctgcggctcctgctggccgaccatccgcaagccggggtcaccgcaagcgtagcagaagggtgctttatcctcgagtagtccggagacagttgcctgtcgaagagcctaatcccgctaagagactgctgtttctgctgctaacaatcgtgttctgccagattctcatggctgaagagggagtgcctgcaccgttgccaccagaagacgctcctaatgccgcttccttagcccctacaccagtctctgcggtcttggagccgtttaacttgaccagcgagcctagtgattacgcactggacctcagcacttttttgcagcaacatccggcagctttctag

SEQ ID NO: 141879 - DNA, 417 bp, Artificial Sequence
  derived and/or modified sequence
atgtgtcattctcggtcttgtcaccctacaatgacgattctgcaagcacccacccccgcacctagcactataccaggccctcgcaggggttcaggaccagagatcttcaccttcgacccccttcctgagcctgcagccgcacccgctggtaggcccagcgccagccgtgggcatcggaaaaggtctaggcgcgttttataccctagggtggtgagtattgcggaagtgggcattcgtggcgtccgatgtccgggagttactggcgaacggcctgactcacggggtctggacctgacctgcttactgttctgtttgcccctggggcctgcaccagctgcttctagaggtaccgagccctctcagaaagcatccctttccgccgctcaccaccgcttgctgccagacccggatggctag

SEQ ID NO: 141880 - DNA, 579 bp, Artificial Sequence
  derived and/or modified sequence
atgtgtcattccaggagttgtcacccgaccatgactattctccaggcaccgactcctgccccatcaactattcctgggccacggagaggctcagggcctgagattttcacgtttgaccccttgccggaacctgcagccgcaccagcgggacgccctagtgccagccgcggtcatcgaaagaggtcccgccgtgtgttaccgtcgagcggagagtaccgacgctcagggcacagtaggggcgctctgccgtggagccattgggggaccacacgtctgcaggggcttgacctgacatgtctgttgttctgcctccccctggtgcggagacagttgcctgtagaggagcctaatcccgcaaagaggttgctgttcttactgttgaccatcgttttctgccaaattctcatggctgaagagggcgtgcccgcacccctcccacctgaggatgccccaaatgctgctagtctcgcacccaccccagtgagcgccgtgttggaaccgttcaacctcacaagcgagccgagcgactacgccctcgacctgagcacatttctgcagcaacaccctgccgctttctag

SEQ ID NO: 141881 - DNA, 471 bp, Artificial Sequence
  derived and/or modified sequence
atgtgtcattcacgaagctgccatccaaccatgactattctgcaggcacctactcccgctccttccacaattcctggacctcgccgaggctcgggccctgagattttcactttcgatccactcccggagcccgcagctgcccctgctggtaggcccagtgccagcagggggcaccgcaaacggagtcgcagagtgttatatcctcgcgtggtaagacgccaacttcccgttgaggagccaaatcctgccaagagattgctcttcctgctacttacaatcgtcttctgccagattctgatggctgaagagggagtgcccgctccgctgcctccagaggacgcccctaacgcagcctccctcgcacccaccccagtcagccctgttctggagccctttaatttgaccagtgagccttctgattacgccttggatttgtcaacttttctgcagcaacaccccgcagctttttag

SEQ ID NO: 141882 - DNA, 417 bp, Artificial Sequence
  derived and/or modified sequence
atgtgccactcgagatcttgccacccgaccatgacgatcctgcaggcacctacccccgctccctctacaattcctgggccaagacgaggtagcggcccagaaatattcacctttgatcccctgcctgaacctgccgcagctcccgcaggcaggccttccgcttctcgcggtcacagaaagaggagccgccgagtgttataccctcgggtggtgtcaatagctgaggttggaatcagaggtgtgcggtgccccggtgttaccggggagaggcccgacagccggggactggacctgacctgcctgctgttttgccttcctctcggccctgctcccgctgcatccagagggaccgagccatcccagaaagcttccttgtccgcagcgcaccaccggttactgccagatcccgatggatag

SEQ ID NO: 141883 - DNA, 417 bp, Artificial Sequence
  derived and/or modified sequence
atgtgccatagtcgctcttgccatcctacaatgacaatattgcaggctcccacccctgctccttcaacgatcccagggccaaggaggggcagtgggccagaaatctttacctttgaccctttgccggaacctgccgctgcgcctgctggcagaccaagcgcgagtcgagggcataggaagcgctcgcggagggttctctacccacgagtggtgtcgatcgccgaggttggcatcagaggcgtacggtgtcctggagttacaggggagcggccagatagtagagggctggacctgacttgcctgctgttttgtctccccttgggccctgctccagccgcatctcgcggaaccgaaccctcccagaaagcgtctctcagcgcggcacatcataggcttctgcctgacccagacggctag

SEQ ID NO: 141884 - DNA, 471 bp, Artificial Sequence
  derived and/or modified sequence
atgtgtcatagcaggtcttgtcatcctacgatgaccatcttgcaagcccctacccctgccccatcgactattccagggcctcggcgtggaagcggccctgaaatattcactttcgaccctttgccagaaccggctgccgcacctgctgggcgtccctcagccagccgcggtcatagaaagcgatcccggagagtgctctatccaagggttgtgcggcgacaactgcctgtagaagagccgaatcctgccaagagattgctgtttcttctcctgactatcgtgttttgtcagattctaatggctgaggaaggggtcccagcacccttacccccagaggatgcacccaacgcagcgtccctggcacctacccccgtgtctcccgtgctcgagccgttcaatttaaccagtgaaccctcagattatgccctggaccttagcaccttccttcagcagcaccccgcagcgttctag

SEQ ID NO: 141885 - DNA, 417 bp, Artificial Sequence
  derived and/or modified sequence
atgtgccactctagaagttgtcatccaaccatgactattttacaggctcctactcccgctcccagtacaatacccggacctcgccgtggtagcgggcctgaaatctttacattcgatccgttgcccgaacccgctgccgcacctgccggtcggcctagcgcctcgagaggccataggaaaagatctaggagagtcctgtacccacgggtggtttctattgccgaagtgggaattaggggtgttcgctgtcccggagtcaccggagagcgcccagactccaggggactagacctgacatgtttactcttttgtctgcctctcggtccagctcccgcagcaagccgcggtaccgagccatctcagaaagcatcactgtctgctgcccaccaccgcctcctcccggaccctgatgggtag

SEQ ID NO: 141886 - DNA, 471 bp, Artificial Sequence
  derived and/or modified sequence
atgtgccatagcaggagctgtcacccgactatgaccatcctccaggctccaactcccgcaccaagcacgatccctggaccccgaagggggtccggccctgagattttcacttttgacccgctacctgagcctgccgcagctcccgctggtcgaccgagcgcctcgaggggccacagaaagcgcagtcggagagttttgtatccacgggtggtgcgccgtcaactgcccgtggaggagccaaaccctgccaagaggctgctatttcttctcttgaccattgtgttttgccagatcctcatggcggaagagggagtacccgctcctcttccaccagaggacgcccctaatgctgctagcttagctccgaccccagtgtcacctgtgctggagcctttcaacctaacgagcgagccaagtgattatgctctggatctcagcaccttcctgcagcagcatcctgccgctttttag

SEQ ID NO: 141887 - DNA, 417 bp, Artificial Sequence
  derived and/or modified sequence
atgtgccatagcagatcctgccatcccaccatgacgattctgcaagcccctactccagcacctagcacaatcccaggcccaagaagaggctccggcccagaaatttttactttcgaccctttgccagaacctgcagccgcacccgcagggagacccagtgccagccgcggacacagaaagcggagtcggagggtgctctatccaagagttgtgtctatagccgaggttggcatcagaggagtaaggtgcccaggagttacaggtgagagaccagacagccgcggtctggacctgacctgtctgcttttttgtttgcctctcggcccagcccctgctgcttctcgcggtaccgaaccttcccagaaagcctctctgtctgctgcccatcatcggctgttgccagacccagacggatag

SEQ ID NO: 141888 - DNA, 471 bp, Artificial Sequence
  derived and/or modified sequence
atgtgccatagccgatcttgccacccaaccatgaccattctgcaggcccctactcctgcacctagtaccatcccgggaccccgtcgaggctccggaccagagatcttcacatttgacccacttcctgaaccagccgctgccccagccggaagaccctcagcaagccgtggtcatcgaaaaaggtccagaagggtgttatatccgagggtggtccggagacaacttcctgtggaggagccaaatccagccaaaagactactgtttctgctgctgacaatagttttctgtcagattcttatggccgaagagggcgtgcctgccccactgccccctgaggacgcccctaacgcggcaagtctcgcgccaactcccgtctccccggtacttgagccgtttaatctcacgagcgaaccaagcgactacgctctggacctcagtaccttccttcaacagcacccagccgctttctag

SEQ ID NO: 141889 - DNA, 417 bp, Artificial Sequence
  derived and/or modified sequence
atgtgtcacagcagaagctgtcatcccaccatgactatactacaagccccaactccagcaccatcgaccattccaggtccccgaaggggttcagggcctgagatatttactttcgatcctctgcctgagcccgctgcagcccctgccggaagacccagtgcatcccgcggacacaggaagaggagccggcgagttctctacccacgcgtggtgtccattgcagaggtcgggatccggggagttcgctgtcctggggtgaccggggagcgcccagatagccgaggtctagatctcacatgtctgcttttctgcctcccactgggtcctgctccggcagcctcacgtggcacagagccatcacagaaggcctctctgtcggctgcccaccaccgtcttctccctgatccagacgggtag

SEQ ID NO: 141890 - DNA, 471 bp, Artificial Sequence
  derived and/or modified sequence
atgtgtcactctcgctcatgtcatccgaccatgacgattctccaagctcctactcccgcaccttcaactatccccggaccccgacgaggaagcgggcctgagatcttcacattcgatccactgcccgaacctgccgcagcccctgctggcagaccatccgcctctcgaggtcacaggaaacggtcaaggagggtactatatccaagggttgttaggcggcagctgcccgtggaagagcctaacccagctaagagactactcttccttctcttgaccattgtcttctgccagatcctgatggctgaggagggggtacccgctcctctacctcctgaggatgcgcctaatgccgcttcactggctccaacccccgtcagtcctgtgctcgagccttttaatctgacgagcgagccctctgactatgctctggatctgtccacttttctgcagcaacaccctgccgctttctag

SEQ ID NO: 141891 - DNA, 471 bp, Artificial Sequence
  derived and/or modified sequence
atgtgccacagcagaagctgccaccccaccatgaccatcctgcaggcccccacccccgcccccagcaccatccccggccccagaagaggcagcggccccgagatcttcaccttcgaccccctgcccgagcccgccgccgcccccgccggcagacccagcgccagcagaggccacagaaagagaagcagaagagtgctgtaccccagagtggtgagaagacagctgcccgtggaggagcccaaccccgccaagagactgctgttcctgctgctgaccatcgtgttctgccagatcctgatggccgaggagggcgtgcccgcccccctgccccccgaggacgcccccaacgccgccagcctggcccccacccccgtgagcgccgtgctggagcccttcaacctgaccagcgagcccagcgactacgccctggacctgagcaccttcctgcagcagcaccccgccgccttctag

SEQ ID NO: 141892 - DNA, 417 bp, Artificial Sequence
  derived and/or modified sequence
atgtgccacagcagaagctgccaccccaccatgaccatcctgcaggcccccacccccgcccccagcaccatccccggccccagaagaggcagcggccccgagatcttcaccttcgaccccctgcccgagcccgccgccgcccccgccggcagacccagcgccagcagaggccacagaaagagaagcagaagagtgctgtaccccagagtggtgagcatcgccgaggtgggcatcagaggcgtgagatgccccggcgtgaccggcgagagacccgacagcagaggcctggacctgacctgcctgctgttctgcctgcccctgggccccgcccccgccgccagcagaggcaccgagcccagccagaaggccagcctgagcgccgcccaccacagactgctgcccgaccccgacggctag

SEQ ID NO: 141893 - DNA, 579 bp, Artificial Sequence
  derived and/or modified sequence
atgtgccacagcagaagctgccaccccaccatgaccatcctgcaggcccccacccccgcccccagcaccatccccggccccagaagaggcagcggccccgagatcttcaccttcgaccccctgcccgagcccgccgccgcccccgccggcagacccagcgccagcagaggccacagaaagagaagcagaagagtgctgcccagcagcggcgagtacagaagaagcggccacagcagaggcgccctgccctggagccactggggcaccaccagactgcagggcctggacctgacctgcctgctgttctgcctgcccctggtgagaagacagctgcccgtggaggagcccaaccccgccaagagactgctgttcctgctgctgaccatcgtgttctgccagatcctgatggccgaggagggcgtgcccgcccccctgccccccgaggacgcccccaacgccgccagcctggcccccacccccgtgagcgccgtgctggagcccttcaacctgaccagcgagcccagcgactacgccctggacctgagcaccttcctgcagcagcaccccgccgccttctag

SEQ ID NO: 141894 - DNA, 471 bp, Artificial Sequence
  derived and/or modified sequence
atgtgccacagcagaagctgccaccccaccatgaccatcctgcaggcccccacccccgcccccagcaccatccccggccccagaagaggcagcggccccgagatcttcaccttcgaccccctgcccgagcccgccgccgcccccgccggcagacccagcgccagcagaggccacagaaagagaagcagaagagtgctgtaccccagagtggtgagaagacagctgcccgtggaggagcccaaccccgccaagagactgctgttcctgctgctgaccatcgtgttctgccagatcctgatggccgaggagggcgtgcccgcccccctgccccccgaggacgcccccaacgccgccagcctggcccccacccccgtgagccccgtgctggagcccttcaacctgaccagcgagcccagcgactacgccctggacctgagcaccttcctgcagcagcaccccgccgccttctag

SEQ ID NO: 141895 - protein, 1496 aa, Artificial Sequence
  derived and/or modified sequence
MALSKGLRLLGRLGAEGDCSVLLEARGRDDCLLFEAGTVATLAPEEKEVIKGQYGKLTDAYGCLGELRLKSGGTSLSFLVLVTGCTSVGRIPDAEIYKITATDFYPLQEEAKEEERLIALKKILSSGVFYFSWPNDGSRFDLTVRTQKQGDDSSEWGNSFFWNQLLHVPLRQHQVSCCDWLLKIICGVVTIRTVYASHKQAKACLVSRVSCERTGTRFHTRGVNDDGHVSNFVETEQMIYMDDGVSSFVQIRGSVPLFWEQPGLQVGSHHLRLHRGLEANAPAFDRHMVLLKEQYGQQVVVNLLGSRGGEEVLNRAFKKLLWASCHAGDTPMINFDFHQFAKGGKLEKLETLLRPQLKLHWEDFDVFTKGENVSPRFQKGTLRMNCLDCLDRTNTVQSFIALEVLHLQLKTLGLSSKPIVDRFVESFKAMWSLNGHSLSKVFTGSRALEGKAKVGKLKDGARSMSRTIQSNFFDGVKQEAIKLLLVGDVYGEEVADKGGMLLDSTALLVTPRILKAMTERQSEFTNFKRIRIAMGTWNVNGGKQFRSNVLRTAELTDWLLDSPQLSGATDSQDDSSPADIFAVGFEEMVELSAGNIVNASTTNKKMWGEQLQKAISRSHRYILLTSAQLVGVCLYIFVRPYHVPFIRDVAIDTVKTGMGGKAGNKGAVGIRFQFHSTSFCFICSHLTAGQSQVKERNEDYKEITQKLCFPMGRNVFSHDYVFWCGDFNYRIDLTYEEVFYFVKRQDWKKLLEFDQLQLQKSSGKIFKDFHEGAINFGPTYKYDVGSAAYDTSDKCRTPAWTDRVLWWRKKHPFDKTAGELNLLDSDLDVDTKVRHTWSPGALQYYGRAELQASDHRPVLAIVEVEVQEVDVGARERVFQEVSSFQGPLDATVVVNLQSPTLEEKNEFPEDLRTELMQTLGSYGTIVLVRINQGQMLVTFADSHSALSVLDVDGMKVKGRAVKIRPKTKDWLKGLREEIIRKRDSMAPVSPTANSCLLEENFDFTSLDYESEGDILEDDEDYLVDEFNQPGVSDSELGGDDLSDVPGPTALAPPSKSPALTKKKQHPTYKDDADLVELKRELEAVGEFRHRSPSRSLSVPNRPRPPQPPQRPPPPTGLMVKKSASDASISSGTHGQYSILQTARLLPGAPQQPPKARTGISKPYNVKQIKTTNAQEAEAAIRCLLEARGGASEEALSAVAPRDLEASSEPEPTPGAAKPETPQAPPLLPRRPPPRVPAIKKPTLRRTGKPLSPEEQFEQQTVHFTIGPPETSVEAPPVVTAPRVPPVPKPRTFQPGKAAERPSHRKPASDEAPPGAGASVPPPLEAPPLVPKVPPRRKKSAPAAFHLQVLQSNSQLLQGLTYNSSDSPSGHPPAAGTVFPQGDFLSTSSATSPDSDGTKAMKPEAAPLLGDYQDPFWNLLHHPKLLNNTWLSKSSDPLDSGTRSPKRDPIDPVSAGASAAKAELPPDHEHKTLGHWVTISDQEKRTALQVFDPLAKT

SEQ ID NO: 141896 - protein, 581 aa, Artificial Sequence
  derived and/or modified sequence
MQTLGSYGTIVLVRINQGQMLVTFADSHSALSVLDVDGMKVKGRAVKIRPKTKDWLKGLREEIIRKRDSMAPVSPTANSCLLEENFDFTSLDYESEGDILEDDEDYLVDEFNQPGVSDSELGGDDLSDVPGPTALAPPSKSPALTKKKQHPTYKDDADLVELKRELEAVGEFRHRSPSRSLSVPNRPRPPQPPQRPPPPTGLMVKKSASDASISSGTHGQYSILQTARLLPGAPQQPPKARTGISKPYNVKQIKTTNAQEAEAAIRCLLEARGGASEEALSAVAPRDLEASSEPEPTPGAAKPETPQAPPLLPRRPPPRVPAIKKPTLRRTGKPLSPEEQFEQQTVHFTIGPPETSVEAPPVVTAPRVPPVPKPRTFQPGKAAERPSHRKPASDEAPPGAGASVPPPLEAPPLVPKVPPRRKKSAPAAFHLQVLQSNSQLLQGLTYNSSDSPSGHPPAAGTVFPQGDFLSTSSATSPDSDGTKAMKPEAAPLLGDYQDPFWNLLHHPKLLNNTWLSKSSDPLDSGTRSPKRDPIDPVSAGASAAKAELPPDHEHKTLGHWVTISDQEKRTALQVFDPLAKT

SEQ ID NO: 141897 - protein, 136 aa, Artificial Sequence
  derived and/or modified sequence
  misc_feature (1)..(1): Xaa can be any naturally occurring amino acid
XGRDDCLLFEAGTVATLAPEEKEVIKGQYGKLTDAYGCLGELRLKSGGTSLSFLVLVTGCTSVGRIPDAEIYKITATDFYPLQEEAKEEERLIALKKILSSGVFYFSWPNDGSRFDLTVRTQKQGDDSSEWGNSFF

SEQ ID NO: 141898 - protein, 516 aa, Artificial Sequence
  derived and/or modified sequence
MFLYASGPAPPAGTCRWGGQGGTSLSFLVLVTGCTSVGRIPDAEIYKITATDFYPLQEEAKEEERLIALKKILSSGVFYFSWPNDGSRFDLTVRTQKQGDDSSEWGNSFFWNQLLHVPLRQHQVSCCDWLLKIICGVVTIRTVYASHKQAKACLVSRVSCERTGTRFHTRGVNDDGHVSNFVETEQMIYMDDGVSSFVQIRGSVPLFWEQPGLQVGSHHLRLHRGLEANAPAFDRHMVLLKEQYGQQVVVNLLGSRGGEEVLNRAFKFAKGGKLEKLETLLRPQLKLHWEDFDVFTKGENVSPRFQKGTLRMNCLDCLDRTNTVQSFIALEVLHLQLKTLGLSSKPIVDRFVESFKAMWSLNGHSLSKVFTGSRALEGKAKVGKLKDGARSMSRTIQSNFFDGVKQEAIKLLLVGDVYGEEVADKGGMLLDSTALLVTPRILKAMTERQSEFTNFKRIRIAMGTWNVNGGKQFRSNVLRTAELTDWLLDSPQLSGATDSQGEGSDFGGDKIQLHLT

SEQ ID NO: 141899 - DNA, 4491 bp, Artificial Sequence
  derived and/or modified sequence
atggccctgagcaagggcctgagactgctgggcagactgggcgccgagggcgactgcagcgtgctgctggaggccagaggcagagacgactgcctgctgttcgaggccggcaccgtggccaccctggcccccgaggagaaggaggtgatcaagggccagtacggcaagctgaccgacgcctacggctgcctgggcgagctgagactgaagagcggcggcaccagcctgagcttcctggtgctggtgaccggctgcaccagcgtgggcagaatccccgacgccgagatctacaagatcaccgccaccgacttctaccccctgcaggaggaggccaaggaggaggagagactgatcgccctgaagaagatcctgagcagcggcgtgttctacttcagctggcccaacgacggcagcagattcgacctgaccgtgagaacccagaagcagggcgacgacagcagcgagtggggcaacagcttcttctggaaccagctgctgcacgtgcccctgagacagcaccaggtgagctgctgcgactggctgctgaagatcatctgcggcgtggtgaccatcagaaccgtgtacgccagccacaagcaggccaaggcctgcctggtgagcagagtgagctgcgagagaaccggcaccagattccacaccagaggcgtgaacgacgacggccacgtgagcaacttcgtggagaccgagcagatgatctacatggacgacggcgtgagcagcttcgtgcagatcagaggcagcgtgcccctgttctgggagcagcccggcctgcaggtgggcagccaccacctgagactgcacagaggcctggaggccaacgcccccgccttcgacagacacatggtgctgctgaaggagcagtacggccagcaggtggtggtgaacctgctgggcagcagaggcggcgaggaggtgctgaacagagccttcaagaagctgctgtgggccagctgccacgccggcgacacccccatgatcaacttcgacttccaccagttcgccaagggcggcaagctggagaagctggagaccctgctgagaccccagctgaagctgcactgggaggacttcgacgtgttcaccaagggcgagaacgtgagccccagattccagaagggcaccctgagaatgaactgcctggactgcctggacagaaccaacaccgtgcagagcttcatcgccctggaggtgctgcacctgcagctgaagaccctgggcctgagcagcaagcccatcgtggacagattcgtggagagcttcaaggccatgtggagcctgaacggccacagcctgagcaaggtgttcaccggcagcagagccctggagggcaaggccaaggtgggcaagctgaaggacggcgccagaagcatgagcagaaccatccagagcaacttcttcgacggcgtgaagcaggaggccatcaagctgctgctggtgggcgacgtgtacggcgaggaggtggccgacaagggcggcatgctgctggacagcaccgccctgctggtgacccccagaatcctgaaggccatgaccgagagacagagcgagttcaccaacttcaagagaatcagaatcgccatgggcacctggaacgtgaacggcggcaagcagttcagaagcaacgtgctgagaaccgccgagctgaccgactggctgctggacagcccccagctgagcggcgccaccgacagccaggacgacagcagccccgccgacatcttcgccgtgggcttcgaggagatggtggagctgagcgccggcaacatcgtgaacgccagcaccaccaacaagaagatgtggggcgagcagctgcagaaggccatcagcagaagccacagatacatcctgctgaccagcgcccagctggtgggcgtgtgcctgtacatcttcgtgagaccctaccacgtgcccttcatcagagacgtggccatcgacaccgtgaagaccggcatgggcggcaaggccggcaacaagggcgccgtgggcatcagattccagttccacagcaccagcttctgcttcatctgcagccacctgaccgccggccagagccaggtgaaggagagaaacgaggactacaaggagatcacccagaagctgtgcttccccatgggcagaaacgtgttcagccacgactacgtgttctggtgcggcgacttcaactacagaatcgacctgacctacgaggaggtgttctacttcgtgaagagacaggactggaagaagctgctggagttcgaccagctgcagctgcagaagagcagcggcaagatcttcaaggacttccacgagggcgccatcaacttcggccccacctacaagtacgacgtgggcagcgccgcctacgacaccagcgacaagtgcagaacccccgcctggaccgacagagtgctgtggtggagaaagaagcaccccttcgacaagaccgccggcgagctgaacctgctggacagcgacctggacgtggacaccaaggtgagacacacctggagccccggcgccctgcagtactacggcagagccgagctgcaggccagcgaccacagacccgtgctggccatcgtggaggtggaggtgcaggaggtggacgtgggcgccagagagagagtgttccaggaggtgagcagcttccagggccccctggacgccaccgtggtggtgaacctgcagagccccaccctggaggagaagaacgagttccccgaggacctgagaaccgagctgatgcagaccctgggcagctacggcaccatcgtgctggtgagaatcaaccagggccagatgctggtgaccttcgccgacagccacagcgccctgagcgtgctggacgtggacggcatgaaggtgaagggcagagccgtgaagatcagacccaagaccaaggactggctgaagggcctgagagaggagatcatcagaaagagagacagcatggcccccgtgagccccaccgccaacagctgcctgctggaggagaacttcgacttcaccagcctggactacgagagcgagggcgacatcctggaggacgacgaggactacctggtggacgagttcaaccagcccggcgtgagcgacagcgagctgggcggcgacgacctgagcgacgtgcccggccccaccgccctggccccccccagcaagagccccgccctgaccaagaagaagcagcaccccacctacaaggacgacgccgacctggtggagctgaagagagagctggaggccgtgggcgagttcagacacagaagccccagcagaagcctgagcgtgcccaacagacccagacccccccagcccccccagagaccccccccccccaccggcctgatggtgaagaagagcgccagcgacgccagcatcagcagcggcacccacggccagtacagcatcctgcagaccgccagactgctgcccggcgccccccagcagccccccaaggccagaaccggcatcagcaagccctacaacgtgaagcagatcaagaccaccaacgcccaggaggccgaggccgccatcagatgcctgctggaggccagaggcggcgccagcgaggaggccctgagcgccgtggcccccagagacctggaggccagcagcgagcccgagcccacccccggcgccgccaagcccgagaccccccaggccccccccctgctgcccagaagacccccccccagagtgcccgccatcaagaagcccaccctgagaagaaccggcaagcccctgagccccgaggagcagttcgagcagcagaccgtgcacttcaccatcggcccccccgagaccagcgtggaggccccccccgtggtgaccgcccccagagtgccccccgtgcccaagcccagaaccttccagcccggcaaggccgccgagagacccagccacagaaagcccgccagcgacgaggccccccccggcgccggcgccagcgtgcccccccccctggaggccccccccctggtgcccaaggtgccccccagaagaaagaagagcgcccccgccgccttccacctgcaggtgctgcagagcaacagccagctgctgcagggcctgacctacaacagcagcgacagccccagcggccacccccccgccgccggcaccgtgttcccccagggcgacttcctgagcaccagcagcgccaccagccccgacagcgacggcaccaaggccatgaagcccgaggccgcccccctgctgggcgactaccaggaccccttctggaacctgctgcaccaccccaagctgctgaacaacacctggctgagcaagagcagcgaccccctggacagcggcaccagaagccccaagagagaccccatcgaccccgtgagcgccggcgccagcgccgccaaggccgagctgccccccgaccacgagcacaagaccctgggccactgggtgaccatcagcgaccaggagaagagaaccgccctgcaggtgttcgaccccctggccaagacctag

SEQ ID NO: 141900 - DNA, 4491 bp, Artificial Sequence
  derived and/or modified sequence
atggccctgagcaagggactgcgcttgctgggcaggctcggtgctgagggcgactgtagcgtactcctggaagcccggggaagagatgactgcctcctgtttgaagccggtactgttgccactctggcgcccgaagagaaggaggtgatcaaggggcagtacggtaagctcaccgatgcctacggctgtctgggcgaactgcggctgaaatccggtggaaccagcctctcgtttctagttctcgtgacaggctgcacatctgtcggccggatcccggacgctgagatatataagatcaccgccactgacttctatccgttacaggaggaggctaaagaagaggaaaggttaatcgccttgaaaaagatcctgagcagcggcgtcttctattttagttggcctaatgatgggtcacgtttcgacctcaccgttcgaacccaaaagcagggagatgactcaagcgagtggggaaactccttcttctggaaccagctccttcacgtccctttgcggcagcatcaagtgtcctgctgtgattggctgctcaagattatttgcggcgtcgtaaccattcgtaccgtgtacgcctcccataaacaggcaaaagcctgtctcgttagcagggtgagttgcgaacggacaggtacgcgctttcacacccgtggagtgaatgatgacggccacgtgagcaactttgtcgaaacggagcaaatgatctatatggacgacggagtatcctctttcgtgcaaatccgaggctctgtgcccttattttgggaacagcccggcctgcaggtgggcagtcaccacttacggttgcaccgcggactagaggcaaacgcccccgcgtttgacaggcacatggttttattaaaagaacaatacggtcagcaagtggtggttaatctcctcggctcgagaggcggggaagaagtcctcaatagagccttcaaaaagctcttgtgggcctcctgccacgccggagacacacccatgatcaattttgatttccaccagtttgccaaggggggaaagcttgaaaaactggaaacgctgctgcgcccccagctgaaacttcactgggaagattttgatgtttttactaagggtgaaaacgtctcacccagatttcagaaggggaccctgagaatgaattgtttggactgtctagacagaaccaatactgtgcaaagttttatcgctctcgaggttttgcatctgcaactgaagacgctaggtctgagcagtaaacccatagtcgaccgattcgtggagagcttcaaggctatgtggtccctaaatggacattctctatcaaaggtgttcacggggagcagggcgctggaagggaaagcgaaggtgggtaagctgaaagatggggcaagatccatgtccaggacaattcagagcaacttcttcgacggcgttaagcaagaggctattaagctcctcctggtgggggacgtgtatggcgaggaggtcgctgacaaaggcggaatgttgttagattccacggccctgctcgttactccgaggatcctgaaagcaatgactgagaggcaaagtgaatttacaaactttaagcggatcagaatcgcaatgggaacttggaatgtgaatggcggaaaacaatttcggagtaatgtgctgcgcacagcggagttgaccgattggctgttagactcacctcagctgtctggggcgaccgattcccaagacgactcatctcccgccgatatttttgctgttggatttgaagaaatggtagagctttcggccggcaacattgtcaacgcatcaacgactaacaagaagatgtggggagagcagctgcaaaaggccatctcccgttcccaccgttacattctgctgacctccgctcagctggttggggtttgtttgtatatctttgtacggccatatcatgtgccctttattcgcgacgtggccattgacacggtgaagacagggatgggggggaaggctgggaataaaggagccgtgggaatccggtttcagtttcactctacgtctttctgcttcatttgttcgcacctgactgctggacagagtcaggtcaaggaacggaatgaagattacaaggagatcacccagaagctttgtttccctatgggacggaatgttttctcacacgactacgtgttctggtgcggtgattttaactaccggattgacctcacctacgaagaagtgttctatttcgttaagcgccaagattggaagaagctgctggagttcgaccagctgcaacttcagaagagttctgggaaaatcttcaaagacttccacgagggagcgattaatttcggacctacgtacaagtacgacgtcggctccgccgcatacgacactagcgataagtgcaggacgcccgcttggactgatcgagtgctgtggtggcggaagaaacaccctttcgacaagactgctggagagctcaatctgctcgactctgatctggacgtggacaccaaggtcagacatacatggtcacctggggcacttcaatactacggaagggctgaactgcaggcttcagaccatcgcccagttttggcaatcgtggaggttgaagtgcaggaagtcgatgtgggggcccgtgagcgcgtgtttcaggaggtgtctagttttcagggaccgctcgacgcaaccgtagttgtgaacttacaaagcccaacactggaagagaaaaacgagttcccagaggaccttcggaccgagttaatgcagactctgggttcatacggcacaatcgtacttgtccgcataaaccaaggccagatgctggtgacctttgccgactcgcactcggctctctctgtgctggacgtggacggcatgaaggttaaagggagagccgtgaaaattcgcccaaaaacaaaggactggcttaaaggtttgagggaagagatcatccgcaaaagagacagtatggcgccagtgagtccgacagcaaactcatgcctgttggaggaaaattttgactttacaagtctggactacgaatccgagggagatattctagaggacgatgaagattacttggttgacgaattcaatcaacccggggtctcagattcagaactcggcggtgacgatctgagcgacgtgccaggtcctaccgccctggcccctccctccaaatcccctgccctgacgaagaagaagcaacatccaacttataaggatgatgccgacctggtcgagctcaagcgcgagctggaggctgtgggggagtttcggcaccgctccccttcaaggagcctcagtgtgcccaatagaccaagaccaccacagcccccacagagacccccaccaccaactggacttatggtaaagaagagcgcttcggacgcatccatcagctccggaacacacggccaatactccattctgcagactgcacggctgttgcccggggcaccccagcagccaccgaaggccaggaccggaattagcaagccgtacaatgttaagcaaatcaagaccaccaacgctcaggaggcagaagccgctattaggtgtctcctggaagcccgcggtggcgccagtgaagaagctctgtcagctgtcgcccctcgagatctagaggccagcagcgagcctgaacctacgccgggagctgcaaagcctgagactcctcaagctcctcctctactcccacggcgtcctcctccccgcgtgccagctatcaagaagcctacgctgagaaggactggcaaacccctgagtccggaagagcaatttgaacagcagacggtccatttcacgattggtccacccgagacgagcgtggaagcccccccagtagtaaccgcaccacgggtccccccagtgcctaagccacgtacattccagcctggcaaggccgccgagcgcccaagccacagaaaacccgccagcgacgaagcgccccccggcgctggggccagcgtccccccgcccctggaggcccccccccttgtccctaaggttccaccaagacggaaaaagtctgctccagccgcgtttcacttgcaggttctgcagtcaaatagccagctgctacagggccttacttacaactctagcgactctcctagcggacaccctccagccgccgggactgtgtttccgcagggggatttcctgagcactagcagtgctacttcaccggacagtgatggcactaaagctatgaaaccggaagcggccccattactcggcgactatcaggatccattctggaacttgcttcatcaccctaaactcctgaacaacacttggctttccaagtctagcgacccactggacagcgggacccggtctccaaaacgcgatcctatcgaccctgttagtgctggggcctccgcagctaaagcggagctcccaccagaccatgagcataagaccttagggcactgggtgaccatttctgatcaggaaaaacggacagcattacaagtctttgaccctctggcgaagacctag

SEQ ID NO: 141901 - DNA, 4491 bp, Artificial Sequence
  derived and/or modified sequence
atggccctgagcaagggcctgcggctgctgggccgcctgggcgctgagggggactgcagcgtgctgctggaggcccggggcagagatgactgcctgctgtttgaggccggcaccgtggccaccctggcccctgaggagaaggaggtgatcaagggccagtatggcaagctgacagatgcctacggctgcctgggggagctgcggctgaagagcggcggcaccagcctgtccttcctggtgctggtgacaggctgcacctctgtgggccgcatcccagatgctgagatctacaagatcacagccacagacttctaccccctgcaggaggaggccaaggaggaggagcggctcatcgccctgaagaagatcctgagcagcggggtcttctacttctcctggcccaatgatggcagcagatttgacctgactgtgaggacccagaagcagggagatgacagcagcgagtggggcaacagcttcttctggaaccagctgctgcacgtgcccctgcggcagcaccaggtgtcctgctgtgactggctgctgaagatcatctgtggggtggtgaccatcagaacagtgtatgccagccacaagcaggccaaggcctgcctggtgtcccgggtgtcctgtgagaggacaggcacccgcttccacacccggggcgtgaatgatgatggccacgtgagcaactttgtggagacagagcagatgatctacatggatgatggagtgtcctcctttgtgcagatccggggctctgtgcccctcttctgggagcagcccggcctgcaggtgggcagccaccacctgcggctgcaccggggcctggaggccaatgccccagcctttgacagacacatggtgctgctgaaggagcagtatggccagcaggtggtggtgaacctgctgggcagccggggcggggaggaggtgctgaacagagccttcaagaagctgctgtgggccagctgccacgccggggacacccccatgatcaactttgacttccaccagtttgccaagggcggcaagctggagaagctggagaccctgctgcggccccagctgaagctgcactgggaggactttgatgtgttcaccaagggagaaaatgtgagcccccgcttccagaagggcaccctgaggatgaactgcctggactgcctggacaggaccaacacagtgcagagcttcatcgccctggaggtgctgcacctgcagctgaagaccctgggcctgagcagcaagcccatcgtggacagatttgtggagagcttcaaggccatgtggagcctgaatggccacagcctgagcaaggtgttcaccggcagccgggccctggagggcaaggccaaggtgggcaagctgaaggatggagcccgctccatgagcaggaccatccagagcaacttctttgatggagtgaagcaggaggccatcaagctgctgctggtgggagatgtgtatggagaggaggtggccgacaagggcggcatgctgctggacagcacagccctgctggtgaccccccgcatcctgaaggccatgacagagcggcagagcgagttcaccaacttcaagaggatccgcatcgccatgggcacctggaatgtgaatggaggcaagcagttccgcagcaatgtgctgaggacagctgagctgacagactggctgctggacagcccccagctgagcggggccacagacagccaggatgacagcagccctgctgacatctttgctgtgggctttgaggagatggtggagctgtctgctggcaacatcgtgaatgccagcaccaccaacaagaagatgtggggcgagcagctgcagaaggccatcagccgcagccaccgctacatcctgctgaccagcgcccagctggtgggcgtgtgcctgtacatctttgtgcggccctaccacgtgcccttcatcagagatgtggccatcgacacagtgaagacaggcatgggcggcaaggccggcaacaagggagctgtgggcatccgcttccagttccacagcaccagcttctgcttcatctgcagccacctgacagctggccagagccaggtgaaggagagaaatgaagactacaaggagatcacccagaagctgtgcttccccatgggcagaaatgtgttcagccatgactatgtgttctggtgtggggacttcaactacagaattgacctgacctatgaggaggtgttctactttgtgaagaggcaggactggaagaagctgctggagtttgaccagctgcagctgcagaagagcagcggcaagatcttcaaggacttccacgagggcgccatcaactttggccccacctacaagtatgatgtgggcagcgctgcctatgacaccagtgacaagtgcaggaccccagcctggacagacagagtgctgtggtggaggaagaagcacccctttgacaagacagctggggagctgaacctgctggacagcgacctggatgtggacaccaaggtgcgccacacctggagccctggggccctgcagtactacggccgggcagagctgcaggccagtgaccacaggcctgtgctggccatcgtggaggtggaggtgcaggaggtggatgtgggcgcccgggagagggtcttccaggaggtgtcctccttccagggccccctggatgccaccgtggtggtgaacctgcagagccccaccctggaggagaagaatgagttccctgaggacctgaggacagagctgatgcagaccctgggcagctatggcaccatcgtgctggtgcgcatcaaccagggccagatgctggtgacctttgctgacagccacagcgccctgtctgtgctggatgtggatggcatgaaggtgaagggccgggctgtgaagatccggcccaagaccaaggactggctgaagggcctgcgggaggagatcatcaggaagagggacagcatggcccctgtgagccccacagccaacagctgcctgctggaggagaactttgacttcaccagcctggactatgagagcgagggggacatcctggaggatgatgaggactacctggtggatgagttcaaccagcccggggtgtctgacagcgagctgggcggagatgacctgagtgatgtgcccggccccacagccctggccccacccagcaagagccctgccctgaccaagaagaagcagcaccccacctacaaggatgatgctgacctggtggagctgaagcgggagctggaggccgtgggggagttccgccacaggagccccagccgcagcctgtctgtgcccaaccggccccggcccccccagcccccccagaggcctcctccacccaccggcctgatggtgaagaagagcgccagtgatgccagcatcagcagcggcacccacggccagtacagcatcctgcagacagcccggctgctgcccggggccccccagcagccccccaaggccaggacaggcatcagcaagccctacaacgtgaagcagatcaagaccaccaatgcccaggaggccgaggccgccatccgctgcctgctggaggcccggggcggggccagcgaggaggccctgtctgctgtggccccccgggacctggaggccagcagcgagcctgagcccaccccaggagctgccaagccagagaccccccaggccccacccctgctgccccggcggcccccaccccgggtgcctgccatcaagaagcccaccctgcggaggacaggcaagcccctgagccctgaggagcagtttgagcagcagacagtgcacttcaccatcggccccccagagacctctgtggaggcccctcctgtggtgacagccccccgggtgccccctgtgcccaagcccaggaccttccagcccgggaaggctgctgagcggcccagccacaggaagccagccagtgatgaggcccctcctggagctggggcctctgtgcccccacccctggaggccccacccctggtgcccaaggtgccccccaggaggaagaagagcgccccagctgccttccacctgcaggtgctgcagagcaacagccagctgctgcagggcctgacctacaacagcagtgacagccccagcggccaccccccagctgctggcaccgtcttcccccagggcgacttcctgagcaccagcagcgccaccagcccagacagtgatggcaccaaggccatgaagccagaggccgcccccctgctgggggactaccaggaccccttctggaacctgctgcaccaccccaagctgctgaacaacacctggctgagcaagagcagtgaccccctggacagcggcaccaggagccccaagagggaccccattgatcctgtgtctgctggggccagcgctgccaaggccgagctgcccccagaccacgagcacaagaccctgggccactgggtgaccatcagtgaccaggagaagaggacagccctgcaggtgtttgaccccctggccaagacctag

SEQ ID NO: 141902 - DNA, 4491 bp, Artificial Sequence
  derived and/or modified sequence
atggccctgagcaagggcctgcggctgctgggccggctgggcgccgagggcgattgctcagtgctgttagaggcgaggggtagagacgattgtctgcttttcgaggccgggactgtggccacactggcccccgaggaaaaggaggtcataaagggtcagtatggcaaacttaccgacgcatacgggtgtttgggagaacttcgtctaaagagcggcggcacctcactgtctttcttggtactggtcaccggttgcacttctgtcggacgcatacccgacgctgaaatctacaaaatcaccgccactgacttttacccactgcaagaagaagccaaagaggaggagcgcctgatagcccttaagaaaatcctctccagcggggtgttctacttctcttggcccaatgacgggtcacgctttgacctcactgtccggacccagaagcaaggggatgacagttctgagtggggaaactcctttttttggaaccagcttctgcatgtgcccctcaggcagcatcaggtaagctgttgtgactggctcctcaaaatcatctgtggcgtcgtgacaatacgcacagtctatgcctcccataagcaggccaaggcttgtctggtttcccgtgtctcctgtgaacgcaccggaacgagatttcatacaagaggtgtgaatgacgacggacatgtgtcgaatttcgtcgagacagaacagatgatatacatggatgatggcgtttcaagcttcgttcaaatcagaggttcagtacccctgttttgggaacagccaggcctgcaggtgggcagccatcacctgcggctccatcggggacttgaggccaacgcccccgcttttgataggcacatggtgctgctcaaggaacagtacgggcagcaagtggtcgtgaacttgctgggttcccggggtggggaagaagtacttaaccgtgcctttaaaaagttgctgtgggcgtcttgtcacgcaggcgatacccccatgatcaactttgactttcaccagtttgctaaaggtggcaaacttgaaaagctggagacactgctgcgaccacagctcaaactgcactgggaggattttgacgtcttcaccaagggtgagaacgtgagcccccgctttcagaagggtacactgagaatgaattgtttggattgcctggaccggacaaacactgtccagtcattcattgcgctcgaagtgctgcatctccaactcaagacgctggggctttcctcaaagcccatagtagaccgattcgtggaaagcttcaaagctatgtggtctcttaacggccacagcctgagcaaagtgtttacagggagcagggctcttgagggcaaggccaaagtggggaagctgaaggacggcgctcgctccatgagtcgtactattcaatccaacttcttcgatggcgtcaaacaggaagcaattaagctcctcctggtcggagacgtttatggcgaggaagtcgctgacaagggtggcatgctgcttgactcaacagcactgctggtcaccccccgtattctgaaggccatgacagagagacagtccgagtttactaacttcaagcgaataagaatcgcgatggggacctggaatgttaatggcggcaagcaatttcgcagtaacgtcttaaggaccgccgaactcaccgactggctactggattccccacagctctctggcgctacagactcacaggatgactcttctccagcggatatctttgcagtcggtttcgaggaaatggttgagctgagtgcaggcaatattgtaaacgcctccaccacaaataaaaaaatgtggggagaacagctgcagaaagccatcagcagatcacatagatacatcctgttaaccagtgcgcagctggtcggggtgtgtctgtatatctttgtgcgaccctatcatgtgccattcatacgcgatgtggccatcgacacagtaaagactgggatgggcgggaaggcgggcaacaagggagccgtcggcattcgcttccagtttcactccacctccttttgtttcatttgtagtcatctcacagctggccagtcccaggtgaaagaacgtaatgaagactataaggaaatcacgcagaagttgtgctttccaatgggcaggaacgttttttcccatgattatgtgttctggtgtggtgactttaactacagaatcgatttgacatacgaagaagtattctactttgtgaagagacaggactggaagaagctccttgagtttgaccaacttcaactccagaagtcctcaggtaagattttcaaggatttccatgagggtgccatcaattttgggcccacttacaaatacgacgtggggtctgccgcctatgacacatcggataaatgtaggaccccggcttggaccgatcgggtgctatggtggaggaagaaacacccatttgacaaaacagcaggcgagctgaacctgttagattcagacttagacgtcgacaccaaagtccgtcatacttggtccccaggcgctctgcagtactacggcagagctgagctacaagcatctgaccaccgccccgtattagcgatcgtggaggtggaggtgcaggaggtggacgttggagctagggagcgcgtgttccaggaagtgtcgtccttccaaggacctctggacgcaactgtagtcgttaatctgcaaagtccaacactagaggagaaaaacgagttcccagaagacctccgcactgagctgatgcagaccctcggctcttacggcactattgtcctggtgcggatcaaccagggtcagatgctcgtgacatttgctgactcccattccgctctatccgtgttggacgtggatggaatgaaagtaaaaggccgggcggttaagattagaccaaaaaccaaggactggctgaagggtctccgcgaggaaatcattcgcaaacgtgacagcatggctcccgtgtcgcctacagcgaatagctgcctgctcgaagagaattttgacttcacttccctggactatgagagcgaaggagatatcctggaggatgacgaggactaccttgtagatgagtttaatcagcccggagtgtcagatagcgaattggggggagacgatctgtccgacgttcctgggccaacagcactggctccgcctagcaaatcacctgccttaaccaagaagaaacagcaccctacgtataaggacgacgccgacctggtcgaactcaaaagagaactcgaggccgtcggtgaatttagacaccgaagtccttctcggagtctctccgttccaaatagaccgcgccctcctcagccacctcagcgccccccaccaccaaccggcctaatggtgaaaaaatctgcctctgacgcatcaatatcttctggaactcatggccagtacagcatcctccagactgctcgcctgctcccaggcgccccacagcagccaccaaaggcccggactggaatatctaaaccatacaatgtaaagcagataaaaactaccaacgctcaggaagccgaggctgctatccgctgcctgctcgaggcccggggaggggcatctgaggaagccctaagcgccgtggctccacgggatctggaggcatcctcagagcctgaaccgactcccggggctgcaaaaccggaaacgcctcaggccccccctctgctccctagacgtcccccccctcgcgttcctgccatcaagaagccgactctgcgaaggaccggcaagcccttgtccccggaagaacagttcgagcaacaaacggtgcatttcaccattggacccccggagactagtgtcgaggctccccccgtggtgaccgcccctcgcgtccctcccgtgcccaagcctcgaacctttcaaccaggcaaggccgccgaacggccaagccacagaaagcccgctagtgatgaggctcccccaggggcgggggcctccgtcccgccgccactggaggccccccccctggtgcctaaagtaccccctcggcgtaaaaagtctgcccctgcggccttccacctccaagtgctgcagtcgaattcccagctgctccagggactgacttataattcttcggactcaccttctgggcatccgcccgccgctggtaccgtattccctcagggggattttctgtccacatccagcgccacctcccccgactctgacggtacaaaagcaatgaagcctgaagccgcccctcttctgggagactaccaggatcctttttggaatcttttgcaccatccaaagctattgaacaacacctggttatccaagagcagcgaccctctggactcaggaacccgcagcccaaagcgggacccaatcgaccccgtgtccgcgggcgcaagcgctgctaaagcagaactgccccctgaccacgaacacaaaacactgggacactgggttactatttccgatcaagagaagaggacagctctgcaggtattcgaccctctggccaagacctag

SEQ ID NO: 141903 - DNA, 4491 bp, Artificial Sequence
  derived and/or modified sequence
atggccttgtccaaagggctccggctcctcggacggcttggagccgagggagattgctcagtcttgttggaagccaggggaagggatgactgcctactgttcgaggcgggaactgttgcaaccctggcccctgaagaaaaagaagtgatcaagggtcagtacggcaaactcaccgatgcttacggttgcctgggggaacttagattgaaatctggtgggacctccctgagttttctggtgctagtaactggatgcacaagcgtgggccgaatcccagatgcagaaatatacaagatcactgctacagatttctaccctctgcaggaggaagccaaggaagaggaaagattgatcgcccttaagaagattttatcaagcggcgtcttttatttttcttggccaaacgacggctccaggtttgacctcaccgtaaggactcagaagcagggtgacgattctagtgagtggggtaatagtttcttttggaatcaactgctgcatgtacctttgcggcagcatcaggtcagctgctgtgactggctgctcaagattatttgcggagtcgttaccatccggacagtgtacgctagccacaaacaggctaaagcctgcctggtgtcaagggtgtcatgcgaaaggacgggaactaggtttcacacaagaggcgtgaatgacgatggacacgtttcaaacttcgtggaaactgaacagatgatatatatggatgatggagttagttcgtttgtgcagattagaggaagcgtcccccttttctgggaacagccagggcttcaggtcggttcgcaccatctccgactgcaccgaggactggaagcaaatgccccagcgtttgacagacatatggtgctcctcaaagagcagtatggtcagcaagtggttgtgaacctgctcggtagtcgcggtggtgaagaggtgctcaatcgagccttcaagaaactgttgtgggcctcctgtcatgccggtgatactcctatgattaactttgattttcaccagttcgccaagggaggcaagttggagaaattggagaccctgcttaggcctcagctgaagctgcactgggaggatttcgacgtgttcacaaaaggcgagaatgtctccccgagattccaaaaagggaccctgcgcatgaattgcctcgactgcctcgataggacaaacactgtccagtccttcatagctctcgaagtccttcacctgcagctcaagactctgggactctcctccaaaccaatcgtagatcgcttcgttgagagcttcaaggccatgtggtcgctaaatggacacagcctttccaaggtattcacaggctcgcgggctctagagggaaaagccaaggtgggcaagttaaaggatggtgcgaggagcatgtcacgcacaattcagagtaatttttttgacggcgtcaagcaggaagccatcaaattgttgctggtgggcgatgtctacggagaggaagtcgccgacaaaggcggtatgctgttggacagtacggcgctgttagtgaccccacggattttaaaagccatgaccgagaggcagagcgagttcaccaattttaaaaggatccgtatcgctatggggacctggaatgtgaatggaggcaaacagttcagatccaatgtgctgagaactgctgagctcacggactggctgctggatagtccccagctcagtggagccaccgattcgcaggatgattcgtcgcccgctgacattttcgccgtaggattcgaggaaatggtagagctgtctgctggcaatatcgttaacgcctccacaacaaataaaaaaatgtggggggaacaactccagaaggcaatctctcggtcccatcgctacattttgctgacatctgcgcaattagtgggcgtgtgcctgtatatattcgtccggccttatcatgtgccattcattcgagacgttgcgatcgacacagtaaagactgggatgggcggaaaagcaggcaataagggggctgtgggaatccgtttccaattccactcaaccagcttttgctttatctgcagtcacctgactgccggacagagtcaggtgaaggagaggaatgaagattacaaggaaatcactcagaagctttgtttccctatgggaagaaacgtgttctcgcatgactacgttttctggtgcggagattttaattacaggatcgacctcacatacgaagaagtcttctatttcgttaaaagacaagattggaagaagctgctcgaattcgaccaacttcagctgcagaagagctccggaaagatattcaaggactttcatgagggggcaatcaactttggaccaacgtataaatatgacgttgggtcggctgcatacgacacgagcgacaagtgtcggactccagcctggacagatagagtcctgtggtggaggaagaaacacccttttgataagactgcaggagagttaaatctgctggatagcgacctcgacgtcgacaccaaagtgaggcacacatggagccccggtgcgctgcagtactatggcagagccgagctacaggcttctgaccacagacctgtgttggctattgtagaggtcgaagtgcaggaggtggacgtgggggctcgtgagagggtttttcaggaagtatccagctttcagggcccactcgacgctacagttgtcgtgaacctgcagtcccctactctggaggagaagaatgagtttcccgaagacttaagaacagagcttatgcagaccttgggctcctatgggacaattgtccttgtccgcataaaccaggggcagatgttagtcacgtttgctgattcacacagtgccctgtcggtgctcgacgtggatgggatgaaggtgaaggggagagctgtcaaaattcgcccaaaaacaaaagactggctaaagggcttacgcgaagaaattataagaaagcgcgactcaatggctcccgtcagtcccacggccaactcctgcttgctggaggaaaactttgattttactagcctggattacgaatcagagggagacattcttgaagacgacgaggactacctggtggatgagttcaatcagcccggtgtatctgatagtgagttagggggagatgacttaagtgacgtgcctggtccaactgcactggcccctccttccaagagccccgcattgaccaaaaaaaagcagcatcctacttacaaggatgacgccgacctggtcgaattaaagagagagctggaggccgtcggcgagttccgacaccggtcccccagtcgcagtctgtccgtaccaaataggccacgccctccacagccacctcagaggcctccacctcccacaggcctcatggtcaaaaagtcggcctccgacgcaagtatatcatctggtacacacggccagtacagtattctacagacggccaggttactgcctggagcaccacaacagccccctaaggccaggactggcattagcaagccctataacgtgaagcagatcaagaccacaaacgcccaggaggccgaggccgctattcgatgccttttggaggccagagggggtgctagcgaggaagccctgagcgccgtggctcctcgggacttggaagcttcttctgagcctgagccaactcccggagcagccaagcctgagacccctcaggcaccccctctgctcccgcgtcggcctcctcctcgcgtgcccgcaattaaaaaaccgacactccggaggactggtaagccgctgtctcctgaggagcagttcgagcagcagactgtgcattttaccatagggccacctgagacctcagttgaggcaccaccggtagtgaccgcccctcgcgtcccgcctgtgccaaagcccagaacgtttcagccaggcaaagcggctgagagaccctcacaccgcaaacccgcatccgacgaggccccaccaggcgctggtgcctccgtgcctccgcctctcgaagccccacctctggttcccaaggttccccctaggcgcaagaagagtgccccagctgctttccacctgcaggttttacagagcaacagtcagctccttcagggattaacctataattcttcggatagtccgtcaggacatccccctgctgctggcactgtgtttcctcagggtgattttttaagtaccagcagtgctactagccccgacagcgacggcacaaaagccatgaagcccgaagccgctcccctcctcggcgactaccaggaccccttctggaatctgctgcaccatccaaaactgctcaataacacttggctgtctaagtcaagtgacccgttagatagtgggacacgctcacccaagcgcgatccaattgatccagtcagcgctggggcaagtgccgcaaaagcagagctgcccccagaccatgagcacaagactttggggcattgggtcacgattagcgaccaagaaaagcggaccgccttgcaagtgtttgatccattggctaagacctag

SEQ ID NO: 141904 - DNA, 7378 bp, Artificial Sequence
  derived and/or modified sequence
gcggggagctgtcgcgggcagcgcgccctcgggaggacgtggccccggcccccgcccgcagtgggcccgaccctcatggccctgagcaaagggctgcggctgctggggcgcctgggggccgagggggactgtagcgtgctgctggaggcgcgcggccgcgacgactgcctgctgttcgaggccggcacggtggccacgctggctccagaagaaaaggaagtcattaaaggacagtatggcaagctcacggacgcgtacggctgcctgggggagctgaggctgaaatctggtggcacgtctctgagcttcctggtgttggtgacaggctgcacatctgtgggcagaattccagatgctgaaatctacaaaatcactgccactgacttttaccctcttcaggaagaggccaaggaggaggaacgcctcatagctttgaagaaaatcctcagctcgggggtgttctatttctcatggccaaacgatgggtctcgctttgacctgactgtccgcacgcagaagcagggggatgacagctctgaatgggggaactccttcttctggaaccagctgttgcacgtgcccttgaggcagcaccaggtgagctgctgtgactggctgctgaagatcatctgcggggtggtcaccatccgcaccgtgtatgcctcccacaagcaggccaaggcctgcctcgtctctcgcgttagctgtgagcgcacaggcactcgcttccacacccgtggcgtgaacgacgacggccatgtgtccaacttcgtggagacagagcagatgatttacatggacgatggagtgtcatcttttgtccagatcagaggctccgttccgctgttctgggaacagccagggcttcaggttggctcccatcatctgagactccacagaggcctggaagccaatgcccctgctttcgacaggcacatggtgcttctgaaggagcagtacgggcagcaggtggtcgtgaaccttctgggaagcagaggcggagaggaggtgctcaacagagccttcaagaagctgctctgggcttcttgccacgcgggcgacacgcctatgatcaattttgacttccatcagtttgccaaaggtgggaagctagagaaattggagaccctcttgaggccacagttaaagctgcactgggaagacttcgatgtgttcacaaagggggagaacgtcagtccacgttttcagaaaggcactttgcggatgaactgtcttgactgcctggaccgaaccaacactgtgcagagcttcatcgcgctcgaggtcctgcatctgcagctcaagaccctggggctgagttcaaaacccatcgttgaccgctttgtggagtccttcaaagccatgtggtctctgaatggccacagcctgagcaaggtgttcacaggcagcagagccctggaagggaaggccaaggtggggaagctgaaggatggagcccggtccatgtctcgaaccatccagtccaacttcttcgacggggtgaagcaggaggccatcaagctgctgctggttggggacgtctacggcgaggaggtggcagacaaagggggcatgctgctggacagcacggcgctcctggtgactcccaggatcctgaaagctatgactgagcgtcagtccgaattcacaaatttcaagcggatccggattgctatggggacctggaacgtgaacggaggaaagcagttccggagcaacgtgctcaggacggcggagctgacagactggctgctcgactcgccccagctctcgggagctaccgactcccaggatgacagcagcccagctgacatatttgctgtggggtttgaagagatggtggaattgagcgcagggaatattgtcaatgccagtactaccaacaagaagatgtggggtgaacagcttcagaaagccatctcacgctctcatagatacattctgttgacttcggcacagctggtgggcgtctgtctttatatctttgtacgtccataccatgtcccgttcatcagggacgtagccatcgacacagtgaagacgggcatggggggcaaggcggggaacaagggcgccgtcggcatccgcttccagttccacagcaccagcttctgcttcatatgtagtcacctgacggccgggcagtcccaggtgaaggagcggaatgaagactacaaggagatcacccagaaactctgcttcccaatggggagaaatgttttttctcatgattatgtattttggtgtggcgatttcaactaccgcattgatcttacttatgaagaagtcttctattttgttaaacgccaagactggaagaaacttctggaatttgatcaactacagctacagaaatcaagtggaaaaatttttaaggactttcacgaaggagccattaactttggacccacctacaagtatgacgttggctcagccgcctacgatacaagcgacaaatgccgcacccccgcctggacagacagggtgctgtggtggaggaagaaacatccctttgataaaacagctggagaactcaaccttctagacagtgatctagatgttgacaccaaagtcagacacacctggtctcctggtgccctgcagtattatggtcgtgcggagctacaagcgtctgatcacagacctgtgctggcgatcgtggaggtggaagttcaggaagtcgatgtgggtgctcgggagagggttttccaggaagtgtcctccttccagggccccctggatgccactgttgtagtaaaccttcaatcaccgaccttagaagagaaaaacgagtttccagaggacctgcgtactgagctcatgcagaccttggggagttatgggacaattgttcttgtcaggatcaaccaagggcagatgctggtaacttttgcagacagtcactcggctctcagtgtcctggacgtggacggtatgaaggtgaaaggcagagcagtgaagattagaccgaagaccaaggactggctgaaaggtttgcgagaggagatcattcggaaacgagacagcatggcccccgtgtctcccactgccaactcctgtttgctggaggaaaactttgacttcacaagtttggactatgagtcagaaggggatattcttgaagacgatgaagactacttggtggatgaattcaatcagcctggagtctcggacagtgaactcgggggagacgacctctctgatgtccccggccccacagcactggctcctcccagcaagtcacctgctctcaccaaaaagaagcagcatccaacgtacaaagatgacgcggacctggtggagctcaagcgggagctggaagccgtcggggagttccgccaccgttctccgagcaggtctctgtcggtccccaaccggcctcggccacctcaacccccgcagagacccccccctccaaccggtttaatggtgaaaaagtcggcttcagatgcgtccatctcctccggcacccatggacagtattcaattttgcagacggcaagacttctaccaggagcacctcagcaacctcccaaggctcggactggaataagtaaaccttataatgtcaagcagatcaaaaccaccaatgcccaggaggcagaagcagcaatccggtgtctcctggaagccagaggaggtgcctccgaagaagccctaagtgccgtggccccaagggaccttgaagcatcctctgaaccagagcccacaccgggggcagccaaaccagagaccccacaggcgcccccactccttccccgtcggcccccacccagagttcctgccatcaagaagccaaccttgagaaggacaggaaagcccctgtcaccggaagaacagtttgagcaacagactgtccattttacaatcgggcccccggagacaagcgttgaggcccctcctgtcgtgacagcccctcgagtccctcctgttcccaaaccaagaacatttcagcctgggaaagctgcagagaggccaagccacaggaagccagcatcagacgaagcccctcctggggcaggagcctctgtgccaccacctctggaggcgccgcctcttgtgcccaaggtacccccgaggaggaagaagtcagcccccgcagccttccacctgcaggtcctgcagagcaacagccagcttctccagggcctcacttacaatagcagtgacagcccctctgggcacccacctgccgcgggcaccgtcttcccacaaggggactttctcagcacttcatctgctacaagccccgacagcgatggcaccaaagcgatgaagccagaggcagccccacttcttggtgattatcaggaccccttctggaaccttcttcaccaccctaaactgttgaataacacttggctttctaagagctcagaccctttggactcaggaaccaggagccccaaaagagatcccatagacccagtgtcagctggcgcttcagctgccaaggcagagctgccaccagatcatgaacacaaaaccttaggtcactgggtgacaatcagtgaccaagaaaagaggacagcactgcaggtgtttgacccactggcaaaaacatgactgagcagctttgaaggctgcagtcctatagaatgcataccttcctccctctagacatccctccaccagaagagacatctatttaaaggcacactggccaaaacgtttgtgcatctgtcactctcgtgtagtttacaaaaatcgtgtctcttattcagtaagatggttactcagccaccaaaatatatttcactcaaggcttgtacatctgaagtttgctcttcaaggaatgggaaccttcctgttaaattcggtgtatggattttaagaaaggaatctagccaatgaggtccaagaagttctcacccattgaatttttaaatggctgttcagttcatgttgtacgtgatggagatttgtcttttgttttatttgcattttacagatttggtataacattttggggagccacctgaaggttgatgtataaagtaaggattagagaaagaggtcgttgtgaccattagtagctgtcctggcccacttaaacaaggttacaaaaaatcagagtcggaagcagccaaataggtcaacctaatgactagactgtacattcccatgagccttcatgtttaagtgtgtacatgtgcgttaaccttgatgatgcgtgaatcccgagggagccggtggcatacaccgttagcttaaccttagcttaaactagctgaaggctcctgtgccatgtcttagacattgcatgccctatcaattactataatcctgagccatggtgtgctactgaaaccaatttttatccaccatctagtccttattaaatgaaacctcacggatcctttgttccgcttatattccatgcataccacataaaagcacacagtgcgaaaactcttgctgatacgcgatattgattctcattgttagaatatggagagtgtttcagcctcgtctgtccggctggagcttcgggatggaaagtgctatgtgtccctgcatataagaatcaccaggccagtgtttctgggtttgcttgtctatatgtttgtctatattttttgcctatacatttttcccacgtttccaacagcacttctcacctattcaataactgaaaaagacattaccatagtgctttacatttttaaagtaatgttacaaggtctggaatccatttggagcagataccgtgttttcgctatttaataagaagttcagtagtgaaatcttactgtaccgcctgttgtatctgggagcctcgtacagaggctcgcacagcagtgatcaagtgtcatcccttacgtgactgggggatgtctgtcctaaaagctgactgctaggatagtaaggatcatcttgcctgggctatgccactgtcttgttaccaattagacatctggaatttcataattagttttcattgtcactgtcaagatatattgcagattacttaaatatggccatcaaaacaaaagttacaacacgtatctcttttcatctgaaaactaatacctggaaaaggataaaaaaaaaaaggaatccgtgacccacagagctagacagataagatgcatagttgaccagtcataaaaggcggtgtttaggtgatcaggatgccgttggtggcatttacgtgctttatatgatttttacctctgtaacaaacacaagaaataaacagaatggtccttaacagagtttgggggagagagcaagatgggttccttggagaagctgatttgccaagatgcacatcgctattaacagccagagtcataaatgaaatgaaattgaagaattcattcaaatgctcttttccctataacctcttttctcaccaaaaaggagataaatttgaaaacagataaatgtaacaaccagtcaaagaagcaggggaaaagtaagctcctccaaagttgcttgcagtgctggaaatagatctcatttttaggttttctcttcgttccagataccaaataaatgggacagagaataaaatttttgttaaaatatgtgctcatctcctaagtagctcttcagagtctgaccgtaagtaaaaacacacagaattgtgttgactgggggaggtgaatcacaaaaaagttacgaggagtttaagagttaaatattatttgatcgtggctgtcaaatttagtgaacaacatagattggatttggagttggtagtaggtatggttctcataccagaattctcttaaaaaaaaaaaaaaggacaattggaattgccttatttatttttaaaatcaatgcttactagttggtaggattcccaggtcagcagcagggttgattaaataatcttgacaatgagcagctgccatcttgggggatttcattctgtggttttttaaatgtttcgtctttgatgctaccatccagggcttcttattgtgaccttgtagcctattttgttcctgctgttctctaacatggtgcagttcacgcagactggtttaggtacttcacaactcaccattgtctctctgaccccaagcctagtcccttttacatcaccatcttctcagacttcttgcctattcttaaaatatgttttggttaatgattgaattaggacatcagcttaagcaattcctgtaacggtttaacgttgttgaagttcaaggcacataataaaattctccctgatgtgtgtgtaagtataaacaaagtaatgtatcaaagcgttcactttataatgaagtcatttcattgggaaggaaagctgcaaagattattgggggactagtgattaataaaatcctgtaatatttttgaagtgaaaatttgtactgaaattgtacatgatacctattaaatgtttttgtctttttttaaa

SEQ ID NO: 141905 - protein, 356 aa, Artificial Sequence
  derived and/or modified sequence
MAMSYVKDDIFRIYIKEKKECRRDHRPPCAQEAPRNMVHPNVICDGCNGPVVGTRYKCSVCPDYDLCSVCEGKGLHRGHTKLAFPSPFGHLSEGFSHSRWLRKVKHGHFGWPGWEMGPPGNWSPRPPRAGEARPGPTAESASGPSEDPSVNFLKNVGESVAAALSPLGIEVDIDVEHGGKRSRLTPVSPESSSTEEKSSSQPSSCCSDPSKPGGNVEGATQSLAEQMRKIALESEGRPEEQMESDNCSGGDDDWTHLSSKEVDPSTGELQSLQMPESEGPSSLDPSQEGPTGLKEAALYPHLPPEADPRLIESLSQMLSMGFSDEGGWLTRLLQTKNYDIGAALDTIQYSKHPPPL

SEQ ID NO: 141906 - protein, 440 aa, Artificial Sequence
  derived and/or modified sequence
MASLTVKAYLLGKEDAAREIRRFSFCCSPEPEAEAEAAAGPGPCERLLSRVAALFPALRPGGFQAHYRDEDGDLVAFSSDEELTMAMSYVKDDIFRIYIKEKKECRRDHRPPCAQEAPRNMVHPNVICDGCNGPVVGTRYKCSVCPDYDLCSVCEGKGLHRGHTKLAFPSPFGHLSEGFSHSRWLRKVKHGHFGWPGWEMGPPGNWSPRPPRAGEARPGPTAESASGPSEDPSVNFLKNVGESVAAALSPLGIEVDIDVEHGGKRSRLTPVSPESSSTEEKSSSQPSSCCSDPSKPGGNVEGATQSLAEQMRKIALESEGRPEEQMESDNCSGGDDDWTHLSSKEVDPSTGELQSLQMPESEGPSSLDPSQEGPTGLKEAALYPHLPPEADPRLIESLSQMLSMGFSDEGGWLTRLLQTKNYDIGAALDTIQYSKHPPPL

SEQ ID NO: 141907 - protein, 140 aa, Artificial Sequence
  derived and/or modified sequence
MAMSYVKDDIFRIYIKEKKECRRDHRPPCAQEAPRNMVHPNVICDGCNGPVVGTRYKCSVCPDYDLCSVCEGKGLHRGHTKLAFPSPFGHLSEGFSHSRWLRKVKHGHFGWPGWEMGPPGNWSPRPPRAGEARPGPTAES

SEQ ID NO: 141908 - protein, 296 aa, Artificial Sequence
  derived and/or modified sequence
MTSSESTLKRKKSAGGTTAHRVLRRRPFGHLSEGFSHSRWLRKVKHGHFGWPGWEMGPPGNWSPRPPRAGEARPGPTAESASGPSEDPSVNFLKNVGESVAAALSPLGIEVDIDVEHGGKRSRLTPVSPESSSTEEKSSSQPSSCCSDPSKPGGNVEGATQSLAEQMRKIALESEGRPEEQMESDNCSGGDDDWTHLSSKEVDPSTGELQSLQMPESEGPSSLDPSQEGPTGLKEAALYPHLPPEADPRLIESLSQMLSMGFSDEGGWLTRLLQTKNYDIGAALDTIQYSKHPPPL

SEQ ID NO: 141909 - protein, 167 aa, Artificial Sequence
  derived and/or modified sequence
MAMSYVKDDIFRIYIKEKKECRRDHRPPCAQEAPRNMVHPNVICDGCNGPVVGTRYKCSVCPDYDLCSVCEGKGLHRGHTKLAFPSPFGHLSEGFSHSRWLRKVKHGHFGWPGWEMGPPGNWSPRPPRAGEARPGPTAESASGPSEDPSVNFLKNVGESVAAALSPL

SEQ ID NO: 141910 - DNA, 1323 bp, Artificial Sequence
  derived and/or modified sequence
atggccagccttactgtaaaggcctatctgctggggaaggaagacgccgcccgcgagatccggcgtttcagcttctgctgttccccagagcctgaggccgaggctgaggctgctgccggtcctggcccttgtgaacgtctgctgagcagggtcgctgctctgtttccagcactgcgacctgggggtttccaggcacactatagggatgaggacggcgatctagtggccttcagtagcgatgaagaactgaccatggccatgtcatatgtcaaagacgatatctttcgaatttatattaaagaaaagaaggaatgtcggagggaccataggccgccatgtgcccaggaagcgccacggaatatggtccatccgaatgtaatctgcgacgggtgcaatggcccagtggtgggcacaagatacaagtgtagtgtctgccctgattatgacctctgttcagtctgcgaaggcaaagggcttcaccgaggacacaccaaactagcattcccatccccattcggacacctcagcgaaggcttcagccacagcagatggcttcggaaggtgaaacacgggcacttcggttggcctgggtgggaaatgggacctccgggcaattggagtcccagacctccccgtgccggagaagcgcggcccgggccaactgccgaaagtgcctctggcccatccgaagatccctccgtcaacttccttaagaatgtaggggaatccgttgcagccgccttgtccccgctcggcatcgaagttgatatagacgtcgaacatggcggtaagaggtccaggttgactcctgtctcaccagagagctcttccaccgaggaaaagagctccagccagccaagctcgtgttgttcagacccatcgaaacctggcgggaatgtggagggcgcgacccagagcctcgccgagcagatgcgcaaaatcgctctggagtctgaaggacgacctgaagaacagatggaaagtgacaactgctcaggcggtgacgatgattggacgcacctgtcctccaaagaagtggacccatccactggcgagctgcaatcactgcagatgcccgaatccgaagggccttcctctctcgatccctcccaagagggccccaccggcttgaaagaggctgcactctacccccacctgccccctgaagcggacccccgattgatagaatctctttcacagatgctttccatgggtttttctgatgaaggaggttggcttactcgcctcctccaaaccaaaaactatgacataggcgctgcccttgataccatccagtatagtaaacacccaccgccactgtag

SEQ ID NO: 141911 - DNA, 1323 bp, Artificial Sequence
  derived and/or modified sequence
atggccagcctgactgtgaaggcctacctgctgggcaaggaggatgctgcccgggagatccgccgcttctccttctgctgcagccctgagcctgaggccgaggccgaggccgctgctggccctggcccctgtgagcggctgctgagccgggtggccgccctcttccctgccctgcggcctgggggcttccaggcccactacagagatgaagatggagacctggtggccttcagcagtgatgaggagctgaccatggccatgtcctatgtgaaggatgacatcttccgcatctacatcaaggagaagaaggagtgccggcgggaccacaggcctccctgtgcccaggaggcccccaggaacatggtgcaccccaacgtcatctgtgatggctgcaatggacctgtggtgggcacccgctacaagtgcagcgtgtgcccagactatgacctgtgcagcgtgtgtgagggcaagggcctgcaccggggccacaccaagctggccttccccagccccttcggccacctgtctgagggcttcagccacagccgctggctgaggaaggtgaagcacggccacttcggctggccaggctgggagatgggccccccaggcaactggagcccccggccccccagggctggggaggcccggcccggccccacagctgagagcgccagcggccccagcgaggaccccagcgtgaacttcctgaagaatgtgggggagagcgtggccgccgccctgagccccctgggcatcgaggtggacattgatgtggagcacggcggcaagaggagccggctgacccctgtgtccccagagagcagcagcacagaggagaagagcagcagccagcccagcagctgctgcagcgaccccagcaagccaggcggcaatgtggagggcgccacccagagcctggccgagcagatgaggaagatcgccctggagagcgagggccggcctgaggagcagatggagagtgacaactgcagcggaggagatgatgactggacccacctgagcagcaaggaggtggaccccagcactggagagctgcagagcctgcagatgcctgagagcgagggccccagcagcctggaccccagccaggagggccccaccggcctgaaggaggccgccctgtacccccacctgcccccagaggccgacccccggctgattgagagcctgagccagatgctgtccatgggcttcagtgatgagggcggctggctgacccggctgctgcagaccaagaactatgacatcggggccgccctggacaccatccagtacagcaagcaccccccacccctgtag

SEQ ID NO: 141912 - DNA, 1323 bp, Artificial Sequence
  derived and/or modified sequence
atggccagcctgaccgtgaaggcctacctgctgggcaaggaggacgccgcaagggagataaggcggttctcattctgctgtagcccggagcccgaggccgaggctgaggctgctgccggaccagggccttgcgagcggctgctatccagagtggccgccctctttcccgcattgaggcctggcggatttcaggcccattatcgagatgaagatggcgacttagtcgctttctcctccgacgaagaactcactatggccatgagttacgttaaggacgatatttttcggatctatattaaagagaaaaaggaatgtcgcagggatcatcgacctccctgcgctcaggaagccccccggaacatggtgcaccccaatgttatatgcgacgggtgcaatggccctgtcgtcggcacaagatataaatgctcggtgtgccctgattacgatctctgtagcgtctgtgagggcaaaggtctgcaccgcggacatactaagctggcgttcccttctccgttcggacatctgagcgaagggttctcccactctcgatggcttagaaaggtaaagcacggccattttggctggccgggttgggaaatgggccctccaggcaattggagcccccgtcccccacgagccggagaagcacgccctggcccaactgcagaatcggcaagcggcccctccgaggacccctcagtgaacttcctcaagaatgtgggagaaagcgtggcagctgctctgtcccctctggggatcgaagtggatatcgacgttgagcatggaggcaaacgctcacgcctaacacctgtctcgcctgagagcagctctactgaagaaaaatcctccagccaaccatcttcctgttgcagcgacccgtcgaaacctggcgggaatgtagaaggtgcaacgcagagcctggccgagcaaatgaggaagattgcattagaaagtgagggacggcctgaggagcagatggagtccgataattgtagcgggggtgatgacgattggacacacctatcctctaaggaagtcgacccctccacaggggagctgcagtctttgcagatgccagagagcgaggggccgagttcactcgacccctcccaagaagggcccacagggttgaaagaggctgccctgtatccacacttaccccctgaggccgatcctagactgattgaaagtctcagtcagatgctgagtatgggttttagcgacgaagggggatggttgacccgcctgctgcagactaaaaactacgatataggggctgccttggacacaatccaatactccaaacaccccccacccctgtag

SEQ ID NO: 141913 - DNA, 1323 bp, Artificial Sequence
  derived and/or modified sequence
atggcatctctgacagtgaaggcatacctgctgggaaaagaggacgccgctcgtgagatacgccgatttagcttttgctgctcaccagaacctgaagccgaggcagaggccgcagccggtccaggaccatgcgaaagactactgtccagagttgctgcgttgtttccagctctgcgaccagggggtttccaggcacactacagagatgaagacggagacctcgttgccttttccagtgatgaggagttaaccatggctatgtcttatgtgaaggacgatatatttaggatatatatcaaagaaaagaaagagtgtcgtcgcgatcatcgtcccccatgcgcacaggaggcgccaaggaacatggttcatccaaatgttatctgtgacgggtgtaatggaccagtggttggcaccagatataagtgctcagtttgtccagattacgacctctgctctgtgtgcgagggcaaaggtcttcaccggggacacactaagctagctttcccgtcaccttttggacatctctccgaaggcttttcccatagcagatggctgagaaaagtgaagcacggacacttcggctggccgggatgggaaatgggtccacccggtaactggtcaccacggccaccaagggccggagaggcgagaccaggacctaccgcggagagcgcatctgggccttctgaagatccttccgtcaatttcctgaagaatgtgggtgaatccgttgcagccgctttatctcctcttggtattgaagtcgacatagacgtggaacacggtggaaagagatctcgcttaacccctgtcagcccggagtcaagcagtaccgaggagaagtccagcagccagccttcatcatgctgttctgacccttcaaagcctgggggaaatgttgagggcgctacacagagtctggctgaacaaatgaggaagatcgcgctggaatccgaggggcgtcctgaggagcaaatggaatccgacaattgttccgggggtgacgacgattggactcacctgagcagcaaagaagttgaccccagtactggcgaactccagtccctgcagatgccagaaagcgaggggccatccagcctcgatcctagccaggaggggccaactggactcaaggaggctgctctttacccgcatcttcccccagaagcagaccctagactgatcgagagcctctctcagatgctgagcatgggcttctccgacgaggggggatggttgactcgtcttctgcagacgaagaattacgacatcggagcagccttggatactattcagtacagcaaacacccgcctcccctctag

SEQ ID NO: 141914 - DNA, 2253 bp, Artificial Sequence
  derived and/or modified sequence
gttagggaaggaagcaggcagatgcccttgtcttctcctttactcccaagccactagaagtctaaggcctttgtggggctgggcccctcaggagcaggtcacaggcagggatctcccacagttgaagacggacatgggcctggtcggatggggaatgaggtggcacgtttctgaaaaggcagctggcccaaggctaaataagtgcagcagccaaagctgctgcccctgtgcacaggccctccgccccctgcatgtggctgtggtccagggcccaggtcggagcactcaccttccaggaggtgccagagcaagggggtagtcttgcctctcactcctgccctctgtggctcaagtaggtgtgtttgtttatagccctgtgagtgtccctttcatacttgcctcagcccattccagcagcttatgtccagctgagaacccctgggtgctcacgtgctgtcttttaaacaatctagatgaggacggggacttggttgccttttccagtgacgaggaattgacaatggccatgtcctacgtgaaggatgacatcttccgaatctacattaaagagaaaaaagagtgccggcgggaccaccgcccaccgtgtgctcaggaggcgccccgcaacatggtgcaccccaatgtgatctgcgatggctgcaatgggcctgtggtaggaacccgctacaagtgcagcgtctgcccagactacgacttgtgtagcgtctgcgagggaaagggcttgcaccgggggcacaccaagctcgcattccccagccccttcgggcacctgtctgagggcttctcgcacagccgctggctccggaaggtgaaacacggacacttcgggtggccaggatgggaaatgggtccaccaggaaactggagcccacgtcctcctcgtgcaggggaggcccgccctggccccacggcagaatcagcttctggtccatcggaggatccgagtgtgaatttcctgaagaacgttggggagagtgtggcagctgcccttagccctctgggcattgaagttgatatcgatgtggagcacggagggaaaagaagccgcctgacccccgtctctccagagagttccagcacagaggagaagagcagctcacagccaagcagctgctgctctgaccccagcaagccgggtgggaatgttgagggcgccacgcagtctctggcggagcagatgaggaagatcgccttggagtccgaggggcgccctgaggaacagatggagtcggataactgttcaggaggagatgatgactggacccatctgtcttcaaaagaagtggacccgtctacaggtgaactccagtccctacagatgccagaatccgaagggccaagctctctggacccctcccaggagggacccacagggctgaaggaagctgccttgtacccacatctcccgccagaggctgacccgcggctgattgagtccctctcccagatgctgtccatgggcttctctgatgaaggcggctggctcaccaggctcctgcagaccaagaactatgacatcggagcggctctggacaccatccagtattcaaagcatcccccgccgttgtgaccacttttgcccacctcttctgcgtgcccctcttctgtctcatagttgtgttaagcttgcgtagaattgcaggtctctgtacgggccagtttctctgccttcttccaggatcaggggttagggtgcaagaagccatttagggcagcaaaacaagtgacatgaagggagggtccctgtgtgtgtgtgtgctgatgtttcctgggtgccctggctccttgcagcagggctgggcctgcgagacccaaggctcactgcagcgcgctcctgacccctccctgcaggggctacgttagcagcccagcacatagcttgcctaatggctttcactttctcttttgttttaaatgactcataggtccctgacatttagttgattattttctgctacagacctggtacactctgattttagataaagtaagcctaggtgttgtcagcaggcaggctggggaggccagtgttgtgggcttcctgctgggactgagaaggctcacgaagggcatccgcaatgttggtttcactgagagctgcctcctggtctcttcaccactgtagttctctcatttccaaaccatcagctgcttttaaaataagatctctttgtagccatcctgttaaatttgtaaacaatctaattaaatggcatcagcactttaaccaat

SEQ ID NO: 141915 - DNA, 2913 bp, Artificial Sequence
  derived and/or modified sequence
gcgtcggcttccggccgccttccgcggccaccgccgggcccgctcccgccgccgacgcccaggtgcgccaggtgcgggccgggcgggggtcgcgctcacctttctggccgctgagtgccgcgtaccaggacagcgagaggaaggcgcacaggcagaagagcagcagcgtcaggaaggtgccattgcggagcctcatctcctcggtgtctgcgagattaatctctcatggccgctgcacaagaacctggcttttagctgaactaaggagaaagtcctacaacagtttggcgtgcaacatggggcttgagaaaggatgaggacggggacttggttgccttttccagtgacgaggaattgacaatggccatgtcctacgtgaaggatgacatcttccgaatctacattaaagagaaaaaagagtgccggcgggaccaccgcccaccgtgtgctcaggaggcgccccgcaacatggtgcaccccaatgtgatctgcgatggctgcaatgggcctgtggtaggaacccgctacaagtgcagcgtctgcccagactacgacttgtgtagcgtctgcgagggaaagggcttgcaccgggggcacaccaagctcgcattccccagccccttcgggcacctgtctgagggcttctcgcacagccgctggctccggaaggtgaaacacggacacttcgggtggccaggatgggaaatgggtccaccaggaaactggagcccacgtcctcctcgtgcaggggaggcccgccctggccccacggcagaatcagcttctggtccatcggaggatccgagtgtgaatttcctgaagaacgttggggagagtgtggcagctgcccttagccctctgggcattgaagttgatatcgatgtggagcacggagggaaaagaagccgcctgacccccgtctctccagagagttccagcacagaggagaagagcagctcacagccaagcagctgctgctctgaccccagcaagccgggtgggaatgttgagggcgccacgcagtctctggcggagcagatgaggaagatcgccttggagtccgaggggcgccctgaggaacagatggagtcggataactgttcaggaggagatgatgactggacccatctgtcttcaaaagaagtggacccgtctacaggtgaactccagtccctacagatgccagaatccgaagggccaagctctctggacccctcccaggagggacccacagggctgaaggaagctgccttgtacccacatctcccgccagaggctgacccgcggctgattgagtccctctcccagatgctgtccatgggcttctctgatgaaggcggctggctcaccaggctcctgcagaccaagaactatgacatcggagcggctctggacaccatccagtattcaaagcatcccccgccgttgtgaccacttttgcccacctcttctgcgtgcccctcttctgtctcatagttgtgttaagcttgcgtagaattgcaggtctctgtacgggccagtttctctgccttcttccaggatcaggggttagggtgcaagaagccatttagggcagcaaaacaagtgacatgaagggagggtccctgtgtgtgtgtgtgctgatgtttcctgggtgccctggctccttgcagcagggctgggcctgcgagacccaaggctcactgcagcgcgctcctgacccctccctgcaggggctacgttagcagcccagcacatagcttgcctaatggctttcactttctcttttgttttaaatgactcataggtccctgacatttagttgattattttctgctacagacctggtacactctgattttagataaagtaagcctaggtgttgtcagcaggcaggctggggaggccagtgttgtgggcttcctgctgggactgagaaggctcacgaagggcatccgcaatgttggtttcactgagagctgcctcctggtctcttcaccactgtagttctctcatttccaaaccatcagctgcttttaaaataagatctctttgtagccatcctgttaaatttgtaaacaatctaattaaatggcatcagcactttaaccaatgacgtttgcatagagagaaatgattgacagtaagtttattgttaatggttcttacagagtatctttaaaagtgccttaggggaaccctgtccctcctaacaagtgtatctcgattaataacctgccagtcccagatcacacatcatcatcgaagtcttccccagttataaagaggtcacatagtcgtgtgggtcgaggattctgtgcctccaggaccaggggcccaccctctgcccagggagtccttgcgtcccatgaggtcttcccgcaaggcctctcagacccagatgtgacggggtgtgtggcccgaggaagctggacagcggcagtgggcctgctgaggccttctcttgaggcctgtgctctgggggtcccttgcttagcctgtgctggaccagctggcctggggtccctctgaagagaccttggctgctcactgtccacatgtgaactttttctaggtggcaggacaaattgcgcccatttagaggatgtggctgtaacctgctggatgggactccatagctccttcccaggacccctcagctccccggcactgcagtctgcagagttctcctggaggcaggggctgctgccttgtttcaccttccatgtcaggccagcctgtccctgaaagagaagatggccatgccctccatgtgtaagaacaatgccagggcccaggaggaccgcctgccctgcctgggccttggctgggcctctggttctgacactttctgctggaagctgtcaggctgggacaggctttgattttgagggttagcaagacaaagcaaataaatgccttccacctcaccgc

SEQ ID NO: 141916 - DNA, 2986 bp, Artificial Sequence
  derived and/or modified sequence
agagtagtgaaggggcctctgcagggcggctctcgcgccgcgacgacggtggcgggggcggggagggcgcgagagactccgcccctctcgaggcggggcggggcctccgcgttcgctacaaaagccgcgcggcggctgcgaccgggacggcccgttttccgccagctcgccgctcgctatggcgtcgctcaccgtgaaggcctaccttctgggcaaggaggacgcggcgcgcgagattcgccgcttcagcttctgctgcagccccgagcctgaggcggaagccgaggctgcggcgggtccgggaccctgcgagcggctgctgagccgggtggccgccctgttccccgcgctgcggcctggcggcttccaggcgcactaccgcgatgaggacggggacttggttgccttttccagtgacgaggaattgacaatggccatgtcctacgtgaaggatgacatcttccgaatctacattaaagagaaaaaagagtgccggcgggaccaccgcccaccgtgtgctcaggaggcgccccgcaacatggtgcaccccaatgtgatctgcgatggctgcaatgggcctgtggtaggaacccgctacaagtgcagcgtctgcccagactacgacttgtgtagcgtctgcgagggaaagggcttgcaccgggggcacaccaagctcgcattccccagccccttcgggcacctgtctgagggcttctcgcacagccgctggctccggaaggtgaaacacggacacttcgggtggccaggatgggaaatgggtccaccaggaaactggagcccacgtcctcctcgtgcaggggaggcccgccctggccccacggcagaatcagcttctggtccatcggaggatccgagtgtgaatttcctgaagaacgttggggagagtgtggcagctgcccttagccctctgggcattgaagttgatatcgatgtggagcacggagggaaaagaagccgcctgacccccgtctctccagagagttccagcacagaggagaagagcagctcacagccaagcagctgctgctctgaccccagcaagccgggtgggaatgttgagggcgccacgcagtctctggcggagcagatgaggaagatcgccttggagtccgaggggcgccctgaggaacagatggagtcggataactgttcaggaggagatgatgactggacccatctgtcttcaaaagaagtggacccgtctacaggtgaactccagtccctacagatgccagaatccgaagggccaagctctctggacccctcccaggagggacccacagggctgaaggaagctgccttgtacccacatctcccgccagaggctgacccgcggctgattgagtccctctcccagatgctgtccatgggcttctctgatgaaggcggctggctcaccaggctcctgcagaccaagaactatgacatcggagcggctctggacaccatccagtattcaaagcatcccccgccgttgtgaccacttttgcccacctcttctgcgtgcccctcttctgtctcatagttgtgttaagcttgcgtagaattgcaggtctctgtacgggccagtttctctgccttcttccaggatcaggggttagggtgcaagaagccatttagggcagcaaaacaagtgacatgaagggagggtccctgtgtgtgtgtgtgctgatgtttcctgggtgccctggctccttgcagcagggctgggcctgcgagacccaaggctcactgcagcgcgctcctgacccctccctgcaggggctacgttagcagcccagcacatagcttgcctaatggctttcactttctcttttgttttaaatgactcataggtccctgacatttagttgattattttctgctacagacctggtacactctgattttagataaagtaagcctaggtgttgtcagcaggcaggctggggaggccagtgttgtgggcttcctgctgggactgagaaggctcacgaagggcatccgcaatgttggtttcactgagagctgcctcctggtctcttcaccactgtagttctctcatttccaaaccatcagctgcttttaaaataagatctctttgtagccatcctgttaaatttgtaaacaatctaattaaatggcatcagcactttaaccaatgacgtttgcatagagagaaatgattgacagtaagtttattgttaatggttcttacagagtatctttaaaagtgccttaggggaaccctgtccctcctaacaagtgtatctcgattaataacctgccagtcccagatcacacatcatcatcgaagtcttccccagttataaagaggtcacatagtcgtgtgggtcgaggattctgtgcctccaggaccaggggcccaccctctgcccagggagtccttgcgtcccatgaggtcttcccgcaaggcctctcagacccagatgtgacggggtgtgtggcccgaggaagctggacagcggcagtgggcctgctgaggccttctcttgaggcctgtgctctgggggtcccttgcttagcctgtgctggaccagctggcctggggtccctctgaagagaccttggctgctcactgtccacatgtgaactttttctaggtggcaggacaaattgcgcccatttagaggatgtggctgtaacctgctggatgggactccatagctccttcccaggacccctcagctccccggcactgcagtctgcagagttctcctggaggcaggggctgctgccttgtttcaccttccatgtcaggccagcctgtccctgaaagagaagatggccatgccctccatgtgtaagaacaatgccagggcccaggaggaccgcctgccctgcctgggccttggctgggcctctggttctgacactttctgctggaagctgtcaggctgggacaggctttgattttgagggttagcaagacaaagcaaataaatgccttccacctcaccgcaaa

SEQ ID NO: 141917 - DNA, 2000 bp, Artificial Sequence
  derived and/or modified sequence
gccagctcgccgctcgctatggcgtcgctcaccgtgaaggcctaccttctgggcaaggaggacgcggcgcgcgagattcgccgcttcagcttctgctgcagccccgagcctgaggcggaagccgaggctgcggcgggtccgggaccctgcgagcggctgctgagccgggtggccgccctgttccccgcgctgcggcctggcggcttccaggcgcactaccgcgatgaggacggggacttggttgccttttccagtgacgaggaattgacaatggccatgtcctacgtgaaggatgacatcttccgaatctacattaaagagaaaaaagagtgccggcgggaccaccgcccaccgtgtgctcaggaggcgccccgcaacatggtgcaccccaatgtgatctgcgatggctgcaatgggcctgtggtaggaacccgctacaagtgcagcgtctgcccagactacgacttgtgtagcgtctgcgagggaaagggcttgcaccgggggcacaccaagctcgcattccccagccccttcgggcacctgtctgagggcttctcgcacagccgctggctccggaaggtgaaacacggacacttcgggtggccaggatgggaaatgggtccaccaggaaactggagcccacgtcctcctcgtgcaggggaggcccgccctggccccacggcagaatcagcttctggtccatcggaggatccgagtgtgaatttcctgaagaacgttggggagagtgtggcagctgcccttagccctctgggcattgaagttgatatcgatgtggagcacggagggaaaagaagccgcctgacccccgtctctccagagagttccagcacagaggagaagagcagctcacagccaagcagctgctgctctgaccccagcaagccgggtgggaatgttgagggcgccacgcagtctctggcggagcagatgaggaagatcgccttggagtccgaggggcgccctgaggaacagatggagtcggataactgttcaggaggagatgatgactggacccatctgtcttcaaaagaagtggacccgtctacaggtgaactccagtccctacagatgccagaatccgaagggccaagctctctggacccctcccaggagggacccacagggctgaaggaagctgccttgtacccacatctcccgccagaggctgacccgcggctgattgagtccctctcccagatgctgtccatgggcttctctgatgaaggcggctggctcaccaggctcctgcagaccaagaactatgacatcggagcggctctggacaccatccagtattcaaagcatcccccgccgttgtgaccacttttgcccacctcttctgcgtgcccctcttctgtctcatagttgtgttaagcttgcgtagaattgcaggtctctgtacgggccagtttctctgccttcttccaggatcaggggttagggtgcaagaagccatttagggcagcaaaacaagtgacatgaagggagggtccctgtgtgtgtgtgtgctgatgtttcctgggtgccctggctccttgcagcagggctgggcctgcgagacccaaggctcactgcagcgcgctcctgacccctccctgcaggggctacgttagcagcccagcacatagcttgcctaatggctttcactttctcttttgttttaaatgactcataggtccctgacatttagttgattattttctgctacagacctggtacactctgattttagataaagtaagcctaggtgttgtcagcaggcaggctggggaggccagtgttgtgggcttcctgctgggactgagaaggctcacgaagggcatccgcaatgttggtttcactgagagctgcctcctggtctcttcaccactgtagttctctcatttccaaaccatcagctgcttttaaaataagatctctttgtagccatcctgttaaatttgtaaacaatctaattaaatggcatcagcactttaacc

SEQ ID NO: 141918 - DNA, 628 bp, Artificial Sequence
  derived and/or modified sequence
agtggacgcggggagcctgcggggtgggactgcatcgggaaaggggaaggagtcagaggcgagaagggggagagtgtctgtctggctccagccgctgcacgctcttcctgctcaggggactcacggtgaccccggagccactccccagcccagcctccagatgaggacggggacttggttgccttttccagtgacgaggaattgacaatggccatgtcctacgtgaaggatgacatcttccgaatctacattaaagagaaaaaagagtgccggcgggaccaccgcccaccgtgtgctcaggaggcgccccgcaacatggtgcaccccaatgtgatctgcgatggctgcaatgggcctgtggtaggaacccgctacaagtgcagcgtctgcccagactacgacttgtgtagcgtctgcgagggaaagggcttgcaccgggggcacaccaagctcgcattccccagccccttcgggcacctgtctgagggcttctcgcacagccgctggctccggaaggtgaaacacggacacttcgggtggccaggatgggaaatgggtccaccaggaaactggagcccacgtcctcctcgtgcaggggaggcccgccctggccccacggcagaatcag

SEQ ID NO: 141919 - DNA, 842 bp, Artificial Sequence
  derived and/or modified sequence
tccgcggccaccgccgggcccgctcccgccgccgacgcccaggtgcgccaggtgcgggccgggcgggggtcgcgctcacctttctggccgctgagtgccgcgtaccaggacagcgagaggaaggcgcacaggcagaagagcagcagcgtcaggaaggtgccattgcggagcctcatctcctcggtgtctgcgagattaatctctcatggccgctgcacaagaacctggcttttagctgaactaaggagaaagtcctacaacagtttggcgtgcaacatggggcttgagaaaggatgaggacggggacttggttgccttttccagtgacgaggaattgacaatggccatgtcctacgtgaaggatgacatcttccgaatctacattaaagagaaaaaagagtgccggcgggaccaccgcccaccgtgtgctcaggaggcgccccgcaacatggtgcaccccaatgtgatctgcgatggctgcaatgggcctgtggtaggaacccgctacaagtgcagcgtctgcccagactacgacttgtgtagcgtctgcgagggaaagggcttgcaccgggggcacaccaagctcgcattccccagccccttcgggcacctgtctgagggcttctcgcacagccgctggctccggaaggtgaaacacggacacttcgggtggccaggatgggaaatgggtccaccaggaaactggagcccacgtcctcctcgtgcaggggaggcccgccctggccccacggcagaatcagcttctggtccatcggaggatccgagtgtgaatttcctgaagaacgttggggagagtgtggcagctgcccttagccctctgg

SEQ ID NO: 141920 - DNA, 1323 bp, Artificial Sequence
  derived and/or modified sequence
atggccagcctgaccgtgaaggcctacctgctgggcaaggaggacgccgccagagagatcagaagattcagcttctgctgcagccccgagcccgaggccgaggccgaggccgccgccggccccggcccctgcgagagactgctgagcagagtggccgccctgttccccgccctgagacccggcggcttccaggcccactacagagacgaggacggcgacctggtggccttcagcagcgacgaggagctgaccatggccatgagctacgtgaaggacgacatcttcagaatctacatcaaggagaagaaggagtgcagaagagaccacagacccccctgcgcccaggaggcccccagaaacatggtgcaccccaacgtgatctgcgacggctgcaacggccccgtggtgggcaccagatacaagtgcagcgtgtgccccgactacgacctgtgcagcgtgtgcgagggcaagggcctgcacagaggccacaccaagctggccttccccagccccttcggccacctgagcgagggcttcagccacagcagatggctgagaaaggtgaagcacggccacttcggctggcccggctgggagatgggcccccccggcaactggagccccagaccccccagagccggcgaggccagacccggccccaccgccgagagcgccagcggccccagcgaggaccccagcgtgaacttcctgaagaacgtgggcgagagcgtggccgccgccctgagccccctgggcatcgaggtggacatcgacgtggagcacggcggcaagagaagcagactgacccccgtgagccccgagagcagcagcaccgaggagaagagcagcagccagcccagcagctgctgcagcgaccccagcaagcccggcggcaacgtggagggcgccacccagagcctggccgagcagatgagaaagatcgccctggagagcgagggcagacccgaggagcagatggagagcgacaactgcagcggcggcgacgacgactggacccacctgagcagcaaggaggtggaccccagcaccggcgagctgcagagcctgcagatgcccgagagcgagggccccagcagcctggaccccagccaggagggccccaccggcctgaaggaggccgccctgtacccccacctgccccccgaggccgaccccagactgatcgagagcctgagccagatgctgagcatgggcttcagcgacgagggcggctggctgaccagactgctgcagaccaagaactacgacatcggcgccgccctggacaccatccagtacagcaagcaccccccccccctgtag

SEQ ID NO: 141921 - protein, 620 aa, Artificial Sequence
  derived and/or modified sequence
MNLERLRKRVRQYLDQQQYQSALFWADKVASLSREEPQDIYWLAQCLYLTAQYHRAAHALRSRKLDKLYEACRYLAARCHYAAKEHQQALDVLDMEEPINKRLFEKYLKDESGFKDPSSDWEMSQSSIKSSICLLRGKIYDALDNRTLATYSYKEALKLDVYCFEAFDLLTSHHMLTAQEEKELLESLPLSKLCNEEQELLRFLFENKLKKYNKPSETVIPESVDGLQENLDVVVSLAERHYYNCDFKMCYKLTSVVMEKDPFHASCLPVHIGTLVELNKANELFYLSHKLVDLYPSNPVSWFAVGCYYLMVGHKNEHARRYLSKATTLEKTYGPAWIAYGHSFAVESEHDQAMAAYFTAAQLMKGCHLPMLYIGLEYGLTNNSKLAERFFSQALSIAPEDPFVMHEVGVVAFQNGEWKTAEKWFLDALEKIKAIGNEVTVDKWEPLLNNLGHVCRKLKKYAEALDYHRQALVLIPQNASTYSAIGYIHSLMGNFENAVDYFHTALGLRRDDTFSVTMLGHCIEMYIGDSEAYIGADIKDKLKCYDFDVHTMKTLKNIISPPWDFREFEVEKQTAEETGLTPLETSRKTPDSRPSLEETFEIEMNESDMMLETSMSDHST

SEQ ID NO: 141922 - DNA, 1863 bp, Artificial Sequence
  derived and/or modified sequence
atgaacctggagagactgagaaagagagtgagacagtacctggaccagcagcagtaccagagcgccctgttctgggccgacaaggtggccagcctgagcagagaggagccccaggacatctactggctggcccagtgcctgtacctgaccgcccagtaccacagagccgcccacgccctgagaagcagaaagctggacaagctgtacgaggcctgcagatacctggccgccagatgccactacgccgccaaggagcaccagcaggccctggacgtgctggacatggaggagcccatcaacaagagactgttcgagaagtacctgaaggacgagagcggcttcaaggaccccagcagcgactgggagatgagccagagcagcatcaagagcagcatctgcctgctgagaggcaagatctacgacgccctggacaacagaaccctggccacctacagctacaaggaggccctgaagctggacgtgtactgcttcgaggccttcgacctgctgaccagccaccacatgctgaccgcccaggaggagaaggagctgctggagagcctgcccctgagcaagctgtgcaacgaggagcaggagctgctgagattcctgttcgagaacaagctgaagaagtacaacaagcccagcgagaccgtgatccccgagagcgtggacggcctgcaggagaacctggacgtggtggtgagcctggccgagagacactactacaactgcgacttcaagatgtgctacaagctgaccagcgtggtgatggagaaggaccccttccacgccagctgcctgcccgtgcacatcggcaccctggtggagctgaacaaggccaacgagctgttctacctgagccacaagctggtggacctgtaccccagcaaccccgtgagctggttcgccgtgggctgctactacctgatggtgggccacaagaacgagcacgccagaagatacctgagcaaggccaccaccctggagaagacctacggccccgcctggatcgcctacggccacagcttcgccgtggagagcgagcacgaccaggccatggccgcctacttcaccgccgcccagctgatgaagggctgccacctgcccatgctgtacatcggcctggagtacggcctgaccaacaacagcaagctggccgagagattcttcagccaggccctgagcatcgcccccgaggaccccttcgtgatgcacgaggtgggcgtggtggccttccagaacggcgagtggaagaccgccgagaagtggttcctggacgccctggagaagatcaaggccatcggcaacgaggtgaccgtggacaagtgggagcccctgctgaacaacctgggccacgtgtgcagaaagctgaagaagtacgccgaggccctggactaccacagacaggccctggtgctgatcccccagaacgccagcacctacagcgccatcggctacatccacagcctgatgggcaacttcgagaacgccgtggactacttccacaccgccctgggcctgagaagagacgacaccttcagcgtgaccatgctgggccactgcatcgagatgtacatcggcgacagcgaggcctacatcggcgccgacatcaaggacaagctgaagtgctacgacttcgacgtgcacaccatgaagaccctgaagaacatcatcagccccccctgggacttcagagagttcgaggtggagaagcagaccgccgaggagaccggcctgacccccctggagaccagcagaaagacccccgacagcagacccagcctggaggagaccttcgagatcgagatgaacgagagcgacatgatgctggagaccagcatgagcgaccacagcacctag

SEQ ID NO: 141923 - DNA, 1863 bp, Artificial Sequence
  derived and/or modified sequence
atgaatttggagaggctgcgcaagcgcgttcgccagtatctagaccagcagcagtaccaatcagctcttttctgggctgataaggtagccagcctgtctcgggaggagcctcaagatatctactggcttgctcagtgcctttatttgaccgcccagtatcatagagctgcgcatgctctgagatctagaaagctggacaagctctacgaagcctgtcgctatctggcagcccggtgtcattatgcagccaaagagcatcagcaggctctggatgttctggatatggaggaacccatcaataaacggctgttcgaaaaatatctcaaagatgagtccggctttaaggacccatcttcagattgggaaatgagtcagtcctctattaaatctagtatttgtttactacgcggcaagatttatgatgcgttagataacaggactttggccacttacagctacaaggaggcattgaagctcgatgtctactgctttgaagccttcgatctgctgacctcgcatcacatgttgaccgcccaggaggagaaagaattactggagagcttaccgctctctaagttgtgcaatgaagaacaggagctgttgcgtttcttatttgaaaacaagctgaagaaatataataagccctcggagacggttatcccagaatctgtcgacggcctacaggaaaatttggatgttgtggtttctctggccgaacggcactactacaattgtgatttcaagatgtgctacaaattgaccagcgtggtgatggagaaggacccattccacgcaagctgcctaccagtgcatatcggcacccttgtagaacttaacaaagcaaatgaactgttctatctcagccataaactggtggatctgtaccccagtaatcccgtgagctggttcgctgtgggatgttattacttgatggtgggccacaagaacgaacacgctcggcgctacctttcaaaggccacgaccctagagaagacatatggaccggcgtggatcgcgtatggacacagcttcgccgttgaatctgaacacgaccaggctatggctgcatacttcacggcggctcaactcatgaagggttgtcatctgccaatgctgtacattgggttagagtacggcctcacgaataattctaagctcgcagagagattttttagccaagcactcagcatcgcccctgaggaccctttcgtgatgcatgaagttggcgtggtcgcatttcagaacggcgaatggaaaaccgccgaaaaatggtttttggatgcccttgaaaaaattaaagccatagggaacgaggtgaccgtagacaaatgggagccactgctgaataatctggggcatgtatgcagaaaactgaagaaatacgccgaggccctggattaccacaggcaggccctcgtgcttattcctcaaaacgccagtacgtactccgccattggctatattcattcattgatggggaacttcgagaatgcggttgactattttcacacagcattggggctgcgccgggatgataccttttccgtgaccatgctgggacactgtatagaaatgtatatcggggattcagaggcttatattggagctgatattaaagataagttgaagtgctacgacttcgacgtccacaccatgaagacccttaagaacatcatttctcctccctgggacttcagagagttcgaagtggaaaagcagacggctgaagagactgggctcacacccttggaaacgtctcgcaagacaccagactccagaccctctctggaagaaacttttgagatcgaaatgaacgagtccgacatgatgcttgagacaagtatgtccgatcattctacatag

SEQ ID NO: 141924 - DNA, 1863 bp, Artificial Sequence
  derived and/or modified sequence
atgaatcttgaaagactgcgcaagagggtacgtcagtatctcgatcagcagcagtaccagagcgctctgttttgggcagataaggtggccagcctaagcagggaggaacctcaggatatttattggttggcccagtgtctctatcttacagctcagtatcatagagctgctcatgccctgcgcagccgtaaactggacaagctctatgaggcctgtcgatacttagctgcgcgctgccattacgctgctaaggaacaccaacaggccctggacgtactcgatatggaagagcctatcaacaagaggctgttcgaaaaataccttaaggatgagtccggcttcaaggatccctcatctgactgggagatgtcacaaagctcgatcaaatctagtatttgcttactaagagggaaaatttatgatgccttggacaaccggacactggctacatacagttacaaggaagcattgaaacttgatgtatattgctttgaggcgttcgatctgcttacatcacatcacatgttgaccgcacaggaggagaaagagctcttggagagtttacctctgtccaaactgtgcaacgaggagcaagagctgctgcgattcctgttcgaaaataagctcaagaagtacaacaagcctagtgagacagttatccctgagtcagtggatgggctacaggaaaatcttgacgtggtggtttctctggctgaaaggcactactacaattgcgattttaaaatgtgttacaagctgacgagcgtagttatggagaaagacccatttcatgcgagctgcctccccgtgcatatcggtactctcgtagagctgaacaaggccaatgaactgttctatctgagccacaaattggtcgacttgtacccatctaatcccgtgagttggttcgcggtgggttgttactacttgatggtgggccacaaaaacgagcatgctcgcaggtatctctctaaggcaacaaccttagaaaaaacatacggccccgcctggattgcgtacgggcatagttttgcagtagagagcgagcacgatcaggccatggccgcctattttacagcagcacagctcatgaaggggtgtcatttgcctatgttatacatcggacttgagtatggtctcacaaataactccaagcttgctgagcggtttttcagtcaggctcttagcattgcacctgaagacccctttgtgatgcacgaggtgggggtcgtcgcattccagaatggcgaatggaagactgcagagaagtggttcttggacgcactcgagaagataaaggcgatcggcaacgaggtgactgtggacaaatgggagcctttgcttaacaacctcggccatgtgtgtcgaaaactgaagaaatacgccgaggcgttagattaccaccgtcaagctctggtgttaatcccgcagaatgcatctacatattcggctataggctatattcactccctgatgggcaactttgagaatgccgtcgactactttcacactgccctcggcctgcggcgcgacgacacttttagcgtaaccatgttggggcactgcattgagatgtacatcggcgatagcgaggcctatattggcgctgacattaaggacaagctgaagtgttacgacttcgatgttcataccatgaagaccctgaaaaacatcattagccctccatgggacttccgtgaatttgaagtcgagaagcagacagcggaggagactggcttgacaccattggaaacttcacgaaagacaccggattctagaccgtccctcgaggaaaccttcgaaattgaaatgaacgagtcggatatgatgctggaaacctccatgtctgatcacagcacatag

SEQ ID NO: 141925 - DNA, 1863 bp, Artificial Sequence
  derived and/or modified sequence
atgaacctggagcggctgaggaagagggtgcggcagtacctggaccagcagcagtaccagagcgccctcttctgggccgacaaggtggccagcctgagccgggaggagccccaggacatctactggctggcccagtgcctgtacctgacagcccagtaccaccgggccgcccacgccctgcggagcaggaagctggacaagctgtatgaggcctgccgctacctggccgcccgctgccactacgccgccaaggagcaccagcaggccctggatgtgctggacatggaggagcccatcaacaagaggctgtttgagaagtacctgaaggatgagagcggcttcaaggaccccagcagtgactgggagatgagccagagcagcatcaagagcagcatctgcctgctgcggggcaagatctatgatgccctggacaacagaaccctggccacctacagctacaaggaggccctgaagctggatgtgtactgctttgaggcctttgacctgctgaccagccaccacatgctgacagcccaggaggagaaggagctgctggagagcctgcccctgagcaagctgtgcaatgaggagcaggagctgctgcgcttcctgtttgagaacaagctgaagaagtacaacaagcccagcgagaccgtcatccctgagagcgtggatggcctgcaggagaacctggatgtggtggtgtccctggccgagcggcactactacaactgtgacttcaagatgtgctacaagctgacctctgtggtgatggagaaggaccccttccacgccagctgcctgcctgtgcacatcggcaccctggtggagctgaacaaggccaatgagctgttctacctgagccacaagctggtggacctgtaccccagcaaccctgtgtcctggtttgctgtgggctgctactacctgatggtgggccacaagaatgagcacgcccggcgctacctgagcaaggccaccaccctggagaagacctacggccctgcctggatcgcctacggccacagctttgctgtggagagcgagcatgaccaggccatggccgcctacttcaccgctgcccagctgatgaagggctgccacctgcccatgctgtacatcggcctggagtatggcctgaccaacaacagcaagctggccgagcgcttcttcagccaggccctgagcatcgcccctgaggacccctttgtgatgcatgaggtgggcgtggtggccttccagaatggagagtggaagacagctgagaagtggttcctggatgccctggagaagatcaaggccatcggaaatgaggtgacagtggacaagtgggagcccctgctgaacaacctgggccacgtgtgcaggaagctgaagaagtatgcagaggccctggactaccaccggcaggccctggtgctgatcccccagaatgccagcacctacagcgccatcggctacatccacagcctgatgggcaactttgaaaatgctgtggactacttccacacagccctgggcctgcggagagatgacaccttctctgtgaccatgctgggccactgcatcgagatgtacatcggggacagcgaggcctacatcggggctgacatcaaggacaagctgaagtgctatgactttgatgtgcacaccatgaagaccctgaagaacatcatcagccccccctgggacttccgggagtttgaggtggagaagcagacagctgaggagaccggcctgacccccctggagaccagcaggaagaccccagacagccggcccagcctggaggagacctttgaaattgagatgaatgaaagtgacatgatgctggagacctccatgtctgaccacagcacctag

SEQ ID NO: 141926 - DNA, 1863 bp, Artificial Sequence
  derived and/or modified sequence
atgaacctggagcggctgcggaagcgggtgcggcagtacctggaccagcagcagtatcagtcagcccttttctgggccgataaggtggctagtctctccagggaagaaccccaagatatatactggctcgctcagtgcctctacttgacggctcagtaccatagggctgctcacgccctgcggagccgcaagctcgacaaactgtacgaagcctgtaggtacctcgcggcccgctgccactatgcagctaaggaacatcagcaggcactggacgtgctcgatatggaggaaccaattaacaagaggctgtttgagaagtatcttaaggacgagtccgggtttaaggacccaagctccgattgggaaatgtcacagtccagcatcaagtcttcgatctgcctgttgcgcggcaaaatatacgatgccctggacaatcgcaccctcgcaacctacagctataaagaggccctgaaactggacgtgtattgcttcgaagcatttgacctcctgacatcccaccatatgcttacagctcaggaggagaaggaactgttggagtcactcccgctgtccaagctttgtaacgaagaacaggaacttcttcggttcctatttgagaacaagttgaagaagtacaataagccttccgaaacagtcatccccgagtcagtggacggcttacaagagaacttggatgtcgtagtcagcttggccgagcgtcattattataactgtgacttcaagatgtgttacaaactcacttccgttgtgatggaaaaagatcctttccacgcatcctgtctgccagtgcacatcggaactctagtggaactcaataaagctaatgaacttttttatctttcacataagctggtggacctgtacccaagtaaccctgtgagttggtttgcagtcgggtgctattacttaatggtgggtcacaaaaacgagcacgcccgtcgctatcttagtaaggctactacgctcgagaaaacttacgggccagcctggatcgcatacggccatagctttgccgttgaatcagaacatgatcaggctatggccgcatatttcactgccgcccagctcatgaagggctgccacctgcctatgctttacattgggctggaatacggactgaccaacaactctaaactggccgagcgctttttctcacaggctttatctattgcgcctgaagaccccttcgtgatgcacgaggtgggggtggtcgccttccagaatggggaatggaagacagccgagaaatggtttctcgacgccctcgaaaagattaaagccatcggcaatgaagttaccgtggacaaatgggagcctctgctgaataatttgggccatgtgtgccgcaagttgaagaagtatgcggaagccctcgactatcacagacaggccctggtactcatccctcagaacgcatcaacttacagtgccatagggtacattcatagcctcatgggaaactttgaaaatgctgtggactattttcacactgcactcgggctaagaagggatgacacattcagcgttactatgctcggacattgcatcgaaatgtacattggcgacagcgaagcttacatcggcgcagacattaaggacaaactgaaatgctacgacttcgatgttcacactatgaaaaccctgaaaaacattatcagccctccttgggatttccgagaattcgaggtggagaagcaaactgccgaagagacgggtcttactcccctcgagacaagcagaaaaacgccagattcacgtcccagcctcgaggaaacctttgagattgagatgaacgaaagtgacatgatgttggaaacaagtatgagcgatcacagcacttag

SEQ ID NO: 141927 - DNA, 1863 bp, Artificial Sequence
  derived and/or modified sequence
atgaacctggagcggctgcggaagcgggtgcggcagtacctggaccagcagcagtatcagtcagctttgttctgggcggataaggtggcgtcactcagtagggaggaaccacaggacatctactggctggcgcagtgtttatatttaaccgcacaatatcatagggcagcccatgcgctcaggtctaggaagttggacaaattgtacgaagcatgccggtacctggcggctaggtgccactacgccgccaaggagcatcagcaggccctcgacgtgttggacatggaagaaccaattaataaacgcttattcgaaaaatacctgaaggacgaatcaggatttaaggacccatcatcagactgggaaatgtcccagtcctccatcaagtcatccatttgcctacttcggggcaagatatatgatgcccttgacaaccgcactctcgccacctattcctacaaggaagccctgaaactggacgtttactgcttcgaggcctttgatttgcttaccagccatcacatgctgaccgctcaagaagaaaaggaattgctagaaagtctcccattatcaaagctttgcaacgaggaacaggagttactgcggtttctttttgagaacaaactgaaaaagtataacaagcctagtgaaacggtgatacccgaatctgtcgatggcctgcaggaaaacctagacgtcgtagtatcacttgccgagcggcattactataactgcgattttaaaatgtgctacaagctgacctctgtggtaatggagaaggatccattccatgcttcgtgtctcccagttcatattggaacactcgtggaactgaacaaagcgaacgagctcttttatctcagccacaagctggtcgacctgtacccctctaatccagtgtcctggttcgcagtcgggtgttattatctaatggtggggcataagaatgaacatgcccgcaggtacctatctaaggcaactacgttagagaaaacctacgggcccgcatggatagcctatgggcactcatttgcggtcgagtcggagcacgaccaggccatggccgcatattttacagccgctcaactaatgaaggggtgccatctgcccatgctgtatatcgggctagaatacgggttgaccaacaacagtaaacttgccgaaaggttcttttcgcaagccttgtccatcgcaccagaggacccattcgtcatgcacgaagtgggcgtggtggcctttcagaatggcgagtggaagactgccgaaaaatggttcctcgatgccctagaaaaaatcaaggcgattgggaatgaggtcacagtcgataaatgggagcctctgctgaacaatctaggccatgtgtgtaggaaactaaagaagtatgcagaggctcttgattaccaccgacaggctctggtcctgatccctcagaacgcatccacctacagtgcaatcggctacattcattcgctgatgggcaacttcgagaacgccgttgactacttccacaccgcactcgggctccgaagagatgatacattctcggttaccatgctgggacactgtattgaaatgtacatcggcgactccgaggcttacatcggcgccgacataaaggataaactcaaatgctatgactttgatgtgcacaccatgaagacactcaaaaacatcatcagccctccctgggatttcagggagttcgaagtcgagaagcagactgccgaggaaacaggtctgacccctctggagacctccaggaagacccctgactcgcgtccctccttggaagagacctttgagatcgagatgaacgagtccgacatgatgttggaaacgagcatgagcgaccacagcacctag

SEQ ID NO: 141928 - DNA, 1863 bp, Artificial Sequence
  derived and/or modified sequence
atgaacctagaaaggttgcgtaaacgcgtgaggcaatacctcgatcagcagcagtatcagtccgccctcttttgggccgataaggtcgcaagcctgagccgcgaggagcctcaggatatttattggctcgcccagtgcctttacctcaccgcgcagtatcaccgcgctgctcatgccttaagaagccgcaagttagacaaactgtatgaagcatgtcggtacttggccgctcggtgtcattatgccgctaaggagcatcaacaagcgctcgatgtgctcgatatggaggagccaatcaacaaaaggttatttgagaaatacctgaaggatgagtccggattcaaagatccaagctctgactgggagatgtcacagtccagtatcaagtctagtatttgcctgctgcgcggaaagatttacgatgcactagacaatagaacattggcgacctattcatataaagaggccctgaaattggatgtgtattgttttgaagcgtttgacttactgaccagtcaccacatgctgactgcgcaggaggagaaggaactgctggaaagcttaccgttgagtaagctctgcaacgaggaacaagaactcctgcgtttcctgttcgaaaataaactgaagaaatacaataagcccagcgaaactgtaatcccagagagcgtggacgggctgcaggagaacttagatgtcgttgtttccctcgctgagaggcattactacaactgcgatttcaaaatgtgttacaaacttaccagcgtagtgatggagaaggaccctttccatgccagctgtttgccagtccatataggcaccctagtggagctgaacaaggccaatgagttattttacctgagtcacaagctagtggatctgtatccctcgaacccagtaagctggtttgcagtgggatgttactaccttatggtgggtcacaagaacgaacacgctagaagatatctgtccaaggcaaccactctagagaaaacctacggtcccgcatggatcgcctacgggcatagcttcgctgtcgagtcagagcatgaccaggcaatggcagcgtactttaccgctgcgcagcttatgaagggctgtcacttgccaatgctgtacatcggattggagtacggactgactaacaactccaagctggccgaacggtttttttctcaagccctgtccatcgcccctgaagacccattcgtgatgcacgaggttggggtcgtagccttccagaatggtgagtggaagactgccgagaagtggtttctcgatgctctggagaaaatcaaggcaattgggaacgaggttacagtggacaagtgggagccactgctaaataatctggggcacgtttgtcgaaagctcaaaaagtatgccgaggcacttgactaccatcggcaggctcttgtcctcatcccccagaacgcttccacctacagcgctatcggctatattcatagcctgatgggaaacttcgagaatgctgtcgattacttccatacagcacttggccttcgcagggatgacaccttttctgtgacgatgctgggccattgcattgagatgtacatcggggattcggaggcctatattggggctgacataaaagacaagctgaagtgttacgactttgatgtgcacactatgaaaacgctgaagaacatcatcagccccccttgggatttccgcgaatttgaagttgaaaagcaaaccgccgaggagaccggcctaacacctctcgagacgagtaggaagacacccgacagtcgtcccagtcttgaggagacgtttgagattgagatgaatgagtccgatatgatgttagagacttcgatgtccgaccattcgacatag

SEQ ID NO: 141929 - DNA, 1863 bp, Artificial Sequence
  derived and/or modified sequence
atgaaccttgaacgcttgcggaagcgagttagacaataccttgatcagcagcagtatcagtctgccctgttttgggctgacaaagtcgcctccctatcccgcgaagagccccaggacatctattggcttgcccagtgcctatacttgactgcccagtaccaccgagctgctcacgctctgcgaagtagaaagctggataagctgtacgaagcctgccgatatctcgccgcacggtgccattatgctgcaaaggaacatcagcaagccctcgatgtattggacatggaggaacctatcaataaaaggctcttcgaaaaatacttgaaggatgagagcggctttaaggatccatccagcgactgggagatgtctcagtctagtataaaatcatcaatctgcctgcttaggggaaagatctatgatgccttggacaaccgcactctggctacttatagctataaagaggcgttaaaactggatgtctactgtttcgaggcgttcgatctgctgactagtcatcacatgctgaccgctcaggaagagaaggagttattggagtccctcccactgagtaagttgtgcaacgaggaacaggagcttttgaggttcttatttgagaataagttgaaaaaatataacaagccatcagagacagtcatccctgagagtgtagatggattgcaagaaaatctcgacgtcgtagtcagtctagcagagcgccactactataactgcgacttcaagatgtgctacaagttgacctccgtggttatggagaaggatcccttccacgccagttgtctgcctgtccatattggcacattggtggagctgaataaggctaacgagttattttatctatcacacaaattggtagatttataccccagcaatccagttagttggtttgctgtgggatgttactatcttatggtgggacataaaaacgaacatgccaggcgctaccttagcaaagccaccactctggagaaaacctatggtccggcttggatcgcatatggtcatagcttcgcagtggaatcagagcacgaccaagccatggcggcatatttcaccgctgcgcagctaatgaaaggatgccacctgcccatgctctatattggtttagaatacggactgactaataactccaaactagctgaacggtttttctctcaagcacttagcatcgcccctgaggaccccttcgtcatgcacgaagtcggcgtggtggccttccagaacggcgaatggaagaccgctgaaaagtggttcctggacgccctcgaaaaaattaaggcaatcgggaatgaagtgaccgtggataagtgggaacctctgttgaacaacctcggtcacgtgtgccggaagctgaagaagtacgccgaagctctcgattaccacaggcaagctctggtgctaatccctcagaatgctagcacttacagtgccattggctatattcattcgctcatgggaaactttgaaaatgctgttgattattttcataccgccctcggcctgcggagagatgatacattttctgtgactatgctgggccattgcattgagatgtacattggcgacagcgaagcttatatcggcgctgacatcaaggacaagctcaaatgctacgattttgacgtgcacaccatgaagaccctcaaaaatatcatttctccgccatgggacttccgggagttcgaagtggagaagcagactgccgaggaaactggcctaaccccccttgaaacttcacgaaaaaccccagattcgcgaccctctctcgaagagacttttgagatcgagatgaacgagtccgatatgatgcttgaaacatctatgtccgatcatagcacgtag

SEQ ID NO: 141930 - DNA, 2203 bp, Artificial Sequence
  derived and/or modified sequence
cggcggcggcggctgcaggcacgggcacgggcacggggcggggtgcttagggtgcaggaggcgcgcgcctagcggcggagtgtggcgtgaggccgggcccgcgccgccatgaacctagagcggctgcggaagcgcgtccggcagtacctcgaccagcaacagtatcaaagtgctctattttgggcagataaagtagcttcactctctcgtgaagaaccccaggacatctattggttggctcagtgtctttacctgacagcacaatatcacagagccgcccatgcacttcggtcacgaaaactggacaaattgtatgaagcatgtcgttaccttgcagctaggtgccattatgctgcaaaagagcaccagcaggcccttgatgttcttgacatggaagagcccatcaataaaagattatttgaaaaatacttgaaggacgaaagtggcttcaaagatccttccagcgactgggaaatgtcacagtcttcaataaagagttctatctgtcttctacgcgggaaaatctatgatgctctagataaccgaaccctggctacctacagctacaaagaagctttgaagcttgatgtctactgttttgaagcgttcgatcttttaacatcacatcacatgctgacagcacaagaagaaaaagaacttcttgaatcactaccccttagcaagctgtgtaatgaagaacaggaattgctgcgttttctatttgagaacaaattgaaaaaatataataagcctagtgaaacggtcatccctgaatctgtagatggcttgcaagagaatctggatgtggtagtgtctttagctgagagacattattataactgtgattttaaaatgtgctacaagcttacttctgtagtaatggagaaagatcctttccatgcaagttgtttacctgtacatatagggacgcttgtagagctgaataaagccaatgaacttttctatctttctcataaactggtggatttatatcctagtaatcctgtgtcttggtttgcagtgggatgttactatctcatggtcggtcataaaaatgaacatgccagaagatatctcagcaaagccacaacacttgagaaaacctatggacctgcatggatagcctatggacattcatttgcggtggagagtgagcacgaccaagcgatggctgcttacttcacagcagcacagctgatgaaagggtgtcatttgcctatgctgtatattggattagaatatggtttgaccaataactcaaaactagctgaaaggttcttcagccaagctctgagcattgcaccggaagacccttttgttatgcatgaggtcggcgtggttgcatttcagaatggagaatggaaaacagccgaaaaatggtttcttgatgctttggaaaaaattaaagcaattgggaacgaggtaacagttgacaaatgggaacctttgttgaacaacttggggcatgtctgcagaaaacttaaaaagtatgctgaggccttggattaccaccgtcaggcactggtgttgattcctcagaacgcatccacctactctgctattggatatatccacagtctgatgggcaactttgaaaatgctgtggactacttccacacagcccttggtcttaggcgagatgatacattttctgttacaatgcttggtcattgcatcgaaatgtacattggtgattctgaagcttatattggagcagacattaaagacaaattaaaatgttatgactttgatgtgcatacaatgaagacactaaaaaacattatttcacctccgtgggatttcagggaatttgaagtagaaaaacagactgcagaagaaacggggcttacgccattggaaacctcaaggaaaactccagattccagaccttccttggaagaaacctttgaaattgaaatgaatgaaagtgacatgatgttagagacatctatgtcagaccacagcacgtgactccagtcagtggtcctggtcccactgtcccagtgtaggttagtattccttcacatcctctccatggcttaagaatgtcccacttcctaacgtgactccaaactgcatctctacatttaggaacagagacccgccttaagagactggatcgcacacctttgcaacagatgtgttctgattctctgaacctacaaaatagttatacatagtggaataaagaaggtaaaccatc

SEQ ID NO: 141931 - DNA, 2211 bp, Artificial Sequence
  derived and/or modified sequence
gagcctgggcagtgcacggggcctgggtggggggtgcgggtgtgggtggggacctgcggccttcgagtccgcggccttcgagtcctggggcggcggcggcggctgcaggcacgggcacgggcacggggcggggtgcttagggtgcaggaggcgcgcgcctagcggcggagtgtggcgtgaggccgggcccgcgccgccatgaacctagagcggctgcggaagcgcgtccggcagtacctcgaccagcaacagtatcaaagtgctctattttgggcagataaagtagcttcactctctcgtgaagaaccccaggacatctattggttggctcagtgtctttacctgacagcacaatatcacagagccgcccatgcacttcggtcacgaaaactggacaaattgtatgaagcatgtcgttaccttgcagctaggtgccattatgctgcaaaagagcaccagcaggcccttgatgttcttgacatggaagagcccatcaataaaagattatttgaaaaatacttgaaggacgaaagtggcttcaaagatccttccagcgactgggaaatgtcacagtcttcaataaagagttctatctgtcttctacgcgggaaaatctatgatgctctagataaccgaaccctggctacctacagctacaaagaagctttgaagcttgatgtctactgttttgaagcgttcgatcttttaacatcacatcacatgctgacagcacaagaagaaaaagaacttcttgaatcactaccccttagcaagctgtgtaatgaagaacaggaattgctgcgttttctatttgagaacaaattgaaaaaatataataagcctagtgaaacggtcatccctgaatctgtagatggcttgcaagagaatctggatgtggtagtgtctttagctgagagacattattataactgtgattttaaaatgtgctacaagcttacttctgtagtaatggagaaagatcctttccatgcaagttgtttacctgtacatatagggacgcttgtagagctgaataaagccaatgaacttttctatctttctcataaactggtggatttatatcctagtaatcctgtgtcttggtttgcagtgggatgttactatctcatggtcggtcataaaaatgaacatgccagaagatatctcagcaaagccacaacacttgagaaaacctatggacctgcatggatagcctatggacattcatttgcggtggagagtgagcacgaccaagcgatggctgcttacttcacagcagcacagctgatgaaagggtgtcatttgcctatgctgtatattggattagaatatggtttgaccaataactcaaaactagctgaaaggttcttcagccaagctctgagcattgcaccggaagacccttttgttatgcatgaggtcggcgtggttgcatttcagaatggagaatggaaaacagccgaaaaatggtttcttgatgctttggaaaaaattaaagcaattgggaacgaggtaacagttgacaaatgggaacctttgttgaacaacttggggcatgtctgcagaaaacttaaaaagtatgctgaggccttggattaccaccgtcaggcactggtgttgattcctcagaacgcatccacctactctgctattggatatatccacagtctgatgggcaactttgaaaatgctgtggactacttccacacagcccttggtcttaggcgagatgatacattttctgttacaatgcttggtcattgcatcgaaatgtacattggtgattctgaagcttatattggagcagacattaaagacaaattaaaatgttatgactttgatgtgcatacaatgaagacactaaaaaacattatttcacctccgtgggatttcagggaatttgaagtagaaaaacagactgcagaagaaacggggcttacgccattggaaacctcaaggaaaactccagattccagaccttccttggaagaaacctttgaaattgaaatgaatgaaagtgacatgatgttagagacatctatgtcagaccacagcacgtgactccagtcagtggtcctggtcccactgtcccagtgtaggaacagagacccgccttaagagactggatcgcacacctttgcaacagatgtgttctgattctctgaacctacaaaatagttatacatagtggaataaagaaggtaaaccatc

SEQ ID NO: 141932 - protein, 459 aa, Artificial Sequence
  derived and/or modified sequence
MAASGAVEPGPPGAAVAPSPAPAPPPAPDHLFRPISAEDEEQQPTEIESLCMNCYCNGMTRLLLTKIPFFREIIVSSFSCEHCGWNNTEIQSAGRIQDQGVRYTLSVRALEDMNREVVKTDSAATRIPELDFEIPAFSQKGALTTVEGLITRAISGLEQDQPARRANKDATAERIDEFIVKLKELKQVASPFTLIIDDPSGNSFVENPHAPQKDDALVITHYNRTRQQEEMLGLQEEAPAEKPEEEDLRNEVLQFSTNCPECNAPAQTNMKLVQIPHFKEVIIMATNCENCGHRTNEVKSGGAVEPLGTRITLHITDASDMTRDLLKSETCSVEIPELEFELGMAVLGGKFTTLEGLLKDIRELVTKNPFTLGDSSNPGQTERLQEFSQKMDQIIEGNMKAHFIMDDPAGNSYLQNVYAPEDDPEMKVERYKRTFDQNEELGLNDMKTEGYEAGLAPQR

SEQ ID NO: 141933 - DNA, 1810 bp, Artificial Sequence
  derived and/or modified sequence
aggaagccgaggtctgaattgcgcgtggtggccatggcggccagcggggctgtggaaccagggcccccgggggctgccgtcgccccgtcgcccgccccggccccgccgcctgcccctgatcacctgttccggcccatcagcgccgaggacgaggagcagcagcccaccgagatcgagtcgctatgcatgaactgttactgcaatggcatgacgcgcctcctgctcaccaagattcccttcttcagagaaataatagtgagctccttttcctgcgagcactgtggctggaacaacacggagatccagtcggcaggcaggatccaggaccagggagtgcgctacactttgtctgtcagggctctggaggacatgaacagagaagtggtgaagactgactctgctgccacaaggattcctgagctagattttgaaattcctgcctttagccagaaaggagctctgaccactgttgaaggattgatcacccgtgctatctctggcctggagcaggaccagcctgcacgaagggcaaacaaagatgctacagctgaaagaattgatgagttcattgtcaaactgaaggagctaaagcaagtagcctcccctttcactctgatcattgatgatccctcagggaacagttttgtggaaaacccacatgctcctcagaaagatgatgccctggtgatcacacactacaaccggacccgacagcaggaagagatgctggggcttcaagaagaagcaccagcagagaagccagaagaggaagatctcagaaatgaagtgctccagttcagcacaaactgcccagaatgcaatgcccccgctcagaccaacatgaagctagtacaaatccctcactttaaggaggttatcatcatggctaccaactgcgagaactgtgggcatcggaccaatgaggtgaaatctggaggagcagtagaacccttgggcaccaggatcaccctccacatcacagatgcctcagatatgaccagagacctcctcaagtctgagacttgcagtgtggaaatcccagagctagaatttgaactgggaatggcagtcctcgggggcaagttcaccacactggaagggctgctgaaagacatccgggaactggtgaccaaaaatcctttcacactgggcgacagttccaatcctggacagacggagagactacaggagtttagccagaagatggaccagatcatcgaaggtaacatgaaggcccactttattatggatgatccagcaggaaacagttacttgcagaatgtgtatgcgcctgaagatgatcctgagatgaaggtggagcgttacaagcgcacctttgaccaaaatgaggagctagggctcaatgacatgaagacagagggctatgaggcaggcctggctccgcaacggtagcagtgggtggctcaagggccagcctccagcgctgctctttctgtaggttatttattagtattggatgaaggcgaaggctgggagtgtctttcccaccagcccttgcccatggtggggaggacatctggtctgagtcagagatctgtgcacactttctaaacagcttgtgatgcaagtgtgagcctattgtgttacttgaccttattttggaagttttgaattggcctaggaggaaacccagaaatgaaccaggggtatgtcatcacttttttcatatcaagtcctcaccctccttccacataatgctctatcctctaaggttggaactctgaagttggagaaggtggaataaagttacacctggaaaaaaaaaaaaaaaaaaaaaaaaaaaaaaaaa

SEQ ID NO: 141934 - DNA, 2645 bp, Artificial Sequence
  derived and/or modified sequence
gggtggggccgcgagagcggcggaagtaggaagccgaggtctgaattgcgcgtggtggccatggcggccagcggggctgtggaaccagggcccccgggggctgccgtcgccccgtcgcccgccccggccccgccgcctgcccctgatcacctgttccggcccatcagcgccgaggacgaggagcagcagcccaccgagatcgagtcgctatgcatgaactgttactgcaatggcatgacgcgcctcctgctcaccaagattcccttcttcagagaaataatagtgagctccttttcctgcgagcactgtggctggaacaacacggagatccagtcggcaggcaggatccaggaccagggagtgcgctacactttgtctgtcagggctctggaggacatgaacagagaagtggtgaagactgactctgctgccacaaggattcctgagctagattttgaaattcctgcctttagccagaaaggagctctgaccactgttgaaggattgatcacccgtgctatctctggcctggagcaggaccagcctgcacgaagggcaaacaaagatgctacagctgaaagaattgatgagttcattgtcaaactgaaggagctaaagcaagtagcctcccctttcactctgatcattgatgatccctcagggaacagttttgtggaaaacccacatgctcctcagaaagatgatgccctggtgatcacacactacaaccggacccgacagcaggaagagatgctggggcttcaagaagaagcaccagcagagaagccagaagaggaagatctcagaaatgaagtgctccagttcagcacaaactgcccagaatgcaatgcccccgctcagaccaacatgaagctagtacaaatccctcactttaaggaggttatcatcatggctaccaactgcgagaactgtgggcatcggaccaatgaggtgaaatctggaggagcagtagaacccttgggcaccaggatcaccctccacatcacagatgcctcagatatgaccagagacctcctcaagtctgagacttgcagtgtggaaatcccagagctagaatttgaactgggaatggcagtcctcgggggcaagttcaccacactggaagggctgctgaaagacatccgggaactggtgaccaaaaatcctttcacactgggcgacagttccaatcctggacagacggagagactacaggagtttagccagaagatggaccagatcatcgaaggtaacatgaaggcccactttattatggatgatccagcaggaaacagttacttgcagaatgtgtatgcgcctgaagatgatcctgagatgaaggtggagcgttacaagcgcacctttgaccaaaatgaggagctagggctcaatgacatgaagacagagggctatgaggcaggcctggctccgcaacggtagcagtgggtggctcaagggccagcctccagcgctgctctttctgtaggttatttattagtattggatgaaggcgaaggctgggagtgtctttcccaccagcccttgcccatggtggggaggacatctggtctgagtcagagatctgtgcacactttctaaacagcttgtgatgcaagtgtgagcctattgtgttacttgaccttattttggaagttttgaattggcctaggaggaaacccagaaatgaaccaggggtatgtcatcacttttttcatatcaagtcctcaccctccttccacataatgctctatcctctaaggttggaactctgaagttggagaaggtggaataaagttacacctggagtttgttgttggttttgagtatataaaatactgactttgaacaggaaaggagtctcctgaggggagaccgagtccagcacaagtgaaggagttaccattgaaatgatgactttcaaacagcactggcctctgtattgaccctatccttgtttgatatcatgctgttagaattcagcctcctaaagaaaattttcccgtgtatctactgtaatttggggattgcagctggcatttaattcattccttcagcagatgcttgcttatctactttatgccaagcacaccacagaacagaggacaaaataaatctctttcatggaacttgaagtctagtggggaaaaatgacaataaacagatcaggaaaacagtacatcagatggtgattagtgtcatggaggaatgtaaagcagggaatggggctgggttgtgcaaggaaatggggagtagggaagatcttctgaacaagaaggtgataatttgacatttgggcaaagctgaggaggaggtcagggagtgagctgtgtgggtatctgggggaagagatttcctggcagagggaactgcaaatgctagagctgtgaggttagagccagtgggggtacctgatcagttagccctactctcagttagaaatgttgaaacacattcatccagagagaaaggaggctctctgcagttcttctgaaagttaaggaccagtgaacactctgctgcttgggccctggacttcccagccagtgttctttgcactgtagtctcctgcctctcataaacaaaaggtgactcctgtggtgcagactgcagggtatttgttcaataaagaccagttcattgattaa

SEQ ID NO: 141935 - DNA, 1380 bp, Artificial Sequence
  derived and/or modified sequence
atggctgccagcggtgcggtggaaccagggccacctggcgccgctgtggccccctctccagcccccgcgccccccccagcccctgatcatctctttagacccattagtgccgaagacgaagagcagcagcctactgagatcgaatctctctgtatgaactgctattgtaatggaatgaccaggctcctactgacaaagattccattttttcgcgagataatcgtgagcagcttcagttgcgaacactgcgggtggaacaacactgaaattcagtctgctggacgcattcaggaccagggtgtccgctacacactgagcgtccgtgccctcgaagacatgaatagggaagtcgtgaagacggactctgctgctactagaattcctgagctggacttcgagattcccgccttctctcagaagggcgccctcacaacggtggagggcctgatcacacgagcaatctccggtctcgaacaggaccagcccgcacgcagagcaaacaaagacgcaactgccgaacgcatcgatgagttcattgtgaagctgaaggaactcaagcaggtcgcttctcctttcaccctcatcatcgatgacccctcaggcaacagtttcgtagagaacccccatgcccctcagaaggacgatgcactggtcatcacacactacaatagaacaagacagcaggaggaaatgctgggtctgcaagaggaggcccccgccgaaaagcctgaggaggaggacctcagaaacgaggttctccaattttctacaaattgtccggagtgcaacgccccagcacaaactaatatgaaactggtccagattcctcattttaaggaggtcatcattatggctacaaattgcgagaactgcggccacaggaccaacgaagtaaaatcaggcggggccgttgaaccattggggaccagaataaccctgcacatcacagacgctagcgatatgaccagggacctattgaagagtgagacgtgcagcgtcgagatccctgagcttgagttcgaattgggaatggccgtgctgggcggcaagtttacaacgctcgaaggactgctgaaggatatacgagagcttgtcaccaaaaacccgttcacgttgggggatagttccaatccggggcaaactgagcgactgcaggaattcagccagaaaatggaccagatcattgaggggaatatgaaggctcattttatcatggatgaccccgccgggaactcttatttacagaacgtgtacgctccagaagatgaccctgagatgaaagtcgagaggtacaagcgtaccttcgaccaaaacgaggagctcgggctgaacgatatgaagacggaaggctacgaagccggcctggccccccagagatag

SEQ ID NO: 141936 - DNA, 1380 bp, Artificial Sequence
  derived and/or modified sequence
atggccgccagcggggctgtggagcccggccccccaggagctgctgtggcccccagccctgccccagcccctcctccagccccagaccacctgttccggcccatctctgcagaagatgaggagcagcagcccacagaaattgagagcctgtgcatgaactgctactgcaatggcatgacccggctgctgctgaccaagatccccttcttccgggagatcatcgtgtcctccttcagctgtgagcactgcggctggaacaacacagagatccagagcgctggccgcatccaggaccagggcgtgcgctacaccctgtctgtgcgggccctggaggacatgaaccgggaggtggtgaagacagacagcgctgccacccgcatccctgagctggactttgagatcccagccttcagccagaagggggccctgaccaccgtggagggcctcatcacccgggccatcagcggcctggagcaggaccagcctgcccggcgggccaacaaggatgccacagctgagagaattgatgagttcatcgtgaagctgaaggagctgaagcaggtggccagccccttcaccctcatcattgatgaccccagcggcaacagctttgtggagaacccccacgccccccagaaggatgatgccctggtgatcacccactacaacagaacccggcagcaggaggagatgctgggcctgcaggaggaggccccagctgagaagccagaggaggaggacctgagaaatgaggtgctgcagttcagcaccaactgcccagaatgtaatgccccagcccagaccaacatgaagctggtgcagatcccccacttcaaggaggtgatcatcatggccaccaactgtgagaactgtggccacaggaccaatgaggtgaagagcggcggcgctgtggagcccctgggcacccgcatcaccctgcacatcacagatgccagtgacatgacccgggacctgctgaagtctgagacctgcagcgtggagatccctgagctggagtttgagctgggcatggctgtgctgggcggcaagttcaccaccctggagggcctgctgaaggacatccgggagctggtgaccaagaaccccttcaccctgggggacagcagcaaccctggccagacagagcggctgcaggagttcagccagaagatggaccagatcatcgagggcaacatgaaggcccacttcatcatggatgatcctgctggcaacagctacctgcagaatgtgtatgccccagaagatgatcctgagatgaaggtggagcgctacaagaggacctttgaccagaatgaggagctgggcctgaatgacatgaagacagagggctatgaagctggcctggccccccagaggtag

SEQ ID NO: 141937 - DNA, 1380 bp, Artificial Sequence
  derived and/or modified sequence
atggccgccagcggcgccgtggagcccggcccccccggcgccgccgtcgcaccctctccagctcccgccccacccccagcgccagaccacctcttccggccgatcagcgccgaggatgaggaacagcagccaacagagattgagtccctgtgcatgaactgctattgcaatgggatgacacgcctcctcctcaccaagataccattcttccgcgagatcattgtgtcatccttttcctgcgagcattgtggatggaacaacacagagatacagtccgccggccggatccaggatcaaggcgtgagatatacacttagtgtccgagctctcgaggatatgaatcgtgaagtggtgaagaccgactccgcagccaccaggatcccagagcttgactttgagatccctgccttttcccagaagggtgccctgacaacagtggagggtctcattacccgcgccattagcggcttagagcaagatcaacccgcgagaagggctaacaaggacgccacagcggagagaatcgatgagttcattgtgaagcttaaagagctgaaacaagtagccagcccattcacactcatcatagacgatccatcaggtaacagctttgttgagaacccgcacgctccccagaaggatgatgcactggtgattacacattacaatcgtacgagacaacaggaggagatgttaggactccaggaggaggctcctgccgaaaaaccagaggaagaggatcttcggaacgaagtccttcagttttccactaattgcccagagtgcaacgctcccgcccagaccaacatgaaattggtgcagataccacattttaaagaggtgatcataatggccaccaactgcgagaactgtgggcacaggaccaacgaggtgaaaagcgggggtgctgtggagcctctcggcacacgaattacactgcatattacggacgcctcagacatgacccgcgacctactcaagtctgaaacctgttccgtggagatccctgagctggagttcgagctaggaatggctgtgcttggaggcaagtttacgacccttgagggcctgctgaaggacatccgcgaactagttaccaagaatccttttaccctgggggatagttcaaatcccggccagactgaaaggctgcaagagttcagccaaaagatggatcagataatagagggcaacatgaaggcacattttattatggacgatcctgccgggaattcctacctgcagaatgtgtacgcacctgaagacgaccccgaaatgaaggttgaacgttataagcgcacatttgatcaaaacgaagaactgggcctgaatgatatgaaaacggagggctacgaggccggcttagcgccccagcggtag

SEQ ID NO: 141938 - DNA, 1380 bp, Artificial Sequence
  derived and/or modified sequence
atggccgcttccggggctgtagagccaggcccacctggcgctgctgtggctccatcaccagccccagctccaccacctgcccctgatcatctcttccgccctatcagtgccgaggatgaggagcagcagcctaccgaaatcgaaagtctgtgcatgaactgctactgcaacggaatgacccggctgctcttaacaaagatccccttctttagggaaatcatagtctcatcatttagttgtgagcattgtggctggaataacacggagattcagagtgctgggagaattcaggaccaaggggtgcggtacactctttcagtgagagcattggaagatatgaaccgggaggtagtgaaaacggacagcgccgctactcgaattcccgaactcgacttcgaaatccccgcattcagccagaagggtgccttgacaacagtggaaggtttaatcacacgagcaatatccggtctggaacaggaccagccagcacgtcgggcaaacaaggatgcaaccgcggagaggatcgacgagttcattgttaagctgaaggaattgaaacaagtagcttcgccatttaccctgatcatagacgacccttccggtaacagcttcgtcgagaatccccatgctcctcagaaagacgacgccctcgtgattacccactacaacaggaccaggcagcaggaagagatgctaggtctgcaggaagaggcccctgccgagaaacccgaggaagaggacttaaggaacgaagttcttcagttctcgaccaattgtcctgaatgtaatgctcctgcacagaccaacatgaagctcgttcagatccctcacttcaaggaagtaatcataatggcgaccaattgcgaaaactgcgggcatcgaaccaatgaagtgaagtctggcggtgccgtggaaccattgggcactcggattacacttcacatcacagacgcttccgatatgaccagggatctcctcaagtctgaaacatgttctgtggaaattcccgaactggagtttgagttgggcatggctgtcctgggcggtaaattcaccactttggaaggcttactcaaggatatcagggagctggtgaccaaaaatccttttaccctgggggattcaagcaaccccggacagaccgaaagactgcaggaatttagtcagaagatggatcagataatcgaaggaaacatgaaggcccattttatcatggatgatccagccggtaactcctatctccagaatgtctatgcgcctgaagacgaccccgagatgaaagtggagagatacaagcgcacctttgatcaaaacgaagaattgggactgaacgacatgaagacagagggctacgaggcaggcctggctcctcaacgttag

SEQ ID NO: 141939 - DNA, 1380 bp, Artificial Sequence
  derived and/or modified sequence
atggccgccagcggcgccgtggagcccggcccccccggcgccgccgtggcccccagccccgcccccgcccccccccccgcccccgaccacctgttcagacccatcagcgccgaggacgaggagcagcagcccaccgagatcgagagcctgtgcatgaactgctactgcaacggcatgaccagactgctgctgaccaagatccccttcttcagagagatcatcgtgagcagcttcagctgcgagcactgcggctggaacaacaccgagatccagagcgccggcagaatccaggaccagggcgtgagatacaccctgagcgtgagagccctggaggacatgaacagagaggtggtgaagaccgacagcgccgccaccagaatccccgagctggacttcgagatccccgccttcagccagaagggcgccctgaccaccgtggagggcctgatcaccagagccatcagcggcctggagcaggaccagcccgccagaagagccaacaaggacgccaccgccgagagaatcgacgagttcatcgtgaagctgaaggagctgaagcaggtggccagccccttcaccctgatcatcgacgaccccagcggcaacagcttcgtggagaacccccacgccccccagaaggacgacgccctggtgatcacccactacaacagaaccagacagcaggaggagatgctgggcctgcaggaggaggcccccgccgagaagcccgaggaggaggacctgagaaacgaggtgctgcagttcagcaccaactgccccgagtgcaacgcccccgcccagaccaacatgaagctggtgcagatcccccacttcaaggaggtgatcatcatggccaccaactgcgagaactgcggccacagaaccaacgaggtgaagagcggcggcgccgtggagcccctgggcaccagaatcaccctgcacatcaccgacgccagcgacatgaccagagacctgctgaagagcgagacctgcagcgtggagatccccgagctggagttcgagctgggcatggccgtgctgggcggcaagttcaccaccctggagggcctgctgaaggacatcagagagctggtgaccaagaaccccttcaccctgggcgacagcagcaaccccggccagaccgagagactgcaggagttcagccagaagatggaccagatcatcgagggcaacatgaaggcccacttcatcatggacgaccccgccggcaacagctacctgcagaacgtgtacgcccccgaggacgaccccgagatgaaggtggagagatacaagagaaccttcgaccagaacgaggagctgggcctgaacgacatgaagaccgagggctacgaggccggcctggccccccagagatag

SEQ ID NO: 141940 - protein, 534 aa, Artificial Sequence
  derived and/or modified sequence
MAQLGKLLKEQKYDRQLRLWGDHGQEALESAHVCLINATATGTEILKNLVLPGIGSFTIIDGNQVSGEDAGNNFFLQRSSIGKNRAEAAMEFLQELNSDVSGSFVEESPENLLDNDPSFFCRFTVVVATQLPESTSLRLADVLWNSQIPLLICRTYGLVGYMRIIIKEHPVIESHPDNALEDLRLDKPFPELREHFQSYDLDHMEKKDHSHTPWIVIIAKYLAQWYSETNGRIPKTYKEKEDFRDLIRQGILKNENGAPEDEENFEEAIKNVNTALNTTQIPSSIEDIFNDDRCINITKQTPSFWILARALKEFVAKEGQGNLPVRGTIPDMIADSGKYIKLQNVYREKAKKDAAAVGNHVAKLLQSIGQAPESISEKELKLLCSNSAFLRVVRCRSLAEEYGLDTINKDEIISSMDNPDNEIVLYLMLRAVDRFHKQQGRYPGVSNYQVEEDIGKLKSCLTGFLQEYGLSVMVKDDYVHEFCRYGAAEPHTIAAFLGGAAAQEVIKIITKQFVIFNNTYIYSGMSQTSATFQL

SEQ ID NO: 141941 - DNA, 1605 bp, Artificial Sequence
  derived and/or modified sequence
atggcacaacttggcaagctgctcaaggagcagaaatacgaccggcagctgcggctttggggagaccatgggcaagaggccctggagtccgcccacgtgtgcctgattaatgccaccgcgaccgggactgagattctaaagaatctggtacttcccggcatcggaagcttcaccattatagatggcaaccaggtcagtggcgaggacgcaggtaataatttcttcttacagcgctcttctataggcaaaaaccgggctgaagctgccatggagtttctccaggagctcaacagcgacgtgtctggctccttcgtggaggaaagccccgaaaatcttttggacaacgaccctagctttttctgtagattcaccgtggttgtcgctactcagctgccggaatccacgagcctccgcttggcagatgtactgtggaactctcagattcccctgctcatctgccggacctacggcctcgtgggttatatgcgcataattatcaaggaacatcctgtgatcgaatcccaccccgacaatgcactcgaagacctcaggttggacaagcctttcccggagctgagagagcactttcaaagctacgatttagatcatatggagaaaaaagaccatagtcacaccccttggattgtgatcattgccaagtatcttgctcaatggtacagcgagacaaacggacgcattcccaagacgtataaagaaaaagaggatttccgggatctgatccgccagggaattctcaagaacgagaacggggcccccgaagatgaagaaaatttcgaagaggctatcaagaacgtaaatactgctctgaacacgacacaaatacccagctcaatagaggacattttcaatgatgacaggtgtatcaatattactaagcaaacgccctcgttttggattcttgcgcgcgcccttaaagaattcgtggcaaaagagggccagggaaatctgcctgttcgaggcactatcccagatatgatcgccgactctgggaaatacataaagctgcagaatgtgtaccgcgagaaagccaagaaagacgcagctgcggtggggaatcacgtggccaagttgctccagtccattgggcaagcccctgaaagtattagtgaaaaagagctgaagttgctatgttctaatagtgccttcctaagggtagtgcggtgtcgatcactggccgaggagtatggcctcgacacaatcaacaaggacgaaatcatcagtagcatggacaaccctgacaacgaaatcgtgctgtatttaatgttacgcgccgtggatcgcttccacaaacagcaggggagatacccaggcgtgagcaattatcaggtggaggaagatattggtaaactgaagagttgcctgacaggcttcctacaggagtacggcctgagtgtaatggtaaaggatgattatgtccacgagttctgtaggtatggggctgctgagccgcacaccattgccgcttttctggggggagcggcagcacaggaagtcatcaaaattatcaccaagcagttcgtgatatttaacaatacatacatatatagcggtatgtcccagacatctgccacatttcagctgtag

SEQ ID NO: 141942 - DNA, 1605 bp, Artificial Sequence
  derived and/or modified sequence
atggcccagctgggcaagctgctgaaggagcagaagtatgaccggcagctgcggctgtggggagaccacggccaggaggccctggagagcgcccacgtgtgcctgatcaatgccacagccactggaacagagatcctgaagaacctggtgctgcccggcatcggcagcttcaccatcattgatggcaaccaggtgtctggagaagatgctggcaacaacttcttcctgcagaggagcagcatcggcaagaacagagctgaggccgccatggagttcctgcaggagctgaacagtgatgtgtctggcagctttgtggaggagagccctgagaacctgctggacaatgaccccagcttcttctgccgcttcaccgtggtggtggccacccagctgcctgagagcaccagcctgcggctggctgatgtgctgtggaacagccagatccccctgctgatctgcaggacctacggcctggtgggctacatgaggatcatcatcaaggagcaccctgtgattgagagccacccagacaatgccctggaggacctgcggctggacaagcccttccctgagctgcgggagcacttccagagctatgacctggaccacatggagaagaaggaccacagccacaccccctggatcgtcatcatcgccaagtacctggcccagtggtacagcgagaccaacggccgcatccccaagacctacaaggagaaggaggacttccgggacctgatccggcagggcatcctgaagaatgaaaatggagccccagaagatgaagaaaattttgaggaggccatcaagaatgtgaacacagccctgaacaccacccagatccccagcagcattgaggacatcttcaatgatgaccgctgcatcaacatcaccaagcagacccccagcttctggatcctggcccgggccctgaaggagtttgtggccaaggagggccagggcaacctgcctgtgcggggcaccatcccagacatgattgctgacagcggcaagtacatcaagctgcagaatgtgtaccgggagaaggccaagaaggatgctgctgctgtgggcaaccacgtggccaagctgctgcagagcatcggccaggcccctgagagcatcagcgagaaggagctgaagctgctgtgcagcaacagcgccttcctgcgggtggtgcgctgccgcagcctggccgaggagtatggcctggacaccatcaacaaggatgagatcatcagctccatggacaacccagacaatgaaattgtgctgtacctgatgctgcgggctgtggaccgcttccacaagcagcagggccgctacccaggagtgagcaactaccaggtggaggaggacatcggcaagctgaagagctgcctgaccggcttcctgcaggagtatggcctgtctgtgatggtgaaggatgattatgtgcatgagttctgccgctatggagctgctgagccccacaccatcgccgccttcctgggcggcgctgctgcccaggaggtgatcaagatcatcaccaagcagtttgtgatcttcaacaacacctacatctacagcggcatgagccagaccagcgccaccttccagctgtag

SEQ ID NO: 141943 - DNA, 1605 bp, Artificial Sequence
  derived and/or modified sequence
atggcccagctgggcaagctgctgaaggagcagaagtacgaccggcagctcagactctggggcgaccacggccaggaagcccttgagtctgcacatgtgtgcctgattaatgccaccgctaccggcaccgagatactcaagaacttggtcttgcccgggatcgggtcgttcaccatcatcgatggtaaccaggtttcaggcgaggacgctggtaacaatttcttcctgcaacggagcagcattgggaaaaacagagcggaggctgctatggagttcttacaggaactcaatagcgacgtgtctggcagcttcgtagaggaaagtcctgaaaatctgctggataacgacccaagttttttctgccgatttactgtggtggtggcaacccagctgcctgaatccacaagcctgcggttagctgacgttctctggaatagtcagatccccttattgatttgccgaacttacggcctcgttgggtacatgcgcatcatcatcaaggagcaccctgtaattgagagtcacccagacaatgcactggaggatcttcgcttagataagccctttcccgagttaagggaacatttccagagctatgacctagaccacatggaaaaaaaggaccactcgcacaccccttggatcgtgataattgccaagtatctcgcccaatggtacagtgagactaatggacgcattccaaaaacatacaaagagaaagaagactttcgcgacctcattcggcagggaatactgaaaaacgaaaatggggctcccgaagatgaagaaaacttcgaggaagcaataaaaaatgtgaatactgcgctcaatacgacacagataccttcttccatcgaggacatcttcaacgatgatcgatgcataaatattacaaagcaaactccaagcttttggatcctcgccagggcgctgaaggagttcgtagccaaggagggtcaaggtaacttacctgttaggggcactattcccgatatgatcgctgacagcggcaagtacattaagctgcagaatgtctatcgtgagaaagcgaaaaaggacgctgcagcagtaggaaatcatgttgccaagctccttcagagtattggtcaggccccagagtccatttctgaaaaggagctgaagttgctgtgctccaattctgcatttctgcgcgtggtgcggtgccgcagtctggccgaggaatatggtctggatactatcaacaaagatgagatcattagctcaatggataacccagataacgaaatagtgctctacctgatgctccgcgcagtagatcgattccacaaacagcaaggaaggtaccccggcgttagcaattaccaggtggaagaagatatagggaagctgaaatcatgtctaaccggcttcctccaggagtacggattatccgtaatggtgaaggatgattacgtacatgagttttgtagatacggggcagccgaacctcacaccatcgctgcttttttgggtggggctgccgctcaagaagtgattaaaatcatcacaaagcaatttgttatctttaacaatacctacatttattcagggatgagtcaaacatcggctacatttcaattatag

SEQ ID NO: 141944 - DNA, 1837 bp, Artificial Sequence
  derived and/or modified sequence
ggtagcggcgaaggggcgctcagtgcgcctgcgcgcttgtggagctggtggcggcgctccgcaggggctcggctgttttccgcgcggcaggcgcggccatggcgcagctgggaaagctgctcaaggagcagaagtacgaccggcagctgaggttgtggggtgatcatgggcaagaggctttagaatctgctcatgtttgcctaataaatgcaacagccacaggaactgaaattcttaaaaacttggtactaccaggtattggttcgtttacaattattgatggaaatcaggtcagcggagaagatgctggaaacaatttcttccttcaaagaagcagtatcggcaagaaccgagctgaagctgccatggaattcttacaagaattaaatagcgatgtctctggaagttttgtggaagagagtccagaaaaccttctagacaatgatccctcatttttctgtaggtttactgttgtagttgcaactcagcttcctgaaagcacttcactacgcttagcagatgtcctctggaattcccagattcctcttttgatctgtaggacatatggactagttggttatatgaggatcattataaaagaacatccagtaatagaatctcatccagataatgcattagaggatctacgactagataagccatttcctgaactgagagaacattttcagtcctatgatttggatcatatggaaaaaaaggaccacagtcatactccatggattgtgatcatagctaaatatttagcacagtggtatagtgaaacaaatggacgaatacctaaaacgtataaagaaaaagaggacttcagagatttgattagacaaggaattctaaaaaatgaaaatggggctccagaagatgaagagaattttgaagaagctattaaaaatgtgaacacagcactaaatacaactcagatcccaagcagtattgaagatatatttaatgatgatcgctgcataaatatcaccaaacagactccatcattttggattttagctcgtgccttaaaggaatttgtggccaaagagggtcaaggaaatttacctgttcgaggcacaattcctgatatgattgcagattcaggcaaatatataaaactgcaaaacgtttaccgtgaaaaagcaaagaaagatgctgccgctgtgggtaatcatgttgccaaattgctgcagtccattggccaggcaccagagtccatttcagagaaagaattaaaattactctgcagcaattctgcatttcttcgagtggtaagatgtcgatccttagctgaagaatatggtttggatacaattaacaaggatgaaattatttctagcatggacaatccagataatgaaatagtgttgtacttaatgttacgggctgttgatagatttcataaacaacagggtagatatccaggagtatctaactatcaagttgaagaagatataggaaagttgaagtcttgtctcactggcttccttcaggaatatggtttatctgtaatggtgaaagatgattatgtccacgaattttgccgatatggagctgctgagccacataccattgctgcattcttggggggagctgctgctcaagaggtcatcaaaataatcaccaaacaatttgtaatttttaataatacttacatttacagtggcatgtcacaaacttcagcaactttccagttgtagagtaagcaagcaccttaagtagtgtgttaatgattgaaactgtaattgccttcgggttgtgctttagtctgtaaaattctaaaggagagctgctaaattgttttcttaataaacatttttctcatttgtaataa

SEQ ID NO: 141945 - DNA, 1605 bp, Artificial Sequence
  derived and/or modified sequence
atggcacagcttgggaagctcctcaaagagcagaagtatgatagacagcttcgcctctggggtgaccatggacaggaagctctggagtctgcccatgtctgccttatcaacgccacagccacaggaaccgaaatcctcaagaacctggtcctccctggcatcggcagtttcactataattgatggaaaccaggtcagcggagaggatgctggcaataacttcttccttcaacggagctccatagggaaaaaccgggcagaagccgcaatggagttcttacaggaactcaatagcgacgtctctgggagctttgtggaggaaagtccagagaatctgttggacaatgatcctagctttttttgccggttcactgtggtggtcgctacacagctgcccgagtcgactagcctgcggctcgccgatgtgctgtggaactctcagatcccactgctgatatgccgcacctacggactggtgggatacatgaggatcatcatcaaggagcacccagtcattgaaagtcacccggataatgccctcgaagatctccgccttgacaagcctttcccagaattgagagagcactttcagtcctatgatctagaccacatggaaaagaaagaccactcccatactccatggatcgtgatcatcgccaagtatctggctcaatggtattcagagactaatggacgtatccctaaaacctacaaagaaaaagaagacttccgggatttaatcagacaaggcatcctgaagaacgagaatggtgcacccgaagacgaggaaaactttgaagaagcaattaaaaacgtcaataccgcacttaatactacccagatcccttcatccatcgaggatatcttcaacgatgaccgctgcattaacattactaagcagaccccatctttttggatcctggccagggcacttaaggaatttgtggccaaggagggccaggggaatctgcctgttcgcggaacaatccccgacatgatcgccgacagtggcaagtacattaagctgcagaacgtgtatagagaaaaagcaaagaaggatgcggcagcagtcggaaaccatgtggctaaactgctccagtccatcggccaggccccagaaagcatctccgaaaaagagttgaagcttctatgcagtaacagcgctttcctcagggtggtgagatgcaggagcttggctgaggagtatggcttggacacgatcaacaaggatgagattatatcttctatggataatcccgataacgaaatagtgctgtatctcatgctgcgggctgtcgatagatttcacaagcagcagggtaggtacccaggagtatcaaactaccaggtggaagaagacatcgggaagctgaagagttgcctgactggctttttacaagaatacgggttatctgtcatggtgaaggatgattatgtgcatgagttctgtagatacggcgcagcagagccccacactatagctgcgtttctgggcggagccgctgctcaagaagtgattaaaatcattacaaagcagttcgttatctttaacaacacttatatttacagtggcatgtcgcaaacatccgccactttccaactgtag

SEQ ID NO: 141946 - DNA, 1605 bp, Artificial Sequence
  derived and/or modified sequence
atggcccagctgggcaagctgctgaaggagcagaagtacgacagacagctgagactgtggggcgaccacggccaggaggccctggagagcgcccacgtgtgcctgatcaacgccaccgccaccggcaccgagatcctgaagaacctggtgctgcccggcatcggcagcttcaccatcatcgacggcaaccaggtgagcggcgaggacgccggcaacaacttcttcctgcagagaagcagcatcggcaagaacagagccgaggccgccatggagttcctgcaggagctgaacagcgacgtgagcggcagcttcgtggaggagagccccgagaacctgctggacaacgaccccagcttcttctgcagattcaccgtggtggtggccacccagctgcccgagagcaccagcctgagactggccgacgtgctgtggaacagccagatccccctgctgatctgcagaacctacggcctggtgggctacatgagaatcatcatcaaggagcaccccgtgatcgagagccaccccgacaacgccctggaggacctgagactggacaagcccttccccgagctgagagagcacttccagagctacgacctggaccacatggagaagaaggaccacagccacaccccctggatcgtgatcatcgccaagtacctggcccagtggtacagcgagaccaacggcagaatccccaagacctacaaggagaaggaggacttcagagacctgatcagacagggcatcctgaagaacgagaacggcgcccccgaggacgaggagaacttcgaggaggccatcaagaacgtgaacaccgccctgaacaccacccagatccccagcagcatcgaggacatcttcaacgacgacagatgcatcaacatcaccaagcagacccccagcttctggatcctggccagagccctgaaggagttcgtggccaaggagggccagggcaacctgcccgtgagaggcaccatccccgacatgatcgccgacagcggcaagtacatcaagctgcagaacgtgtacagagagaaggccaagaaggacgccgccgccgtgggcaaccacgtggccaagctgctgcagagcatcggccaggcccccgagagcatcagcgagaaggagctgaagctgctgtgcagcaacagcgccttcctgagagtggtgagatgcagaagcctggccgaggagtacggcctggacaccatcaacaaggacgagatcatcagcagcatggacaaccccgacaacgagatcgtgctgtacctgatgctgagagccgtggacagattccacaagcagcagggcagataccccggcgtgagcaactaccaggtggaggaggacatcggcaagctgaagagctgcctgaccggcttcctgcaggagtacggcctgagcgtgatggtgaaggacgactacgtgcacgagttctgcagatacggcgccgccgagccccacaccatcgccgccttcctgggcggcgccgccgcccaggaggtgatcaagatcatcaccaagcagttcgtgatcttcaacaacacctacatctacagcggcatgagccagaccagcgccaccttccagctgtag

SEQ ID NO: 141947 - protein, 721 aa, Artificial Sequence
  derived and/or modified sequence
MAAPVVAPPGVVVSRANKRSGAGPGGSGGGGARGAEEEPPPPLQAVLVADSFDRRFFPISKDQPRVLLPLANVALIDYTLEFLTATGVQETFVFCCWKAAQIKEHLLKSKWCRPTSLNVVRIITSELYRSLGDVLRDVDAKALVRSDFLLVYGDVISNINITRALEEHRLRRKLEKNVSVMTMIFKESSPSHPTRCHEDNVVVAVDSTTNRVLHFQKTQGLRRFAFPLSLFQGSSDGVEVRYDLLDCHISICSPQVAQLFTDNFDYQTRDDFVRGLLVNEEILGNQIHMHVTAKEYGARVSNLHMYSAVCADVIRRWVYPLTPEANFTDSTTQSCTHSRHNIYRGPEVSLGHGSILEENVLLGSGTVIGSNCFITNSVIGPGCHIGDNVVLDQTYLWQGVRVAAGAQIHQSLLCDNAEVKERVTLKPRSVLTSQVVVGPNITLPEGSVISLHPPDAEEDEDDGEFSDDSGADQEKDKVKMKGYNPAEVGAAGKGYLWKAAGMNMEEEEELQQNLWGLKINMEEESESESEQSMDSEEPDSRGGSPQMDDIKVFQNEVLGTLQRGKEENISCDNLVLEINSLKYAYNISLKEVMQVLSHVVLEFPLQQMDSPLDSSRYCALLLPLLKAWSPVFRNYIKRAADHLEALAAIEDFFLEHEALGISMAKVLMAFYQLEILAEETILSWFSQRDTTDKGQQLRKNQQLQRFIQWLKEAEEESSEDD

SEQ ID NO: 141948 - DNA, 2655 bp, Artificial Sequence
  derived and/or modified sequence
tccctcctcgtctccttcccttcgttaattagtccatcgcatttcaagtgctggatcctttttgtcccctactgcgtgcggtggcagcttccttgcggaagtggtgaccgtgagagaagaagatggcggcccctgtagtggcgccgcctggtgtggtggttagtcgggctaacaagcgcagcggcgcggggccgggaggcagcggtggcgggggagccagaggggcggaggaggaaccgccgccgcccctacaagcagttctggtggccgatagcttcgatcgccgcttcttccccatctccaaggaccagcctcgggtcctcttgcccctggccaatgtggcattaattgactacactctggaattcctgactgccacaggtgtacaggaaacatttgtcttttgttgctggaaagctgctcaaatcaaagaacatttactgaagtcaaagtggtgccgccctacatctctcaatgtggttcgaataattacatcagagctctatcgatcactgggagatgtcctccgtgatgttgatgccaaggctttggtgcgctctgactttcttctggtgtatggggatgtcatctcaaacatcaatatcaccagagcccttgaggaacacaggttgagacggaagctagaaaaaaatgtttctgtgatgacgatgatcttcaaggagtcatcccccagccacccaactcgttgccacgaagacaatgtggtagtggctgtggatagtaccacaaacagggttctccattttcagaagacccagggtctccggcgttttgcatttcctctgagcctgtttcagggcagtagtgatggagtggaggttcgatatgatttactggattgtcatatcagcatctgttctcctcaggtggcacaactctttacagacaactttgactaccaaactcgagatgactttgtgcgaggtctcttagtgaatgaggagatcctagggaaccagatccacatgcacgtaacagctaaggaatatggtgcccgtgtctccaacctacacatgtactcagctgtctgtgctgacgtcatccgccgatgggtctaccctctcaccccagaggcgaacttcactgacagcaccacccagagctgcactcattcccggcacaacatctaccgagggcctgaggtcagcctgggccatggcagcatcctagaggaaaatgtgctcctgggctctggcactgtcattggcagcaattgctttatcaccaacagtgtcattggccccggctgccacattggtgataacgtggtgctggaccagacctacctgtggcagggtgttcgagtggcggctggagcacagatccatcagtctctgctttgtgacaatgctgaggtcaaggaacgagtgacactgaaaccacgctctgtcctcacttcccaggtggtcgtgggcccaaatatcacgctgcctgagggctcggtgatctctttgcaccctccagatgcagaggaagatgaagatgatggcgagttcagtgatgattctggggctgaccaagaaaaggacaaagtgaagatgaaaggttacaatccagcagaagtaggagctgctggcaagggctacctctggaaagctgcaggcatgaacatggaggaagaggaggaactgcagcagaatctgtggggactcaagatcaacatggaagaagagagtgaaagtgaaagtgagcaaagtatggattctgaggagccggacagccggggaggctcccctcagatggatgacatcaaagtgttccagaatgaagttttaggaacactacagcggggcaaagaggagaacatttcttgtgacaatctcgtcctggaaatcaactctctcaagtatgcctataacataagtctaaaggaggtgatgcaggtactgagccacgtggtcctggagttccccctgcaacagatggattccccgcttgactcaagccgctactgtgccctgctgcttcctctgctaaaggcctggagccctgtttttaggaactacataaagcgcgcagccgaccatttggaagcgttagcagccattgaggacttcttcctagagcatgaagctcttggtatttccatggccaaggtactgatggctttctaccagctggagatcctggctgaggaaacaattctgagctggttcagccaaagagatacaactgacaagggccagcagttgcgcaagaatcaacagctgcagaggttcatccagtggctaaaagaggcagaagaggagtcatctgaagatgactgaagtcacactgcctgctcctttgggtgtgattgagtgccctcctggctcctgggctgggacaagtgaggaactagctgcagagggatgagtgaccaccatccaggctgagactgaaaggagcagaggctggaactacagtattctttcccctgctagcaaccatgtgcctcccatcctgactgtggagttgggatgtggaagtggggctggaacaaagcttctgcctagggaggagctaagcaggcccggcagttggaggaaggccagaggaacagctttgtgctccggctttccctcagggaacagcagagagcagttggctctttctgctgcttgtatatgttaatattaaaagagagagtggtgt

SEQ ID NO: 141949 - DNA, 2166 bp, Artificial Sequence
  derived and/or modified sequence
atggctgctccggtggtagcgccgcctggagtcgtagtgagccgggccaataaaaggagcggagccggccccggcggaagtggcggtgggggggctcggggggctgaggaagagcctcctccccccctgcaagctgttttggtggctgactcattcgatcgtcgattttttcccatctctaaggatcagccgcgcgtccttctaccgcttgccaacgtcgccctgattgattacacgctcgaatttctgaccgccacaggagttcaggagacgtttgtcttctgctgttggaaggccgcgcagatcaaggagcacctgctgaagagtaagtggtgtagacctacaagccttaatgtcgtgcgaataatcacctctgaactttaccggagtctgggagacgtgctgagagatgtggatgccaaggcactggtgcggtcagactttttattagtttatggggacgtgatctcgaatattaatataacccgtgcattagaggaacaccggttgcggcgaaagctagagaagaatgtttccgtaatgacgatgatcttcaaggagagctcccctagccacccgacaagatgccacgaggacaatgtcgttgtcgccgtggactccaccacaaacagagtgttgcacttccagaagacacagggactgcggagattcgccttccctctgagcctgttccaaggatcctcggatggcgtcgaggtaagatacgatctccttgattgtcatatctctatctgctccccccaggtggcccaactttttactgataactttgactatcagactagggacgatttcgtcagaggactgttagtcaacgaagaaatcctgggcaaccagatccatatgcacgtgacagccaaagaatatggggcacgagtgtccaaccttcatatgtacagcgcagtgtgtgcggacgtgatacggagatgggtatatccactcactcccgaggcaaactttactgacagcacaacacagtcttgcacccattctcggcataacatttatcgaggtcccgaagtcagcctggggcacggtagcatcttggaggaaaacgtgttgctcgggtccggcaccgtcatcggctcaaactgcttcatcacaaattctgtgatcggccccggatgccacatcggcgacaatgtggtccttgatcagacatatctgtggcaaggagtccgggtggccgcaggcgctcagattcaccagtcactgctttgtgataacgccgaagtgaaggagagagttacactcaaaccacggagcgttctcacctctcaggtggttgtcggtcctaacattaccctacccgaaggctctgtcatttcgctccaccccccggacgccgaggaagatgaggatgatggggagtttagtgatgatagcggcgccgaccaagagaaagataaggtaaaaatgaaagggtacaatcctgccgaagtaggagcagcaggaaaagggtacctttggaaggccgcaggcatgaacatggaggaagaggaagagttacagcagaacctctgggggcttaagataaacatggaagaggaaagtgagtcggaatccgagcaatccatggactccgaggaacctgacagtcgcgggggctccccacagatggatgacataaaagtgttccagaacgaggtgctgggaaccctgcaacgcgggaaagaagagaatatcagctgcgacaatctggtactggagatcaactcactgaaatacgcatataatatttccttaaaagaggtgatgcaggtcctttctcatgtggtactggagtttcccctacaacagatggactcgcccctggacagctctcggtactgcgccctgctgttgcccctgctcaaagcctggtcgccggtctttcggaactatatcaaacgcgctgccgaccacctcgaggccttagcagctatcgaggactttttccttgagcatgaggccctcggaatttcaatggcgaaggtcctgatggcgttttaccaactggagatcctggccgaggaaaccatcctctcgtggttttctcaaagggataccacagataaggggcagcagcttcgcaagaatcagcaactccagcgcttcatccagtggctgaaagaggccgaggaggagtcatcagaggacgattag

SEQ ID NO: 141950 - DNA, 2166 bp, Artificial Sequence
  derived and/or modified sequence
atggccgcccctgtggtggcccctcctggggtggtggtgtcccgggccaacaagaggtctggggccggccctgggggcagcggcggcggcggggcccggggagctgaggaggagcccccaccacccctgcaggccgtgctggtggccgacagctttgaccggcgcttcttccccatcagcaaggaccagccccgggtgctgctgcccctggccaacgtggccctgattgactacaccctggagttcctgacagccaccggggtgcaggagacctttgtgttctgctgctggaaggccgcccagatcaaggagcacctgctgaagagcaagtggtgccggcccaccagcctgaatgtggtgcgcatcatcaccagcgagctgtaccgcagcctgggagatgtgctgagagatgtggatgccaaggccctggtgcggagtgacttcctgctggtgtatggagatgtgatcagcaacatcaacatcacccgggccctggaggagcaccggctgcggaggaagctggagaagaatgtgtctgtgatgaccatgatcttcaaggagagcagccccagccaccccacccgctgccacgaggacaacgtggtggtggccgtggacagcaccaccaacagagtgctgcacttccagaagacccagggcctgcggagatttgccttccccctgagcctcttccagggcagcagtgatggagtggaggtgcgctatgacctgctggactgccacatcagcatctgcagcccccaggtggcccagctgttcacagacaactttgactaccagaccagagatgactttgtgcggggcctgctggtgaatgaggagatcctgggcaaccagatccacatgcacgtgacagccaaggagtatggagcccgggtgagcaacctgcacatgtacagcgctgtgtgtgctgatgtgatccgccgctgggtgtaccccctgaccccagaggccaacttcacagacagcaccacccagagctgcacccacagccgccacaacatctaccggggccctgaggtgtccctgggccacggcagcatcctggaggagaatgtgctgctgggcagcggcaccgtcatcggcagcaactgcttcatcaccaacagcgtgattggccctggctgccacatcggggacaacgtggtgctggaccagacctacctgtggcagggcgtgcgggtggccgccggggcccagatccaccagagcctgctgtgtgacaatgctgaggtgaaggagcgggtgaccctgaagcccaggtctgtgctgaccagccaggtggtggtgggccccaacatcaccctgcctgagggcagcgtcatcagcctgcaccccccagatgctgaggaggatgaagatgatggagagttcagtgatgattctggagctgaccaggagaaggacaaggtgaagatgaagggctacaacccagctgaggtgggcgctgctgggaagggctacctgtggaaggccgccggcatgaacatggaggaggaggaggagctgcagcagaacctgtggggcctgaagatcaacatggaggaggagagcgagagcgagagcgagcagagcatggattctgaggagccagacagccggggcggcagcccccagatggatgacatcaaggtgttccagaatgaggtgctgggcaccctgcagaggggcaaggaggagaacatcagctgtgacaacctggtgctggagatcaacagcctgaagtatgcctacaacatcagcctgaaggaggtgatgcaggtgctgagccacgtggtgctggagttccccctgcagcagatggacagccccctggacagcagccgctactgtgccctgctgctgcccctgctgaaggcctggagccctgtgttcaggaactacatcaagagagctgctgaccacctggaggccctggccgccatcgaggacttcttcctggagcacgaggccctgggcatctccatggccaaggtgctgatggccttctaccagctggagatcctggccgaggagaccatcctgtcctggttcagccagagggacaccacagacaagggccagcagctgaggaagaaccagcagctgcagcgcttcatccagtggctgaaggaggccgaggaggagagcagtgaagatgactag

SEQ ID NO: 141951 - DNA, 2166 bp, Artificial Sequence
  derived and/or modified sequence
atggccgcccccgtggtggccccccccggcgtggtggtgagccgggctaacaagagaagcggagctggtcccggaggttcaggcggtggcggcgcccgaggcgcagaggaggaaccgccacccccactccaggccgtgctagtggccgactccttcgaccggcggtttttccccattagcaaggaccaaccccgggtcctcctgccactggccaacgtagccctgatcgattacaccctggagtttctgactgcgaccggggtgcaggaaacgtttgtcttctgttgctggaaagctgcccaaattaaggaacacctgcttaaatcgaagtggtgtcgccctaccagcctaaacgttgtgaggattattacgtcagagttgtatcgctccctgggagacgtactgagggatgtcgacgccaaagcgctagtgcggtcggatttcctactggtttacggtgatgttatttcaaatataaacatcaccagagccctggaagagcatcgactgaggcgaaaattggaaaagaacgtatcggttatgaccatgatctttaaagagtctagcccttcccaccccacacggtgtcacgaagataatgtggtcgtggccgttgactcaaccacgaaccgggtgttacactttcagaagacgcagggtctacgaaggttcgcattccccctgagtctattccagggatctagcgacggtgtagaagtgaggtatgacctccttgactgtcacatctcgatttgcagcccacaagtagcacagttgtttactgacaactttgactaccagacccgggatgattttgttagagggctgctagtgaatgaagagatcctcggaaaccagattcatatgcacgtcaccgcaaaggaatatggtgctcgggtcagtaatttgcacatgtattcggccgtgtgtgccgatgttatcagacgctgggtgtacccactcacacccgaagctaacttcaccgatagcacaacgcagagctgtacccattctcgacataatatttaccgaggtcccgaagtttcactcggtcacggtagcatccttgaggagaacgtgttgctcgggagtggtaccgtcatcggcagcaactgcttcatcaccaactccgtaattgggcctggctgccatatcggggataatgtcgttctcgaccagacttacctgtggcagggggtgagagtcgctgctggtgcccagatccatcagtcactcctgtgcgacaatgcagaggtcaaggaaagagtgaccctaaagccccggtcggttctcacatcgcaggtagtggtcgggccaaacattactcttcccgagggatcagtgatctcactgcacccccctgacgcagaggaggatgaggacgatggggaattcagtgacgattctggagccgaccaagaaaaggataaagttaagatgaaagggtacaatccggcggaggtgggcgctgccgggaagggatacctgtggaaggccgcgggtatgaatatggaggaggaagaggaacttcagcagaacctgtggggtctgaagataaacatggaggaagagagcgagagcgaaagcgaacagtcaatggactctgaagagccggattcgcgggggggatccccccagatggacgatatcaaggtcttccagaatgaggttctggggacccttcagcgggggaaggaagagaacattagttgcgacaaccttgtcctggaaattaactctctgaaatacgcctacaacatctccctaaaagaggtcatgcaggtgctgtcccacgtggtcttggaattcccactgcaacagatggattctcccctggactcgagtcgctactgcgcattgctgttgcccctcctgaaagcctggtctcctgtctttcgtaactacatcaaacgtgcagccgaccacctggaagctctggctgccatcgaggatttcttcctcgagcatgaggcgctcgggatctcaatggccaaggtccttatggctttctaccagctcgagatcctggctgaggagaccattctatcatggttttcccaacgcgatacaacagataagggccaacagcttcgcaaaaaccagcagctccagcgttttatacagtggctcaaagaagccgaagaagagtcgagcgaagacgactag

SEQ ID NO: 141952 - DNA, 2166 bp, Artificial Sequence
  derived and/or modified sequence
atggccgcacccgttgtggccccacccggagtggtggtgtccagggcaaacaagcgatctggcgcaggacctgggggatccggcggaggcggtgccagaggcgcagaagaggagccaccgcctccattgcaagctgtgctcgtggcggacagttttgacagacgtttcttcccaatctcgaaagatcaaccaagggtgctccttccactagccaatgtggccctgattgactacaccctggaattccttacagctacaggcgtgcaggagacatttgtcttttgttgctggaaggctgcccagatcaaggagcatttgctgaagtcgaagtggtgccgtccaacttctctgaacgtcgttaggatcatcacctccgagttatataggagcttgggagacgtgctccgggacgtggatgccaaagctttggtgaggtcagactttctgctggtgtatggagacgtcattagtaacattaacatcacccgggctttagaggagcaccggctgagacggaaacttgagaaaaacgtctccgtgatgactatgatctttaaggagtcgtctccatctcaccccactcgttgtcacgaggacaacgtggtcgtggcagtcgactctaccaccaatcgggtgttgcattttcagaagactcaggggcttcgcagattcgccttcccattgtcactgttccagggcagcagtgatggcgtggaggtccgctatgacttgttggactgccatatctcaatctgttcaccccaagtggctcaactgttcaccgataactttgactaccagacacgcgatgattttgtgagaggactcctggtgaatgaggagatccttggaaaccagatccatatgcatgtgaccgccaaggaatatggggctcgggtgtccaatcttcatatgtattcagcagtgtgcgcagacgtcattagacggtgggtgtatccgctgacacctgaggccaacttcacggatagcactactcagtcatgtacgcacagtcgtcacaatatctatcgaggcccagaggtttccctgggtcacggaagcatcttggaggagaatgttcttctgggtagcggcactgtaataggttccaattgttttataacaaacagcgtaattggccctggctgccacataggggataacgtggtgctggatcagacctacctatggcagggagtgagagtggccgctggcgcacagattcatcagagcctgttgtgcgataatgccgaagtgaaagaacgcgtaactctcaagcccagatctgttctgacatcacaggttgtggtcggacccaacatcacactgccagagggttctgttatatcacttcacccacctgatgcggaggaagatgaggacgatggggaattctctgacgattccggcgctgaccaggagaaagacaaggtcaagatgaaagggtacaatccggcagaggtcggtgctgccggtaagggttacctgtggaaagctgccggaatgaacatggaggaggaggaggagcttcagcagaatctctggggcctgaagatcaacatggaggaagagtccgagagtgaatcagagcagtctatggacagcgaggagccagacagcagaggtgggtcgcctcagatggacgatattaaggtttttcagaacgaggtactggggacattacagaggggcaaagaggagaacatctcatgcgacaatttggtgctggaaatcaattctctgaagtatgcctacaatatttcactgaaagaggtcatgcaggtgctttctcatgttgttctcgagtttcccctccaacagatggacagtcctttagattctagtcggtattgcgctttgctgctgccacttctgaaggcttggagcccagtgtttcgcaactacataaagcgtgcagccgatcacctggaagcactcgccgctatcgaagatttctttcttgagcacgaggctttagggatttctatggccaaggtcctgatggctttctaccagctggagatccttgcagaagagacgattctttcatggttcagtcagcgggataccacagataaggggcagcagctcaggaaaaaccagcaactccaacgcttcatccagtggctcaaggaggccgaggaggagagtagcgaagacgattag

SEQ ID NO: 141953 - DNA, 2166 bp, Artificial Sequence
  derived and/or modified sequence
atggccgcccccgtggtggccccccccggcgtggtggtgagcagagccaacaagagaagcggcgccggccccggcggcagcggcggcggcggcgccagaggcgccgaggaggagccccccccccccctgcaggccgtgctggtggccgacagcttcgacagaagattcttccccatcagcaaggaccagcccagagtgctgctgcccctggccaacgtggccctgatcgactacaccctggagttcctgaccgccaccggcgtgcaggagaccttcgtgttctgctgctggaaggccgcccagatcaaggagcacctgctgaagagcaagtggtgcagacccaccagcctgaacgtggtgagaatcatcaccagcgagctgtacagaagcctgggcgacgtgctgagagacgtggacgccaaggccctggtgagaagcgacttcctgctggtgtacggcgacgtgatcagcaacatcaacatcaccagagccctggaggagcacagactgagaagaaagctggagaagaacgtgagcgtgatgaccatgatcttcaaggagagcagccccagccaccccaccagatgccacgaggacaacgtggtggtggccgtggacagcaccaccaacagagtgctgcacttccagaagacccagggcctgagaagattcgccttccccctgagcctgttccagggcagcagcgacggcgtggaggtgagatacgacctgctggactgccacatcagcatctgcagcccccaggtggcccagctgttcaccgacaacttcgactaccagaccagagacgacttcgtgagaggcctgctggtgaacgaggagatcctgggcaaccagatccacatgcacgtgaccgccaaggagtacggcgccagagtgagcaacctgcacatgtacagcgccgtgtgcgccgacgtgatcagaagatgggtgtaccccctgacccccgaggccaacttcaccgacagcaccacccagagctgcacccacagcagacacaacatctacagaggccccgaggtgagcctgggccacggcagcatcctggaggagaacgtgctgctgggcagcggcaccgtgatcggcagcaactgcttcatcaccaacagcgtgatcggccccggctgccacatcggcgacaacgtggtgctggaccagacctacctgtggcagggcgtgagagtggccgccggcgcccagatccaccagagcctgctgtgcgacaacgccgaggtgaaggagagagtgaccctgaagcccagaagcgtgctgaccagccaggtggtggtgggccccaacatcaccctgcccgagggcagcgtgatcagcctgcacccccccgacgccgaggaggacgaggacgacggcgagttcagcgacgacagcggcgccgaccaggagaaggacaaggtgaagatgaagggctacaaccccgccgaggtgggcgccgccggcaagggctacctgtggaaggccgccggcatgaacatggaggaggaggaggagctgcagcagaacctgtggggcctgaagatcaacatggaggaggagagcgagagcgagagcgagcagagcatggacagcgaggagcccgacagcagaggcggcagcccccagatggacgacatcaaggtgttccagaacgaggtgctgggcaccctgcagagaggcaaggaggagaacatcagctgcgacaacctggtgctggagatcaacagcctgaagtacgcctacaacatcagcctgaaggaggtgatgcaggtgctgagccacgtggtgctggagttccccctgcagcagatggacagccccctggacagcagcagatactgcgccctgctgctgcccctgctgaaggcctggagccccgtgttcagaaactacatcaagagagccgccgaccacctggaggccctggccgccatcgaggacttcttcctggagcacgaggccctgggcatcagcatggccaaggtgctgatggccttctaccagctggagatcctggccgaggagaccatcctgagctggttcagccagagagacaccaccgacaagggccagcagctgagaaagaaccagcagctgcagagattcatccagtggctgaaggaggccgaggaggagagcagcgaggacgactag

SEQ ID NO: 141954 - protein, 333 aa, Artificial Sequence
  derived and/or modified sequence
MSGDEMIFDPTMSKKKKKKKKPFMLDEEGDTQTEETQPSETKEVEPEPTEDKDLEADEEDTRKKDASDDLDDLNFFNQKKKKKKTKKIFDIDEAEEGVKDLKIESDVQEPTEPEDDLDIMLGNKKKKKKNVKFPDEDEILEKDEALEDEDNKKDDGISFSNQTGPAWAGSERDYTYEELLNRVFNIMREKNPDMVAGEKRKFVMKPPQVVRVGTKKTSFVNFTDICKLLHRQPKHLLAFLLAELGTSGSIDGNNQLVIKGRFQQKQIENVLRRYIKEYVTCHTCRSPDTILQKDTRLYFLQCETCHSRCSVASIKTGFQAVTGKRAQLRAKAN

SEQ ID NO: 141955 - DNA, 1002 bp, Artificial Sequence
  derived and/or modified sequence
atgagcggcgacgagatgatcttcgaccccaccatgagcaagaagaagaagaagaagaagaagcccttcatgctggacgaggagggcgacacccagaccgaggagacccagcccagcgagaccaaggaggtggagcccgagcccaccgaggacaaggacctggaggccgacgaggaggacaccagaaagaaggacgccagcgacgacctggacgacctgaacttcttcaaccagaagaagaagaagaagaagaccaagaagatcttcgacatcgacgaggccgaggagggcgtgaaggacctgaagatcgagagcgacgtgcaggagcccaccgagcccgaggacgacctggacatcatgctgggcaacaagaagaagaagaagaagaacgtgaagttccccgacgaggacgagatcctggagaaggacgaggccctggaggacgaggacaacaagaaggacgacggcatcagcttcagcaaccagaccggccccgcctgggccggcagcgagagagactacacctacgaggagctgctgaacagagtgttcaacatcatgagagagaagaaccccgacatggtggccggcgagaagagaaagttcgtgatgaagcccccccaggtggtgagagtgggcaccaagaagaccagcttcgtgaacttcaccgacatctgcaagctgctgcacagacagcccaagcacctgctggccttcctgctggccgagctgggcaccagcggcagcatcgacggcaacaaccagctggtgatcaagggcagattccagcagaagcagatcgagaacgtgctgagaagatacatcaaggagtacgtgacctgccacacctgcagaagccccgacaccatcctgcagaaggacaccagactgtacttcctgcagtgcgagacctgccacagcagatgcagcgtggccagcatcaagaccggcttccaggccgtgaccggcaagagagcccagctgagagccaaggccaactag

SEQ ID NO: 141956 - DNA, 1002 bp, Artificial Sequence
  derived and/or modified sequence
atgagcggggatgagatgatctttgaccctactatgagtaagaagaaaaagaagaaaaagaagcccttcatgcttgatgaagaaggcgacactcaaaccgaggaaacccagccatccgagactaaggaagtcgagcccgaacctacagaggataaggacttggaagcagatgaggaagacactcggaagaaggatgcgtcagacgaccttgacgatcttaacttctttaatcagaaaaagaagaaaaaaaaaaccaaaaagatcttcgacatcgacgaggctgaggagggggtcaaggatctaaaaatcgaatccgacgtgcaggagccaactgaacccgaagatgacttggacatcatgctaggcaataaaaagaagaaaaagaaaaacgttaaattccctgacgaggacgagatcctggagaaggatgaggccctggaggacgaggacaacaaaaaggacgacgggatatccttctcaaaccagacaggaccagcctgggctggcagtgaacgcgactacacgtacgaggagctgctgaaccgcgttttcaacatcatgagagaaaaaaatcctgatatggtcgctggggaaaagcggaaatttgtaatgaagccgccacaagtggtgcgcgtaggaactaagaagacctctttcgtgaattttacggatatatgcaaactgctgcatcgccaacctaagcaccttctggctttcctcttagcggaactgggcactagcggatcaatcgatgggaataaccagctcgtgataaagggcagatttcagcagaagcaaattgagaacgtcctgcgaagatatattaaggagtacgtcacatgccacacatgtagatccccggacactatcctccaaaaggatactcgactgtactttctccagtgtgagacctgtcattctagatgttcggttgcgtcaatcaagacagggtttcaagccgtgactggaaagagggcccagctcagagccaaggctaattag

SEQ ID NO: 141957 - DNA, 2656 bp, Artificial Sequence
  derived and/or modified sequence
gaagcgcgctaggttggctcttctgcgcgcctgcgccttggcgagctctgcgcaggcgcatttccaacgcttggaggagagggcggggtgtcgtttcctttcgctgatgcaagagcctagtgcggtggtgggagaggtatcggcaggggcagcgctgccgccggggcctggggctgacccgtctgacttcccgtccgtgccgagcccactcgagccgcagccatgtctggggacgagatgatttttgatcctactatgagcaagaagaaaaagaagaagaagaagccttttatgttagatgaggaaggggatacccaaacagaggaaacccagccttcagaaacaaaagaagtggagccagagccaactgaggacaaggatttggaagctgatgaagaggacactaggaaaaaagatgcttctgatgatctagatgacttgaacttctttaatcaaaagaaaaagaagaaaaaaactaaaaagatatttgatattgatgaagctgaagaaggtgtaaaggatcttaagattgaaagtgatgttcaagaaccaactgaaccagaggatgaccttgacattatgcttggcaataaaaagaagaaaaagaagaatgttaagttcccagatgaggatgaaatactagagaaagatgaagctctagaagatgaagacaacaaaaaagatgatggtatctcattcagtaatcagacaggccctgcttgggcaggctcagaaagagactacacatacgaggagctgctgaatcgagtgttcaacatcatgagggaaaagaatccagatatggttgctggggagaaaaggaaatttgtcatgaaacctccacaagtcgtccgagtaggaaccaagaaaacttcttttgtcaactttacagatatctgtaaactattacatcgtcagcccaaacatctccttgcatttttgttggctgaattgggtacaagtggttctatagatggtaataaccaacttgtaatcaaaggaagattccaacagaaacagatagaaaatgtcttgagaagatatatcaaggaatatgtcacttgtcacacatgccgatcaccggacacaatcctgcagaaggacacacgactctatttcctacagtgcgaaacttgtcattctagatgttctgttgccagtatcaaaaccggcttccaggctgtcacgggcaagcgagcacagctccgtgccaaagctaactaatttgctaatcactgattttgcaaagcttgttgtggagatgtggctggacaggtttgccatcagagtggatataccgttgtattaaaaacaagataaaaaagctgccaagatttttggcgagtggttggtctgaagtccttgcaagacgctgatgctcaagctgttgacatactcattgcctactttaacacctgtcagagaaacgtgatatggggtaaggaggtgcttttttaaaatcgttcatagacttctgtaaaatgcaagataaattaaagttattataacagtgattctttcaatttggtttgtccttcagttttcttttctataaatgtgcttggtgaaatcagcaagaaaccaaccatataaaacagtgtgtgccgggctctgactgagaaactgaacaatggcaggcgcttcatctgggcagccatttttcttctctgcttctcttgagatacatagttaaagtagacacggcctcccacgcgagtgtggtgggaccttgagacttaggaggattgcctgttttcagtgtccagggaatgactccatagatttgaattcttttccgtatgtggggatggttgctactacctcaccgccaagtcctcccccagctgttaccacatgagggaatacaaggtgctaggtaccctccttcctcgttggccactaagaggtcttagaaacatagcctgtaaatgtgtcttgtaactggcacactaaaaaagatcctagttgagcatctctcttggtgaggaagcgatgtgtgtgcggttcaggaaactcctccaagaggaggaggagtccaaacagggatgccagaggaagctttccgttttcctagccaacttgtgttctgggtttgaaaaagacccaccacaaatgctttttctattttctgatttaaaagtcgcttttgaatatgaccatgagaaaccaagaaatgctgcttgtgtggtgctctgcttcctgaggatttggctggaaggggattctccgctggcacatgggagaaggccatcttctgtgtcggtgctgtgatctgccttgttctcacttgctgaggataagggcatacacgctgctcctcgctttcttgttgcccgacttcgtactaagcagctcaggagcagtcactcagacccaaatgtcttgactgtgttgtttttaatcactgtgacccttaaagtacaggccaagtgttgtcaaacaccttggctaaaacagtggagggtgatgggtaaagcagtagagggccctcaacccacacactggctgaaactgccaccaactgccacgatgaacccaactgctgtttatgcccccattttcctttttttgtatctacacccacacgattcccaatgttggatatttctacatgaataaagcaaggatcagtgcctcttatgtaattaacgctcca

SEQ ID NO: 141958 - DNA, 1002 bp, Artificial Sequence
  derived and/or modified sequence
atgtctggagatgagatgatctttgaccccaccatgagcaagaagaagaagaagaagaagaagcccttcatgctggatgaggagggggacacccagacagaggagacccagcccagcgagaccaaggaggtggagcctgagcccacagaggacaaggacctggaggctgatgaggaggacaccaggaagaaggatgccagtgatgacctggatgacctgaacttcttcaaccagaagaagaagaagaagaagaccaagaagatctttgatattgatgaggccgaggagggcgtgaaggacctgaagattgaaagtgatgtgcaggagcccacagagccagaagatgacctggacatcatgctgggcaacaagaagaagaagaagaagaatgtgaagttcccagatgaagatgagatcctggagaaggatgaggccctggaggatgaggacaacaagaaggatgatggcatctccttcagcaaccagacaggccctgcctgggccggcagcgagcgggactacacctatgaggagctgctgaacagagtcttcaacatcatgagggagaagaacccagacatggtggccggggagaagaggaagtttgtgatgaagccaccccaggtggtgcgggtgggcaccaagaagaccagctttgtgaacttcacagacatctgcaagctgctgcaccggcagcccaagcacctgctggccttcctgctggccgagctgggcaccagcggcagcattgatggcaacaaccagctggtgatcaagggccgcttccagcagaagcagattgaaaatgtgctgcggcgctacatcaaggagtatgtgacctgccacacctgccgcagcccagacaccatcctgcagaaggacacccggctgtacttcctgcagtgtgagacctgccacagccgctgcagcgtggccagcatcaagacaggcttccaggccgtgacaggcaagagggcccagctgcgggccaaggccaactag

SEQ ID NO: 141959 - DNA, 1002 bp, Artificial Sequence
  derived and/or modified sequence
atgagcggcgacgagatgatcttcgaccccaccatgagcaagaagaaaaagaagaaaaagaagccatttatgctcgatgaggagggagacacccagaccgaagaaacccagccctcagaaacaaaagaggtggagcccgagcccaccgaggataaggatcttgaggccgacgaggaagacacacgaaaaaaagacgcctccgacgatctggatgaccttaatttctttaaccaaaagaagaagaaaaagaaaaccaagaagatctttgacatcgacgaggccgaggagggggtaaaagacctgaaaatcgagagtgacgtgcaggaaccgactgaaccagaggatgacctagatatcatgctgggcaataagaagaagaaaaaaaaaaatgtcaaatttccagatgaagacgaaatacttgagaaggatgaggctcttgaggatgaagacaacaagaaggacgacgggatctctttttccaaccaaaccgggcccgcctgggcagggtccgagagggattacacatacgaggaactcctcaacagagtcttcaacatcatgcgtgagaaaaatcctgacatggtggccggagaaaagcgcaagttcgtcatgaaaccccctcaggtggtgagggtgggaactaaaaaaacatcctttgtgaactttactgacatctgtaaactactacatcgccagcccaagcatctgctggccttcttgttggctgagttaggaacaagcggaagcattgatggaaacaatcagctcgtgattaaggggcgatttcagcagaagcaaatcgagaacgtgttgcgcaggtacatcaaggagtacgtcacttgccacacctgtaggtctccagacaccatactccagaaagacactagactttacttcctccagtgcgagacatgccactcaagatgctctgttgcttctatcaagacagggtttcaggctgtgacaggtaagcgagcccagttgagggctaaagcaaattag

SEQ ID NO: 141960 - DNA, 1002 bp, Artificial Sequence
  derived and/or modified sequence
atgagcggtgacgaaatgatatttgaccctacgatgagtaagaagaaaaagaagaagaagaaacccttcatgctggatgaggagggagatacgcagacagaagaaacccagccttcagaaaccaaggaggtggaacccgaacccaccgaagacaaggacctcgaagctgatgaagaagacacgcgcaagaaggacgccagtgacgacctcgatgacttgaattttttcaaccaaaaaaagaagaaaaaaaagacaaagaaaatctttgacatcgatgaggccgaagaaggcgtgaaggacctgaaaatagaaagcgacgttcaggagcccaccgagcccgaggacgatctggacatcatgttaggtaacaagaagaaaaagaaaaagaatgtcaagttccctgatgaggatgaaatcctggaaaaagacgaggctctggaggatgaggataacaagaaggatgatggaatcagtttttctaaccagactgggcctgcctgggctggcagtgagagagattatacctacgaggagctcctcaacagggtgtttaatattatgagggaaaagaatccagacatggtggccggagagaagaggaagtttgtgatgaaaccaccccaggtggtgagagtcgggaccaagaaaacttccttcgtcaatttcactgacatctgcaagttgcttcatcgtcagccaaagcatttgctggcctttctgctggccgagctggggacttccggctccatcgacgggaataatcagctggtgatcaaagggcgatttcagcagaaacagatcgagaacgttctccggagatatattaaagagtatgtgacgtgccacacctgcagaagtcccgataccatcctccaaaaggacacacgtttgtacttccttcagtgcgagacgtgccattctaggtgctcggtggccagcattaaaaccgggttccaggccgtaacagggaaacgagctcaactccgcgcaaaagctaattag

SEQ ID NO: 141961 - protein, 537 aa, Artificial Sequence
  derived and/or modified sequence
MAAQCVTKVALNVSCANLLDKDIGSKSDPLCVLFLNTSGQQWYEVERTERIKNCLNPQFSKTFIIDYYFEVVQKLKFGVYDIDNKTIELSDDDFLGECECTLGQIVSSKKLTRPLVMKTGRPAGKGSITISAEEIKDNRVVLFEMEARKLDNKDLFGKSDPYLEFHKQTSDGNWLMVHRTEVVKNNLNPVWRPFKISLNSLCYGDMDKTIKVECYDYDNDGSHDLIGTFQTTMTKLKEASRSSPVEFECINEKKRQKKKSYKNSGVISVKQCEITVECTFLDYIMGGCQLNFTVGVDFTGSNGDPRSPDSLHYISPNGVNEYLTALWSVGLVIQDYDADKMFPAFGFGAQIPPQWQVSHEFPMNFNPSNPYCNGIQGIVEAYRSCLPQIKLYGPTNFSPIINHVARFAAAATQQQTASQYFVLLIITDGVITDLDETRQAIVNASRLPMSIIIVGVGGADFSAMEFLDGDGGSLRSPLGEVAIRDIVQFVPFRQFQNAPKEALAQCVLAEIPQQVVGYFNTYKLLPPKNPATKQQKQ

SEQ ID NO: 141962 - protein, 139 aa, Artificial Sequence
  derived and/or modified sequence
MAAQCVTKVALNVSCANLLDKDIGSKSDPLCVLFLNTSGQQWYEVERTERIKNCLNPQFSKTFIIDYYFEVVQKLKFGVYDIDNKTIELSDDDFLGECECTLGQIVSSKKLTRPLVMKTGRPAGKGSITISAEEIKDNR

SEQ ID NO: 141963 - protein, 79 aa, Artificial Sequence
  derived and/or modified sequence
MAAQCVTKVALNVSCANLLDKDIGSKSDPLCVLFLNTSGQQWYEVERTERIKNCLNPQFSKTFIIDYYFEVVQKLKFGV

SEQ ID NO: 141964 - protein, 135 aa, Artificial Sequence
  derived and/or modified sequence
MAAQCVTKVALNVSCANLLDKDIGSKSDPLCVLFLNTSGQQWYEVERTERIKNCLNPQFSKTFIIDYYFEVVQKLKFGVYDIDNKTIELSDDDFLGECECTLGQIVSSKKLTRPLVMKTGRPAGKGSITISAEEI

SEQ ID NO: 141965 - protein, 234 aa, Artificial Sequence
  derived and/or modified sequence
MAAQCVTKVALNVSCANLLDKDIGSKSDPLCVLFLNTSGQQWYEVERTERIKNCLNPQFSKTFIIDYYFEVVQKLKFGVYDIDNKTIELSDDDFLGECECTLGQIVSSKKLTRPLVMKTGRPAGKGSITISAEEIKDNRVVLFEMEARKLDNKDLFGKSDPYLEFHKQTSDGNWLMVHRTEVVKNNLNPVWRPFKISLNSLCYGDMDKTIKVECYDYDNDGSHDLIGTFQTTMT

SEQ ID NO: 141966 - protein, 153 aa, Artificial Sequence
  derived and/or modified sequence
MAAQCVTKVALNVSCANLLDKDIGSKSDPLCVLFLNTSGQQWYEVERTERIKNCLNPQFSKTFIIDYYFEVVQKLKFGVYDIDNKTIELSDDDFLGECECTLGQIVSSKKLTRPLVMKTGRPAGKGSITISAEEIKDNRVVLFEMEARKLDNK

SEQ ID NO: 141967 - DNA, 1614 bp, Artificial Sequence
  derived and/or modified sequence
atggctgctcagtgcgtgacaaaagttgctctcaacgtgtcgtgcgccaacctgctcgataaggatatcgggtccaagtcagaccctctttgtgtgctgttcttgaatacctccggccagcagtggtacgaggtcgagaggacagagcgaattaagaactgcctgaacccgcagttctcaaaaacattcatcattgattactacttcgaggtggtccagaaattaaaattcggggtttatgatattgacaataagacgatcgagctatcagacgatgacttccttggcgagtgtgagtgcaccttggggcagattgtgagctccaaaaaactgactagaccactggtcatgaaaacaggaagacctgcaggtaagggcagtatcaccatatcagccgaggagatcaaagataacagagtcgtgctgtttgagatggaggcccgcaaactggataataaagacctctttggcaaaagcgatccctacctggaatttcacaagcagacaagcgacggtaattggctgatggtacataggaccgaagtggtgaagaacaatttaaacccagtgtggcgaccctttaaaatttccttgaactctctgtgctacggggacatggacaagactatcaaagtcgagtgttatgattacgataatgatggcagccatgatcttatcggaacctttcagactaccatgacaaagttaaaggaggcctcacggagcagcccggtagaattcgagtgcatcaacgagaaaaagcgtcaaaaaaaaaaaagttacaagaacagcggcgtcatttccgttaaacagtgtgagataacagtagagtgcacatttttagattacattatgggcgggtgccaactgaactttacagtaggagtcgattttactggaagtaatggagatcctaggtccccagattctctgcactacatatccccgaatggtgtgaatgagtatctgaccgcactgtggagtgtaggtctggtgattcaagactacgatgcagacaagatgtttccagcctttggattcggggcccagatcccaccgcagtggcaggtctctcatgagttccctatgaacttcaacccgagcaatccctactgtaatggcatccagggtatagtggaagcttatagatcctgcctgccccagatcaagctttacgggcccaccaattttagtcctatcatcaaccacgtcgccaggtttgccgccgcagccactcagcagcagaccgctagtcagtactttgttctgttgattataactgacggagtgataacagaccttgacgagacccgtcaggcaatcgtgaacgcctctcgtctgcccatgtctatcatcattgtgggggtggggggggctgacttttcggcaatggaatttctggatggggatggcggctccctgagatcccccctgggagaggtagcgattcgagatatagttcagttcgtgcccttcagacagttccagaatgcgcctaaagaggcccttgcccagtgcgtgttggctgagatcccccagcaggtcgtgggctacttcaatacgtataagcttttacccccgaaaaacccagcaactaagcagcagaagcaatag

SEQ ID NO: 141968 - DNA, 420 bp, Artificial Sequence
  derived and/or modified sequence
atggcagcccaatgcgtcaccaaggttgcactaaatgtatcctgcgcaaatcttttggacaaggacatcgggtccaagtcagacccactatgtgtactcttcctgaacacaagcggccaacagtggtatgaggttgagaggactgaacgcattaaaaactgtctgaaccctcagtttagtaaaacgttcattattgactactactttgaagtggtgcaaaagcttaaattcggcgtttacgacattgataacaaaactatcgaactctccgacgatgatttcttaggggagtgcgagtgcactcttgggcagattgtgtcctctaaaaaactcacacgtccccttgtcatgaagaccggccgacccgccggaaaggggtccatcacaattagcgccgaggagattaaggataacaggtag

SEQ ID NO: 141969 - DNA, 1614 bp, Artificial Sequence
  derived and/or modified sequence
atggccgctcagtgcgtcactaaggtcgctctgaacgtttcctgcgcgaacctgttagataaagacattggtagcaagtccgatcccctgtgtgtgttgttcctgaacacatcggggcagcaatggtatgaagtcgagcgcaccgaacgtattaagaattgcctgaatccgcagttttcaaaaaccttcatcattgactattattttgaagtcgtccagaaactgaagtttggggtctacgacattgataacaagacaatagagctctccgacgacgacttcctcggcgaatgtgagtgtaccctgggtcagatcgtgtctagtaagaaactgacaagaccgctggtgatgaagacaggcaggcccgcaggaaaaggttccattacaatctcagcggaagagattaaggacaatcgtgttgttctgttcgaaatggaggcacgaaaactggacaacaaagacctatttgggaagagcgatccctatttggaattccacaagcagacttccgacggcaattggcttatggtacaccggaccgaggttgttaaaaacaatttaaatcccgtgtggcggccatttaagatcagtctcaactcactctgctacggcgacatggacaagaccataaaggtcgagtgctatgattatgataacgatggttcacatgatctaatcggcacatttcagacgaccatgactaagttaaaggaggcttcccgcagcagccccgtcgaattcgaatgtatcaatgagaaaaagcgacagaagaaaaagagttacaagaatagcggcgttatttcagtcaaacagtgcgaaatcacagtggaatgtaccttcctggattatatcatggggggttgtcagctaaacttcaccgttggtgtggatttcaccgggagtaatggggacccacgcagtccagactcgctgcactacatttcaccaaatggtgtcaacgagtaccttacagccctgtggtcagtgggtctcgttattcaggattatgatgctgacaagatgttccccgcctttggattcggagcccagatcccccctcagtggcaagtctcgcatgagttcccaatgaattttaacccctctaacccatattgcaacggcatccaggggatcgtcgaggcttatcgttcctgcctgcctcagataaaactgtacgggccaacgaatttcagtcctattatcaaccacgttgcaaggttcgccgccgccgccactcagcagcaaactgctagtcaatactttgtcctactcattataactgatggggtcattacagacttagatgaaactcgccaggcgattgtgaatgcttctcgacttccaatgtccattataattgtgggtgtcggaggtgcagacttttctgccatggagtttttggacggagatggtggtagcctgagatctcccctaggtgaggttgctatcagagacatcgttcagtttgtgcccttccggcagttccagaacgcacccaaagaggctctcgcccagtgtgtgcttgcagaaatccctcagcaggttgtagggtattttaacacctacaaactgctcccccctaagaatccagccacaaagcaacagaagcagtag

SEQ ID NO: 141970 - DNA, 240 bp, Artificial Sequence
  derived and/or modified sequence
atggcagctcagtgtgtgaccaaagtggctctcaatgtctcttgtgctaatttactcgacaaggatataggctctaaatccgatcccctatgtgtgctctttctcaacacctccggccaacagtggtacgaagtggaaagaacggagaggatcaaaaattgcctgaacccacagttttctaagacctttataattgactactactttgaggtggtacagaagctcaaattcggggtctag

SEQ ID NO: 141971 - DNA, 408 bp, Artificial Sequence
  derived and/or modified sequence
atggccgcccaatgtgttactaaggtggcattgaacgtttcatgtgctaacctcctagacaaggacattgggtctaaatccgaccccttgtgcgtcctcttcctgaatacatccggacagcagtggtacgaggtggagcgaactgagaggatcaagaactgcctgaatccccagttctccaaaacattcatcatcgattactatttcgaagttgtacagaagttgaagttcggtgtatatgacatagataacaagaccattgagctatctgatgacgacttcctgggtgagtgtgagtgtactttgggccaaatcgtgtcttccaagaaactgacaagacccctcgtgatgaaaacaggacgcccagctggtaaaggttccatcaccatcagcgccgaagagatatag

SEQ ID NO: 141972 - DNA, 705 bp, Artificial Sequence
  derived and/or modified sequence
atggcggcccagtgcgtaaccaaagtagcgctaaatgtgtcttgcgctaacctgttagataaagacatcggtagtaaatcagatcccctgtgcgtgttgttcttgaatacctccgggcagcagtggtatgaggtggaacgaacagaacggatcaagaattgcctgaacccccagtttagcaaaactttcattattgactattacttcgaagtagtccaaaagctgaagtttggcgtttacgatattgacaacaagaccatagagctgtccgacgatgacttcctgggggaatgtgagtgtaccctggggcaaatcgtttcatctaaaaagctgaccagaccgctcgtgatgaagactggccgccctgccggcaagggcagcatcacaatctcagccgaggagattaaagataaccgcgtcgtactgttcgagatggaggctcggaagctggataacaaggatttattcggaaaatccgacccgtacctggagttccacaagcagacatcagacggcaattggctgatggtgcataggaccgaagtggtcaagaacaacctcaatcccgtctggcgtcctttcaagatcagcctaaactccctgtgctatggggacatggataaaactataaaggtggaatgctacgattatgataacgacggatcccacgatctgatcggcacctttcagacgacaatgacctag

SEQ ID NO: 141973 - DNA, 462 bp, Artificial Sequence
  derived and/or modified sequence
atggccgctcagtgcgtgaccaaggtcgcacttaatgtctcttgtgccaatctactggacaaggacataggatcaaagagcgatcctctttgtgttctgttcctgaatacctctggccagcaatggtacgaagtcgaacggacggagaggatcaagaattgtttgaacccgcaattttctaaaactttcatcatagattactattttgaagtggtgcaaaagttaaagtttggcgtctacgacattgataataagaccatcgagctatccgacgatgattttttgggtgagtgtgagtgcactctgggccagattgtgagttccaaaaaactcacccggcccctggtcatgaaaaccgggcgcccggccgggaaggggtctatcactatcagtgcagaggaaataaaagataacagggtagtcttatttgagatggaagcaagaaagctggataacaagtag

SEQ ID NO: 141974 - DNA, 1614 bp, Artificial Sequence
  derived and/or modified sequence
atggccgcccagtgtgtgaccaaggtggccctgaatgtgtcctgtgccaacctgctggacaaggacatcggcagcaagagtgaccccctgtgtgtgctcttcctgaacaccagcggccagcagtggtatgaggtggagaggacagagcgcatcaagaactgcctgaacccccagttcagcaagaccttcatcatcgactactactttgaggtggtgcagaagctgaagtttggagtgtatgacatcgacaacaagaccatcgagctgagtgatgatgacttcctgggagaatgtgaatgtaccctgggccagatcgtgagcagcaagaagctgacccggcccctggtgatgaagacaggccggcctgctgggaagggcagcatcaccatctctgctgaggagatcaaggacaacagagtggtgctgtttgagatggaggccaggaagctggacaacaaggacctgtttgggaagagtgacccctacctggagttccacaagcagaccagtgatggcaactggctgatggtgcacaggacagaggtggtgaagaacaacctgaaccctgtgtggaggcccttcaagatcagcctgaacagcctgtgctatggagacatggacaagaccatcaaggtggagtgctatgactatgacaatgatggcagccatgacctgattggcaccttccagaccaccatgaccaagctgaaggaggccagccgcagcagccctgtggagtttgagtgcatcaatgagaagaagaggcagaagaagaagagctacaagaacagcggggtcatctctgtgaagcagtgtgagatcaccgtggagtgcaccttcctggactacatcatgggcggctgccagctgaacttcaccgtgggcgtggacttcaccggcagcaatggagaccccaggagcccagacagcctgcactacatcagccccaatggagtgaatgagtacctgacagccctgtggagcgtgggcctggtgatccaggactatgatgctgacaagatgtttcctgcctttggatttggagcccagatccccccccagtggcaggtgtcccatgagttccccatgaacttcaaccccagcaacccctactgcaatggcatccagggcatcgtggaggcctaccgcagctgcctgccccagatcaagctgtatggccccaccaacttcagccccatcatcaaccacgtggccaggtttgctgctgctgccacccagcagcagacagccagccagtactttgtgctgctgatcatcacagatggagtcatcacagacctggatgagacccggcaggccatcgtgaatgccagccggctgcccatgagcatcatcatcgtgggcgtgggcggcgctgacttcagcgccatggagttcctggatggagatggcggcagcctgcggagccccctgggggaggtggccatccgggacatcgtgcagtttgtgcccttccggcagttccagaatgcccccaaggaggccctggcccagtgtgtgctggccgagatcccccagcaggtggtgggctacttcaacacctacaagctgctgccccccaagaacccagccaccaagcagcagaagcagtag

SEQ ID NO: 141975 - DNA, 420 bp, Artificial Sequence
  derived and/or modified sequence
atggccgcccagtgtgtgaccaaggtggccctgaatgtgtcctgtgccaacctgctggacaaggacatcggcagcaagagtgaccccctgtgtgtgctcttcctgaacaccagcggccagcagtggtatgaggtggagaggacagagcgcatcaagaactgcctgaacccccagttcagcaagaccttcatcatcgactactactttgaggtggtgcagaagctgaagtttggagtgtatgacatcgacaacaagaccatcgagctgagtgatgatgacttcctgggagaatgtgaatgtaccctgggccagatcgtgagcagcaagaagctgacccggcccctggtgatgaagacaggccggcctgctgggaagggcagcatcaccatctctgctgaggagatcaaggacaacagatag

SEQ ID NO: 141976 - DNA, 240 bp, Artificial Sequence
  derived and/or modified sequence
atggccgcccagtgtgtgaccaaggtggccctgaatgtgtcctgtgccaacctgctggacaaggacatcggcagcaagagtgaccccctgtgtgtgctcttcctgaacaccagcggccagcagtggtatgaggtggagaggacagagcgcatcaagaactgcctgaacccccagttcagcaagaccttcatcatcgactactactttgaggtggtgcagaagctgaagtttggagtgtag

SEQ ID NO: 141977 - DNA, 408 bp, Artificial Sequence
  derived and/or modified sequence
atggccgcccagtgtgtgaccaaggtggccctgaatgtgtcctgtgccaacctgctggacaaggacatcggcagcaagagtgaccccctgtgtgtgctcttcctgaacaccagcggccagcagtggtatgaggtggagaggacagagcgcatcaagaactgcctgaacccccagttcagcaagaccttcatcatcgactactactttgaggtggtgcagaagctgaagtttggagtgtatgacatcgacaacaagaccatcgagctgagtgatgatgacttcctgggagaatgtgaatgtaccctgggccagatcgtgagcagcaagaagctgacccggcccctggtgatgaagacaggccggcctgctgggaagggcagcatcaccatctctgctgaggagatctag

SEQ ID NO: 141978 - DNA, 705 bp, Artificial Sequence
  derived and/or modified sequence
atggccgcccagtgtgtgaccaaggtggccctgaatgtgtcctgtgccaacctgctggacaaggacatcggcagcaagagtgaccccctgtgtgtgctcttcctgaacaccagcggccagcagtggtatgaggtggagaggacagagcgcatcaagaactgcctgaacccccagttcagcaagaccttcatcatcgactactactttgaggtggtgcagaagctgaagtttggagtgtatgacatcgacaacaagaccatcgagctgagtgatgatgacttcctgggagaatgtgaatgtaccctgggccagatcgtgagcagcaagaagctgacccggcccctggtgatgaagacaggccggcctgctgggaagggcagcatcaccatctctgctgaggagatcaaggacaacagagtggtgctgtttgagatggaggccaggaagctggacaacaaggacctgtttgggaagagtgacccctacctggagttccacaagcagaccagtgatggcaactggctgatggtgcacaggacagaggtggtgaagaacaacctgaaccctgtgtggaggcccttcaagatcagcctgaacagcctgtgctatggagacatggacaagaccatcaaggtggagtgctatgactatgacaatgatggcagccatgacctgattggcaccttccagaccaccatgacctag

SEQ ID NO: 141979 - DNA, 462 bp, Artificial Sequence
  derived and/or modified sequence
atggccgcccagtgtgtgaccaaggtggccctgaatgtgtcctgtgccaacctgctggacaaggacatcggcagcaagagtgaccccctgtgtgtgctcttcctgaacaccagcggccagcagtggtatgaggtggagaggacagagcgcatcaagaactgcctgaacccccagttcagcaagaccttcatcatcgactactactttgaggtggtgcagaagctgaagtttggagtgtatgacatcgacaacaagaccatcgagctgagtgatgatgacttcctgggagaatgtgaatgtaccctgggccagatcgtgagcagcaagaagctgacccggcccctggtgatgaagacaggccggcctgctgggaagggcagcatcaccatctctgctgaggagatcaaggacaacagagtggtgctgtttgagatggaggccaggaagctggacaacaagtag

SEQ ID NO: 141980 - DNA, 1614 bp, Artificial Sequence
  derived and/or modified sequence
atggccgcccagtgcgtgaccaaggtggccctgaacgtgagctgcgccaacctgcttgacaaggatatcggctctaagtcagatccactctgtgtgctgttcctgaacaccagcggacaacaatggtacgaggtggagagaactgagaggattaaaaattgcctgaaccctcagttcagtaagacattcatcatagactattattttgaggtggtgcaaaagctgaagtttggcgtctacgacattgataataaaaccatagaactgtccgacgatgatttccttggggaatgtgagtgcactctgggccaaatcgtgtcatcaaagaaactgacaagaccactggtgatgaaaacagggcgtccagccggaaaaggctctattactatatctgcggaggagattaaggacaaccgtgtggtacttttcgaaatggaggcacgtaaattagacaacaaagacctttttgggaaatccgatccttacttggagtttcacaaacagacaagcgatggcaactggttaatggtacaccgcactgaagtggtgaagaacaacctgaatcctgtgtggcgcccctttaagatttcattaaattctctctgctatggtgacatggataagaccatcaaggtggagtgctatgattacgacaacgacggctcccacgatctcataggcactttccagaccaccatgaccaagctgaaagaggcgagccggtccagtcctgtggagttcgagtgcatcaatgagaagaagcgccaaaagaaaaagtcgtacaagaacagcggggtaattagtgtgaagcagtgtgagatcacagtggagtgtacctttttggattacatcatgggagggtgccagcttaactttacggtgggagtggacttcactggaagcaacggggacccgcgtagtcctgattctctgcattacatctcccctaatggagttaacgagtatctgacagcactgtggtccgttggcctggtaatacaagattacgatgctgataaaatgtttccggcttttgggttcggagcacaaattcccccacagtggcaggtaagccatgagttccccatgaattttaatccctccaacccttattgtaatggaattcagggaatagtggaggcttaccggagttgcctgcctcagattaaactctatggccctaccaatttcagtcccattatcaaccacgtcgcacgcttcgccgcggccgccacacagcagcagacagcatctcagtacttcgttctccttattatcaccgacggagtcatcacagatttagacgagacgagacaggccattgtcaatgccagccgtttaccgatgtctattatcatagtcggggtgggaggtgccgacttcagcgctatggagttcctagacggcgatggaggatctctgcgatcccccttgggagaagttgcgattcgggatattgtgcagttcgtcccctttcgtcagtttcaaaatgcaccaaaggaagcactcgcacagtgcgtactcgctgaaattccacagcaagtcgtgggttattttaatacgtataagttgctgcctcccaagaaccctgcaaccaagcaacagaaacaatag

SEQ ID NO: 141981 - DNA, 420 bp, Artificial Sequence
  derived and/or modified sequence
atggccgcccagtgcgtgaccaaggtggccctgaacgtgagctgcgctaatctgctggacaaggacatcgggtctaagagtgaccctctatgcgtgttgtttctgaacacctccgggcaacaatggtatgaggtggaaaggactgagaggattaaaaattgtctcaatccccagtttagcaagacattcatcatagactactactttgaggtggttcaaaagcttaaattcggagtgtatgacattgataataaaaccatcgagctgagcgatgacgatttcctcggagagtgcgaatgtactctggggcagatagtttcgtccaaaaagttaacaaggcctctcgttatgaaaacaggtcggcctgctggaaagggctccatcactatatccgccgaagagattaaggataaccgctag

SEQ ID NO: 141982 - DNA, 1614 bp, Artificial Sequence
  derived and/or modified sequence
atggccgcccagtgcgtgaccaaggtggccctgaacgtgagctgcgcaaatctgctcgataaggatatcggcagcaaatccgaccccctgtgcgtcctatttctcaacacaagcggccaacaatggtacgaggtggagcgcaccgagagaataaaaaattgtctgaacccccagttttcaaagaccttcatcatcgactactatttcgaggtggttcaaaagctgaaatttggagtatatgacattgacaataagaccattgaactgagcgacgatgattttctgggtgagtgtgaatgtacactcgggcagattgtttcttcaaagaagctgaccagaccattagtcatgaaaaccggcagacctgccggcaagggctccattaccattagcgcggaagaaatcaaggacaatagagtcgtcctgttcgagatggaagcaagaaagcttgacaataaggacctgttcggcaaatcggatccttacctggagttccacaaacagacatcagatggtaattggctgatggtgcaccgcactgaggtggtaaaaaacaacctcaaccccgtgtggaggccattcaaaatttccctcaacagcctgtgctacggcgacatggataagaccattaaagtggagtgctatgactacgataatgacggctctcacgacctgatcggcacctttcagacaaccatgacaaagctcaaggaggcctccagatcctcacccgtggagtttgaatgcattaatgagaaaaaaagacagaagaagaagtcctataagaatagcggggtgataagtgtgaagcagtgcgagattacagtcgaatgtacgttcctagattacattatgggaggctgccagttgaatttcaccgtgggggtggattttacggggtccaatggcgatccaaggtcccccgactcactgcactatatttcccccaatggcgtcaacgaatacctgacggccctctggtccgtagggctggtcattcaggactacgatgcagacaagatgttccccgctttcgggttcggcgctcagatacctccccagtggcaggtctcacacgagttccctatgaactttaacccctccaacccatattgtaatggcatccaaggcatcgtggaggcttatcgcagttgcctgccccagattaagctctacgggcctactaattttagccctattattaaccacgttgcacgttttgcagctgccgctacgcaacagcaaacagcctcacaatacttcgtcttgctgattatcaccgatggagtgatcacagaccttgacgaaacaaggcaggctatcgttaacgcgtctcggctgcctatgagcatcataatagtgggggtgggaggcgccgatttttctgccatggaatttctggacggggacggcggtagccttagatctccactgggggaggtggctatcagagacatcgttcagtttgtgccattccgacagtttcagaacgctcccaaagaagccctggcccagtgcgttctggccgaaattcctcagcaagtcgtaggctactttaatacatacaaactcctgcctccaaaaaacccagcaactaagcagcaaaaacagtag

SEQ ID NO: 141983 - DNA, 240 bp, Artificial Sequence
  derived and/or modified sequence
atggccgcccagtgcgtgaccaaggtggccctgaacgtgagctgcgctaatctgttagacaaagacattggatctaagagtgatcccctgtgcgttctctttcttaacacatctggccagcagtggtacgaagtggagcggacagagcgtatcaagaattgcctcaatcctcagttctcaaaaacattcataattgactattatttcgaggttgtccagaaactgaagtttggcgtctag

SEQ ID NO: 141984 - DNA, 408 bp, Artificial Sequence
  derived and/or modified sequence
atggccgcccagtgcgtgaccaaggtggccctgaacgtgagctgcgccaacctgttagacaaagacatcgggagcaaatcagatcctctctgcgtactgtttctgaacacgtctggccagcagtggtacgaggtggagcgcaccgagcgtataaagaactgcttgaatccccagttctccaaaactttcataattgactactatttcgaagtagtgcagaagctcaagttcggcgtctatgacattgacaataaaactatagagctgagtgacgacgattttctcggtgaatgcgagtgcacgctaggccagatcgtctccagcaaaaagctgacacggcccctagtgatgaagacagggcggcctgctggcaaagggagcattaccatctctgccgaggagatttag

SEQ ID NO: 141985 - DNA, 705 bp, Artificial Sequence
  derived and/or modified sequence
atggccgcccagtgcgtgaccaaggtggccctgaacgtgagctgcgctaacctactagacaaggacatcggaagtaagtcagatcccctctgcgtcctgttcctgaatacttccggtcagcagtggtacgaggttgaaagaacagagaggatcaagaactgcctgaacccccagttctccaagacattcataattgattactacttcgaggtggtgcagaagctcaaattcggggtgtacgatattgataataaaacaatagagctgagcgacgacgacttcttaggagaatgcgaatgtacgttagggcagatagtgtctagcaagaagttaacccgtccgcttgtaatgaaaaccggccgccccgcgggcaagggctcaattacaatcagtgccgaagagataaaagataacagggtcgtgctctttgaaatggaggcaagaaagctggacaacaaggacctcttcggaaaaagtgatccctacctggagttccataaacagacgagtgatggcaattggctgatggtgcaccgaaccgaagtagtgaaaaataacctcaaccctgtctggaggcctttcaaaatttccttgaattccttgtgctacggggacatggacaaaacaatcaaagtcgaatgttacgactatgataacgatggctctcatgatctgattggcacattccagaccacaatgacgtag

SEQ ID NO: 141986 - DNA, 462 bp, Artificial Sequence
  derived and/or modified sequence
atggccgcccagtgcgtgaccaaggtggccctgaacgtgagctgcgctaatttactggataaggatattggatctaaaagcgatcctttgtgcgtactttttcttaacaccagcggccagcaatggtatgaggtcgagcggacagagaggataaaaaattgtctaaatccacagtttagtaagacattcatcatagactactattttgaggtcgtgcagaaattaaagttcggcgtctacgatatcgataataaaactatcgagctgtccgacgacgattttctgggtgaatgcgaatgtacacttggccaaatcgttagctctaagaagctaacacgcccccttgtgatgaagacaggacggccagcaggcaagggatccatcaccatctcagccgaggagataaaagacaaccgagtggtgctcttcgagatggaggcacgtaaactggacaacaaatag

SEQ ID NO: 141987 - DNA, 1614 bp, Artificial Sequence
  derived and/or modified sequence
atggctgcccagtgcgtgaccaaggtggccttaaacgtctcatgcgctaacctactcgacaaagacatcgggagtaagtctgacccattgtgcgtgctgttcctaaacacttccggtcaacagtggtatgaagtagagcggaccgagaggatcaagaattgccttaaccctcaattctctaagacattcataattgactactactttgaagtggtgcagaagctcaagtttggcgtgtatgacatcgataacaagacaattgagctgagcgacgatgatttcctaggcgaatgtgaatgcacactgggtcagattgtgagttcaaagaagctgacaaggccactggtgatgaagacaggtagacctgcgggtaagggttcaatcacaatatccgctgaggagatcaaagacaatagggtagtgctgttcgagatggaggctcgtaagctagataataaagacctgttcggcaagagcgacccatatctcgaattccataagcagaccagtgatggcaactggctgatggttcataggaccgaggttgtaaaaaacaatctcaatccagtgtggaggcctttcaagattagtctcaatagtctgtgttatggagacatggacaagaccatcaaggtagaatgttacgactatgacaacgatggctcacatgatctgattggtacgttccagacaaccatgaccaagctcaaagaagctagcaggtccagccccgttgagttcgagtgtattaatgagaaaaagagacagaaaaaaaagtcttataagaattccggagtcatctccgtgaaacagtgcgagatcaccgtggaatgtacttttctcgactacatcatgggcggttgccagctgaactttactgtcggggtggattttacaggatctaatggtgatccaagatctcctgacagcttacactatatctcaccaaacggggtgaacgaatatctgactgctctctggtccgtgggtctggtgatccaggattacgacgccgacaagatgttcccggcatttggcttcggcgcacaaatccctccacaatggcaggttagccacgagtttcccatgaatttcaacccaagtaatccctactgtaatggcatacaaggtatcgtggaggcctaccgcagctgtctccctcaaataaaactttatggcccaaccaacttttcacccatcattaaccacgttgctagatttgccgctgcagctacccaacagcagaccgctagccagtactttgtgctgctgatcataaccgacggagttatcacagatctcgatgagaccaggcaggctattgtgaacgctagccggttgcctatgtcaataattattgtgggagtgggcggagccgacttctctgcgatggaattcctggatggagacggagggtcccttagatcccccctgggagaggtggccatccgggacattgtgcagtttgtcccctttcggcaatttcagaatgctccaaaggaagccctagcgcaatgtgtactggctgagataccccagcaagtggtcggctactttaacacctacaaactcttaccaccaaaaaaccccgctactaaacagcagaagcagtag

SEQ ID NO: 141988 - DNA, 420 bp, Artificial Sequence
  derived and/or modified sequence
atggcagctcagtgcgttacaaaagtggctcttaacgttagctgtgccaatcttctcgataaggacattgggagcaaaagcgaccccttgtgtgtcctctttttgaacaccagtggccagcagtggtatgaagtggagagaaccgagcgcattaaaaattgtctgaacccacagttctctaaaaccttcatcattgactactatttcgaggtcgtgcagaaactgaagtttggagtctacgacatcgacaacaagaccattgaactgtccgacgacgatttcctgggggagtgcgaatgcaccctgggccagattgtcagttctaagaaactcactaggccgctcgtaatgaagacagggagacctgccggaaaaggcagcatcaccatcagtgctgaggagatcaaggataatcgctag

SEQ ID NO: 141989 - DNA, 1614 bp, Artificial Sequence
  derived and/or modified sequence
atggccgctcagtgcgtcacaaaagtggcattgaacgtgtcatgcgcgaacctgttagataaggacatcggatctaagagtgatccactgtgtgtgttgttccttaacacatccggccagcagtggtatgaggtggaaaggactgagcgcataaagaattgcctcaaccctcagtttagcaagacctttatcattgattactacttcgaggtcgtccagaagctaaagttcggggtgtacgacatcgataataagactatagaactcagcgacgacgacttcctgggtgagtgtgaatgtactctgggccagattgttagcagtaagaaacttacgaggcctctggtgatgaagaccggaaggcctgccggtaagggatcaatcaccatatcagcagaagaaatcaaggataatcgcgtggtgctgtttgagatggaagccagaaaactggataacaaagatctctttggcaaaagcgacccgtacttagaatttcataagcagacttctgatggcaattggctgatggtgcacagaaccgaggtggtaaagaacaatctgaatccagtctggcggccatttaaaattagcctcaactctctgtgttatggcgacatggataagaccattaaggtagagtgttacgattatgacaacgacggctcccatgaccttattggtaccttccagacaaccatgacaaaactcaaagaggcatcaaggtcttcccccgtcgagtttgagtgcatcaacgagaagaaaagacagaagaagaagagttataagaactctggagtgatcagtgtgaaacaatgtgaaattacggtggaatgtaccttcctggattacataatgggcggatgccagctgaattttactgtcggcgttgacttcacagggtcaaatggggatccgagaagcccagactcattacattacatcagccccaacggggtcaacgagtatctgaccgccctgtggagcgtcggcctggttattcaggattatgatgctgataaaatgtttcctgcattcggcttcggcgctcaaatccctcctcagtggcaagtgagccatgagtttcccatgaattttaacccttcaaacccctactgtaacgggatacaggggatcgtcgaggcctaccgcagctgcctgccacagataaagctgtacggtcctaccaactttagccctatcatcaaccacgtcgccaggtttgccgctgcggctacacagcagcaaaccgcctcccagtacttcgtcctgctaatcatcactgacggtgtaataacagatcttgacgagaccagacaggccatcgtgaatgccagtcggttaccaatgagcattatcatcgtgggtgtcggcggagctgatttctctgctatggagtttttggatggggatgggggatctctccgctcgcctctgggtgaggtcgcaattcgcgatatcgtgcaattcgtccctttccgtcagttccagaatgctccaaaggaggcattagctcagtgtgttctcgccgaaattccccagcaggtggtcggctacttcaatacttataagctgttgcctcctaagaacccggcaaccaagcagcagaaacagtag

SEQ ID NO: 141990 - DNA, 240 bp, Artificial Sequence
  derived and/or modified sequence
atggctgcccagtgtgtcaccaaagtcgcactcaatgtctcctgcgcaaatctgttggacaaggacatagggtcaaaatcggaccccctgtgcgtgctgttccttaatactagtgggcagcagtggtacgaagtggagaggacagagagaatcaagaactgtctcaatccccagttttctaagacttttattattgattactatttcgaagtggttcaaaagctcaagttcggagtctag

SEQ ID NO: 141991 - DNA, 408 bp, Artificial Sequence
  derived and/or modified sequence
atggctgctcagtgtgttaccaaagtcgctctcaatgtgtcatgcgctaatttgctggataaggacattggttccaagtcggaccctctatgtgtgctgtttctgaatacatccggccagcagtggtacgaggtggagagaaccgaacgcattaaaaattgcctgaatccacagttttccaagacatttatcatcgactactactttgaggtcgtgcagaagctcaagttcggagtgtatgacattgataataagactatagagctgagcgatgatgacttcctcggcgagtgtgaatgcacgttaggacagatcgtgtcatccaagaaattgactcgaccactggtcatgaagaccggaaggcccgcaggcaaaggctccattacgattagcgctgaagagatttag

SEQ ID NO: 141992 - DNA, 705 bp, Artificial Sequence
  derived and/or modified sequence
atggcagcccagtgtgttacgaaagtggcgctcaacgtcagctgcgccaacctgctggataaggacatcggcagtaagtccgaccctctgtgcgtgttgttccttaatacttccggccagcagtggtacgaggttgagaggaccgaacggattaagaattgtctgaatccacaattttccaaaacgtttatcatcgactactactttgaagtagtccaaaagctcaagttcggggtctacgacatcgataacaagactattgagctctccgacgacgatttcttaggagaatgcgaatgcaccctcgggcagatagtgagtagcaagaagctgacacgacccctggtgatgaaaaccggtaggcctgccggaaaaggctccataaccatctctgccgaggaaatcaaggataaccgagtagtattgttcgaaatggaagcgaggaagctagataataaggacctgttcggtaaaagtgacccttatctggagttccataaacagacctccgacggtaattggttaatggtccacagaacggaagtggtcaagaataacctaaatccagtgtggagaccgttcaaaatttccctgaactcactgtgttatggggatatggacaaaacaataaaagtggagtgttacgactatgataacgacggcagccatgatctcatcggaacatttcagaccactatgacgtag

SEQ ID NO: 141993 - DNA, 462 bp, Artificial Sequence
  derived and/or modified sequence
atggcggctcagtgtgtcaccaaggtggcactgaacgtctcttgcgccaacctcctggacaaggatattgggtctaagagtgaccctctgtgtgttttatttttaaatacaagcgggcagcaatggtatgaggttgaacgtacagagcggattaagaactgcctaaatccacaattttcaaaaaccttcattatcgactattactttgaggtggttcaaaaactgaagttcggcgtttacgatatcgacaataagaccattgagctgagcgatgatgattttttgggcgagtgcgagtgcactttagggcagattgtttcttctaaaaaactaaccaggcctttggtcatgaaaacagggagacccgctggcaaaggttctatcaccataagcgctgaggaaataaaggacaacagagtagttcttttcgagatggaggcaagaaaattagataacaagtag

SEQ ID NO: 141994 - DNA, 4760 bp, Artificial Sequence
  derived and/or modified sequence
tatgacttttaaaattcatgaatttgaataattcatcagttttctcagaactcaagacatggctgcccagtgtgtcacaaaggtggcgctgaatgtttcctgtgccaatcttttggataaagatatagggtcaaagtcagaccctttatgtgtgttgtttttgaatacaagtggtcaacagtggtatgaggttgagcgcacagaaaggattaagaattgcttgaatccccaattttccaagacatttattattgattactactttgaagtggttcagaaattgaaatttggggtttatgacatcgacaacaaaactattgagctgagtgatgatgacttcttaggggaatgtgaatgtacccttggacaaattgtttccagcaagaagctaactcgaccactggtgatgaaaactggcagacctgcaggaaaagggagcattacgatttcagctgaagaaataaaagataatagagtggtcttgtttgaaatggaagccagaaaactggataataaggatctatttggaaagtcagacccatacctggaattccacaagcagacatctgatggaaactggctaatggttcatcggacagaggttgttaaaaacaacttgaatcctgtttggaggcctttcaagatctctcttaactcactgtgttacggagatatggacaaaaccattaaggtggagtgttatgattatgacaatgatgggtcacatgatctcattggaacatttcagaccaccatgacaaaactgaaagaagcctccagaagctcacctgttgaatttgaatgcataaatgagaaaaaaaggcaaaagaaaaaaagctacaagaattcaggtgttatcagtgtgaaacagtgtgagattacagtagaatgcacattccttgactatataatgggaggatgtcagctgaattttactgtgggagtggacttcactggctccaatggtgacccaaggtctccagactcccttcattacatcagccccaatggcgttaatgagtatttgactgctctctggtctgtgggactggtcattcaagattatgatgctgataagatgtttccagcttttggttttggcgctcagatacctcctcagtggcaggtatcacatgaatttccaatgaacttcaacccatccaatccctactgcaatggaatccaaggcattgtagaggcgtatcggtcttgtcttcctcagataaaactctatggaccaactaatttttctccaatcataaatcacgtggccaggtttgctgctgcagccacgcaacagcagacagcttctcaatattttgtgcttttgattattactgatggtgtgatcacagaccttgatgaaaccagacaagctatagttaatgcctccaggctgcctatgtccatcataattgttggagttggaggtgctgacttcagcgccatggagtttctggatggtgatggtggaagtctccgctccccattgggcgaagtggccatcagagatattgtccagtttgtgcctttcagacagttccagaatgctccaaaagaagcacttgctcagtgtgtcttggcagagattccccagcaggtggtgggctacttcaatacatacaaactccttcctcccaagaacccagccacgaaacaacagaagcagtgaccacttcaacagaattcttttgtgttatgtggagcaatgccatctctcaccccaaatcgtgtatctgtcattctacgtactttttacccccagcatttatgatgtaaatctctttctctatggattatatctgtttaaagcattctttctaggttattttggggggacagtgccaagtccatctttgcccagtcaattcagtgattgatagcaatttacattaattgcagtaaagctctttggattagaaattagtgtggggaaagcttattctgttgttgtttttgtttactttcatatgatgaaaatgctgtgtttaagtgtttgtcaataggaagaatggaaaactgttgggatgatgtggtttgcaggttgctgtgcctgattcacagtgtatgttgtataagccaatgtccatacctgattatgagagcttcttaaattatatgatatcaaatttgttcctgtaactctgtatacagtgcttttctgcaaggtaaaaataacctgtctatgcatctgatttttgctacagtttagacactgtggtttacaaaacagcatgcactcaacttgggactttatgaaaagtactgaatgagcaggaaaaggcacatactcagttttttaaatgtacaatcaacaagtaaaaataacctcatgtaagtaagccatttttatttgcctttctagatattttattttattgtggaaaactgtaaacatggtcagatttggctttttttttcattaactgagcaagactttcaggatattgtagatgcacagatggtaggttgtcctgaattctacattattagattactttaattgagatttgttaaaacggttaggactgttttgtccaggaaagataagaggaccaaacatataaggtgaaattcagaattccgtttccttctaactaatgaaaaactgcttactaaaaaaaaattttatactttccttgctaaggtcccatatattgatttgtacagatccacttagtcattttctcctttttttaagaaccattttcatctgatttttaaactcacgataccagttatctgttaatcaaaattgcattttacaatttaataatgtgatatttcctatgtctacagcataccttattaggtataaaacctactgcaacttagaaaaaggaaagaaaaaagaaaacttttccaactgctgcattaagatagggtggattttatgtgctttttttttttaagagttgaatttcttttcctgacttttaccttttacagcgtattacttagtgaacattacattttcagaatagatcctaatattttattgagggcctatgtgctaaaaactatgcatatctatatattggccaattatctttaataatttaccttttgaaattgcatgtttatcatatatccttaagtggacacatacagtgccatgttgatgtgcctctcagttttattgaaaagctgccccacagcccatgtctcttgttctctgcaatgcctcaagggagtgagctctcaaccacagatagctgtggcttctcagaagcagctcattgccaaggccaggctgagaggggacctgcttgctgtggtggttgcctagcccagatgagcatttacctaccaccttcccacttggctagctgtcctttggatatgtgctgttaactggggaaggcatctaactagtagcctgctactccatagtatggctcaatagatgacacatcattttgacattatcaataggagaaaagaaaactaacccttcttctgattgtttggagccatagttgtctcagatgttctaattctctttgtatgcttggaaacagcatagatatgttgctgtggttttcagaattttctcttttaatcacaagaagccttttaaaaaatgacttacacatattctcaatgtacagtaaaacagacagaagtgagcttatctgtttgatgctgtggcagggtcccagtcactgggcatatcctccttctccttaaccagctccacagcagcccctgagtcacctgcacaaggtgcttgggaactgctggttatgagcattcctggttttcttcagccaaataacaggtaatcactgtcaattggatttggtcttcattattttatattctgattttatcagaattattctattttaaaattgttttaaaatttaaaacatttaattcatgatcatgttcatcagtagatgctattattcataagaactgtgattccagcaaactagggtaattggtgcctttttacagttttgaataaaagcatttacaatttctaaattatcagttttcacagtttcagcactcaacctcatcatacgctgatttaatattgttttacattaaaatagtccttttccctgttgtgccaccattcatttaagtgctgtttgttcttaaaatgcatttaaagaaaaattacccatattgactttcacacctcatataatcagatctattacaaatatatatcggagtgacggtgcccaggatagatgtaatatttcttacagatgctggcacagaggaaataatataccagctaatctagtcacctaaccttgtggttagaattgcaattttaagaccagaaaaatttgaagtctgatcagagatttacaactgttcattatagtggtgccttaggcaatctttccaaagtaaattcagggccccattgctacttatgccatatttggacatactttttttttcttcaattttgtaaacttcctggaaagctgtcttcactaagtatcccctagtctctatatatgtggttagtagtcatggaaatgacacataaagtacgccagaagtttgatggaacgtgttagaaactgttttgtgcttttatggatgtcatacttgacaatacatgtgtaagttactaatatatgaattgatgctaaatatatcttacatttgaattccttttggataaagttatttcttgatgtgacagagtagtgtgttttcatttttattctttacatgtgaccaaaacaatagaaaagttaaaaataaaatatagtgttttaggtggc

SEQ ID NO: 141995 - DNA, 580 bp, Artificial Sequence
  derived and/or modified sequence
gaatcctgcggtcccagcgtcgctccggacgctgccaacctgttctccaccgtcgctcgacttccacctctaagactcccacgtgagtgcgggcgtctcccagttcctgggccggaaactcaggttgaataattcatcaaattacacaactgaactcaagacatggctgcccagtgtgtcacaaaggtggcgctgaatgtttcctgtgccaatcttttggataaagatatagggtcaaagtcagaccctttatgtgtgttgtttttgaatacaagtggtcaacagtggtatgaggttgagcgcacagaaaggattaagaattgcttgaatccccaattttccaagacatttattattgattactactttgaagtggttcagaaattgaaatttggggtttatgacatcgacaacaaaactattgagctgagtgatgatgacttcttaggggaatgtgaatgtacccttggacaaattgtttccagcaagaagctaactcgaccactggtgatgaaaactggcagacctgcaggaaaagggagcattacgatttcagctgaagaaataaaagataatagag

SEQ ID NO: 141996 - DNA, 4864 bp, Artificial Sequence
  derived and/or modified sequence
cttgctctgccagtccagccctaggttctcctgaatcctgcggtcccagcgtcgctccggacgctgccaacctgttctccaccgtcgctcgacttccacctctaagactcccacgaaactcaggttgaataattcatcaaattacacaactgaactcaagacatggctgcccagtgtgtcacaaaggtggcgctgaatgtttcctgtgccaatcttttggataaagatatagggtcaaagtcagaccctttatgtgtgttgtttttgaatacaagtggtcaacagtggtatgaggttgagcgcacagaaaggattaagaattgcttgaatccccaattttccaagacatttattattgattactactttgaagtggttcagaaattgaaatttggggtttatgacatcgacaacaaaactattgagctgagtgatgatgacttcttaggggaatgtgaatgtacccttggacaaattgtttccagcaagaagctaactcgaccactggtgatgaaaactggcagacctgcaggaaaagggagcattacgatttcagctgaagaaataaaagataatagagtggtcttgtttgaaatggaagccagaaaactggataataaggatctatttggaaagtcagacccatacctggaattccacaagcagacatctgatggaaactggctaatggttcatcggacagaggttgttaaaaacaacttgaatcctgtttggaggcctttcaagatctctcttaactcactgtgttacggagatatggacaaaaccattaaggtggagtgttatgattatgacaatgatgggtcacatgatctcattggaacatttcagaccaccatgacaaaactgaaagaagcctccagaagctcacctgttgaatttgaatgcataaatgagaaaaaaaggcaaaagaaaaaaagctacaagaattcaggtgttatcagtgtgaaacagtgtgagattacagtagaatgcacattccttgactatataatgggaggatgtcagctgaattttactgtgggagtggacttcactggctccaatggtgacccaaggtctccagactcccttcattacatcagccccaatggcgttaatgagtatttgactgctctctggtctgtgggactggtcattcaagattatgatgctgataagatgtttccagcttttggttttggcgctcagatacctcctcagtggcaggtatcacatgaatttccaatgaacttcaacccatccaatccctactgcaatggaatccaaggcattgtagaggcgtatcggtcttgtcttcctcagataaaactctatggaccaactaatttttctccaatcataaatcacgtggccaggtttgctgctgcagccacgcaacagcagacagcttctcaatattttgtgcttttgattattactgatggtgtgatcacagaccttgatgaaaccagacaagctatagttaatgcctccaggctgcctatgtccatcataattgttggagttggaggtgctgacttcagcgccatggagtttctggatggtgatggtggaagtctccgctccccattgggcgaagtggccatcagagatattgtccagtttgtgcctttcagacagttccagaatgctccaaaagaagcacttgctcagtgtgtcttggcagagattccccagcaggtggtgggctacttcaatacatacaaactccttcctcccaagaacccagccacgaaacaacagaagcagtgaccacttcaacagaattcttttgtgttatgtggagcaatgccatctctcaccccaaatcgtgtatctgtcattctacgtactttttacccccagcatttatgatgtaaatctctttctctatggattatatctgtttaaagcattctttctaggttattttggggggacagtgccaagtccatctttgcccagtcaattcagtgattgatagcaatttacattaattgcagtaaagctctttggattagaaattagtgtggggaaagcttattctgttgttgtttttgtttactttcatatgatgaaaatgctgtgtttaagtgtttgtcaataggaagaatggaaaactgttgggatgatgtggtttgcaggttgctgtgcctgattcacagtgtatgttgtataagccaatgtccatacctgattatgagagcttcttaaattatatgatatcaaatttgttcctgtaactctgtatacagtgcttttctgcaaggtaaaaataacctgtctatgcatctgatttttgctacagtttagacactgtggtttacaaaacagcatgcactcaacttgggactttatgaaaagtactgaatgagcaggaaaaggcacatactcagttttttaaatgtacaatcaacaagtaaaaataacctcatgtaagtaagccatttttatttgcctttctagatattttattttattgtggaaaactgtaaacatggtcagatttggctttttttttcattaactgagcaagactttcaggatattgtagatgcacagatggtaggttgtcctgaattctacattattagattactttaattgagatttgttaaaacggttaggactgttttgtccaggaaagataagaggaccaaacatataaggtgaaattcagaattccgtttccttctaactaatgaaaaactgcttactaaaaaaaaattttatactttccttgctaaggtcccatatattgatttgtacagatccacttagtcattttctcctttttttaagaaccattttcatctgatttttaaactcacgataccagttatctgttaatcaaaattgcattttacaatttaataatgtgatatttcctatgtctacagcataccttattaggtataaaacctactgcaacttagaaaaaggaaagaaaaaagaaaacttttccaactgctgcattaagatagggtggattttatgtgctttttttttttaagagttgaatttcttttcctgacttttaccttttacagcgtattacttagtgaacattacattttcagaatagatcctaatattttattgagggcctatgtgctaaaaactatgcatatctatatattggccaattatctttaataatttaccttttgaaattgcatgtttatcatatatccttaagtggacacatacagtgccatgttgatgtgcctctcagttttattgaaaagctgccccacagcccatgtctcttgttctctgcaatgcctcaagggagtgagctctcaaccacagatagctgtggcttctcagaagcagctcattgccaaggccaggctgagaggggacctgcttgctgtggtggttgcctagcccagatgagcatttacctaccaccttcccacttggctagctgtcctttggatatgtgctgttaactggggaaggcatctaactagtagcctgctactccatagtatggctcaatagatgacacatcattttgacattatcaataggagaaaagaaaactaacccttcttctgattgtttggagccatagttgtctcagatgttctaattctctttgtatgcttggaaacagcatagatatgttgctgtggttttcagaattttctcttttaatcacaagaagccttttaaaaaatgacttacacatattctcaatgtacagtaaaacagacagaagtgagcttatctgtttgatgctgtggcagggtcccagtcactgggcatatcctccttctccttaaccagctccacagcagcccctgagtcacctgcacaaggtgcttgggaactgctggttatgagcattcctggttttcttcagccaaataacaggtaatcactgtcaattggatttggtcttcattattttatattctgattttatcagaattattctattttaaaattgttttaaaatttaaaacatttaattcatgatcatgttcatcagtagatgctattattcataagaactgtgattccagcaaactagggtaattggtgcctttttacagttttgaataaaagcatttacaatttctaaattatcagttttcacagtttcagcactcaacctcatcatacgctgatttaatattgttttacattaaaatagtccttttccctgttgtgccaccattcatttaagtgctgtttgttcttaaaatgcatttaaagaaaaattacccatattgactttcacacctcatataatcagatctattacaaatatatatcggagtgacggtgcccaggatagatgtaatatttcttacagatgctggcacagaggaaataatataccagctaatctagtcacctaaccttgtggttagaattgcaattttaagaccagaaaaatttgaagtctgatcagagatttacaactgttcattatagtggtgccttaggcaatctttccaaagtaaattcagggccccattgctacttatgccatatttggacatactttttttttcttcaattttgtaaacttcctggaaagctgtcttcactaagtatcccctagtctctatatatgtggttagtagtcatggaaatgacacataaagtacgccagaagtttgatggaacgtgttagaaactgttttgtgcttttatggatgtcatacttgacaatacatgtgtaagttactaatatatgaattgatgctaaatatatcttacatttgaattccttttggataaagttatttcttgatgtgacagagtagtgtgttttcatttttattctttacatgtgaccaaaacaatagaaaagttaaaaataaaatatagtgttttaggtggc

SEQ ID NO: 141997 - DNA, 446 bp, Artificial Sequence
  derived and/or modified sequence
gttcctgggccggtgaggcagcagcccagcaaccgtaccgcccgggggaaaaggaaagtcctggcctggaggatccgagcccgcaggctccgtgcggcaggtcccgccgggccctgctgctggaagtgctccgtgggcttcgcgcagctggggatcggcaggaaactcaggttgaataattcatcaaattacacaactgaactcaagacatggctgcccagtgtgtcacaaaggtggcgctgaatgtttcctgtgccaatcttttggataaagatatagggtcaaagtcagaccctttatgtgtgttgtttttgaatacaagtggtcaacagtggtatgaggttgagcgcacagaaaggattaagaattgcttgaatccccaattttccaagacatttattattgattactactttgaagtggttcagaaattgaaatttggggtt

SEQ ID NO: 141998 - DNA, 679 bp, Artificial Sequence
  derived and/or modified sequence
agtccagccctaggttctcctgaatcctgcggtcccagcgtcgctccggacgctgccaacctgttctccaccgtcgctcgacttccacctctaagactcccacgaaactcaggttgaataattcatcaaattacacaactgacggagtcttgctctgtcgcccaggttggaatgcaatggcgtgatctcactgaccgaaacctccgcctctgaggttcaagtgattctcctgcctcagcctcctgagtagctgggattacagaactcaagacatggctgcccagtgtgtcacaaaggtggcgctgaatgtttcctgtgccaatcttttggataaagatatagggtcaaagtcagaccctttatgtgtgttgtttttgaatacaagtggtcaacagtggtatgaggttgagcgcacagaaaggattaagaattgcttgaatccccaattttccaagacatttattattgattactactttgaagtggttcagaaattgaaatttggggtttatgacatcgacaacaaaactattgagctgagtgatgatgacttcttaggggaatgtgaatgtacccttggacaaattgtttccagcaagaagctaactcgaccactggtgatgaaaactggcagacctgcaggaaaagggagcattacgatttcagctgaagaaataaa

SEQ ID NO: 141999 - DNA, 816 bp, Artificial Sequence
  derived and/or modified sequence
cagtccagccctaggttctcctgaatcctgcggtcccagcgtcgctccggacgctgccaacctgttctccaccgtcgctcgacttccacctctaagactcccacaactcaagacatggctgcccagtgtgtcacaaaggtggcgctgaatgtttcctgtgccaatcttttggataaagatatagggtcaaagtcagaccctttatgtgtgttgtttttgaatacaagtggtcaacagtggtatgaggttgagcgcacagaaaggattaagaattgcttgaatccccaattttccaagacatttattattgattactactttgaagtggttcagaaattgaaatttggggtttatgacatcgacaacaaaactattgagctgagtgatgatgacttcttaggggaatgtgaatgtacccttggacaaattgtttccagcaagaagctaactcgaccactggtgatgaaaactggcagacctgcaggaaaagggagcattacgatttcagctgaagaaataaaagataatagagtggtcttgtttgaaatggaagccagaaaactggataataaggatctatttggaaagtcagacccatacctggaattccacaagcagacatctgatggaaactggctaatggttcatcggacagaggttgttaaaaacaacttgaatcctgtttggaggcctttcaagatctctcttaactcactgtgttacggagatatggacaaaaccattaaggtggagtgttatgattatgacaatgatgggtcacatgatctcattggaacatttcagaccaccatgaca

SEQ ID NO: 142000 - DNA, 656 bp, Artificial Sequence
  derived and/or modified sequence
ctccaccgtcgctcgacttccacctctaagactcccacgaaactcaggttgaataattcatcaaattacacaactgctaattaactattaattagaggctttagtgctctgaagggattttggcataaaggggaaaatacctgggtttatgctgtggtggtgacacttactagctttgtgatcccataactcaagacatggctgcccagtgtgtcacaaaggtggcgctgaatgtttcctgtgccaatcttttggataaagatatagggtcaaagtcagaccctttatgtgtgttgtttttgaatacaagtggtcaacagtggtatgaggttgagcgcacagaaaggattaagaattgcttgaatccccaattttccaagacatttattattgattactactttgaagtggttcagaaattgaaatttggggtttatgacatcgacaacaaaactattgagctgagtgatgatgacttcttaggggaatgtgaatgtacccttggacaaattgtttccagcaagaagctaactcgaccactggtgatgaaaactggcagacctgcaggaaaagggagcattacgatttcagctgaagaaataaaagataatagagtggtcttgtttgaaatggaagccagaaaactggataataag

SEQ ID NO: 142001 - DNA, 1614 bp, Artificial Sequence
  derived and/or modified sequence
atggccgcccagtgcgtgaccaaggtggccctgaacgtgagctgcgccaacctgctggacaaggacatcggcagcaagagcgaccccctgtgcgtgctgttcctgaacaccagcggccagcagtggtacgaggtggagagaaccgagagaatcaagaactgcctgaacccccagttcagcaagaccttcatcatcgactactacttcgaggtggtgcagaagctgaagttcggcgtgtacgacatcgacaacaagaccatcgagctgagcgacgacgacttcctgggcgagtgcgagtgcaccctgggccagatcgtgagcagcaagaagctgaccagacccctggtgatgaagaccggcagacccgccggcaagggcagcatcaccatcagcgccgaggagatcaaggacaacagagtggtgctgttcgagatggaggccagaaagctggacaacaaggacctgttcggcaagagcgacccctacctggagttccacaagcagaccagcgacggcaactggctgatggtgcacagaaccgaggtggtgaagaacaacctgaaccccgtgtggagacccttcaagatcagcctgaacagcctgtgctacggcgacatggacaagaccatcaaggtggagtgctacgactacgacaacgacggcagccacgacctgatcggcaccttccagaccaccatgaccaagctgaaggaggccagcagaagcagccccgtggagttcgagtgcatcaacgagaagaagagacagaagaagaagagctacaagaacagcggcgtgatcagcgtgaagcagtgcgagatcaccgtggagtgcaccttcctggactacatcatgggcggctgccagctgaacttcaccgtgggcgtggacttcaccggcagcaacggcgaccccagaagccccgacagcctgcactacatcagccccaacggcgtgaacgagtacctgaccgccctgtggagcgtgggcctggtgatccaggactacgacgccgacaagatgttccccgccttcggcttcggcgcccagatccccccccagtggcaggtgagccacgagttccccatgaacttcaaccccagcaacccctactgcaacggcatccagggcatcgtggaggcctacagaagctgcctgccccagatcaagctgtacggccccaccaacttcagccccatcatcaaccacgtggccagattcgccgccgccgccacccagcagcagaccgccagccagtacttcgtgctgctgatcatcaccgacggcgtgatcaccgacctggacgagaccagacaggccatcgtgaacgccagcagactgcccatgagcatcatcatcgtgggcgtgggcggcgccgacttcagcgccatggagttcctggacggcgacggcggcagcctgagaagccccctgggcgaggtggccatcagagacatcgtgcagttcgtgcccttcagacagttccagaacgcccccaaggaggccctggcccagtgcgtgctggccgagatcccccagcaggtggtgggctacttcaacacctacaagctgctgccccccaagaaccccgccaccaagcagcagaagcagtag

SEQ ID NO: 142002 - DNA, 420 bp, Artificial Sequence
  derived and/or modified sequence
atggccgcccagtgcgtgaccaaggtggccctgaacgtgagctgcgccaacctgctggacaaggacatcggcagcaagagcgaccccctgtgcgtgctgttcctgaacaccagcggccagcagtggtacgaggtggagagaaccgagagaatcaagaactgcctgaacccccagttcagcaagaccttcatcatcgactactacttcgaggtggtgcagaagctgaagttcggcgtgtacgacatcgacaacaagaccatcgagctgagcgacgacgacttcctgggcgagtgcgagtgcaccctgggccagatcgtgagcagcaagaagctgaccagacccctggtgatgaagaccggcagacccgccggcaagggcagcatcaccatcagcgccgaggagatcaaggacaacagatag

SEQ ID NO: 142003 - DNA, 240 bp, Artificial Sequence
  derived and/or modified sequence
atggccgcccagtgcgtgaccaaggtggccctgaacgtgagctgcgccaacctgctggacaaggacatcggcagcaagagcgaccccctgtgcgtgctgttcctgaacaccagcggccagcagtggtacgaggtggagagaaccgagagaatcaagaactgcctgaacccccagttcagcaagaccttcatcatcgactactacttcgaggtggtgcagaagctgaagttcggcgtgtag

SEQ ID NO: 142004 - DNA, 408 bp, Artificial Sequence
  derived and/or modified sequence
atggccgcccagtgcgtgaccaaggtggccctgaacgtgagctgcgccaacctgctggacaaggacatcggcagcaagagcgaccccctgtgcgtgctgttcctgaacaccagcggccagcagtggtacgaggtggagagaaccgagagaatcaagaactgcctgaacccccagttcagcaagaccttcatcatcgactactacttcgaggtggtgcagaagctgaagttcggcgtgtacgacatcgacaacaagaccatcgagctgagcgacgacgacttcctgggcgagtgcgagtgcaccctgggccagatcgtgagcagcaagaagctgaccagacccctggtgatgaagaccggcagacccgccggcaagggcagcatcaccatcagcgccgaggagatctag

SEQ ID NO: 142005 - DNA, 705 bp, Artificial Sequence
  derived and/or modified sequence
atggccgcccagtgcgtgaccaaggtggccctgaacgtgagctgcgccaacctgctggacaaggacatcggcagcaagagcgaccccctgtgcgtgctgttcctgaacaccagcggccagcagtggtacgaggtggagagaaccgagagaatcaagaactgcctgaacccccagttcagcaagaccttcatcatcgactactacttcgaggtggtgcagaagctgaagttcggcgtgtacgacatcgacaacaagaccatcgagctgagcgacgacgacttcctgggcgagtgcgagtgcaccctgggccagatcgtgagcagcaagaagctgaccagacccctggtgatgaagaccggcagacccgccggcaagggcagcatcaccatcagcgccgaggagatcaaggacaacagagtggtgctgttcgagatggaggccagaaagctggacaacaaggacctgttcggcaagagcgacccctacctggagttccacaagcagaccagcgacggcaactggctgatggtgcacagaaccgaggtggtgaagaacaacctgaaccccgtgtggagacccttcaagatcagcctgaacagcctgtgctacggcgacatggacaagaccatcaaggtggagtgctacgactacgacaacgacggcagccacgacctgatcggcaccttccagaccaccatgacctag

SEQ ID NO: 142006 - DNA, 462 bp, Artificial Sequence
  derived and/or modified sequence
atggccgcccagtgcgtgaccaaggtggccctgaacgtgagctgcgccaacctgctggacaaggacatcggcagcaagagcgaccccctgtgcgtgctgttcctgaacaccagcggccagcagtggtacgaggtggagagaaccgagagaatcaagaactgcctgaacccccagttcagcaagaccttcatcatcgactactacttcgaggtggtgcagaagctgaagttcggcgtgtacgacatcgacaacaagaccatcgagctgagcgacgacgacttcctgggcgagtgcgagtgcaccctgggccagatcgtgagcagcaagaagctgaccagacccctggtgatgaagaccggcagacccgccggcaagggcagcatcaccatcagcgccgaggagatcaaggacaacagagtggtgctgttcgagatggaggccagaaagctggacaacaagtag

SEQ ID NO: 142007 - protein, 144 aa, Artificial Sequence
  derived and/or modified sequence
MPKVKRSRKAPPDGWELIEPTLDELDQKMREAETEPHEGKRKVESLWPIFRIHHQKTRYIFDLFYKRKAISRELYEYCIKEGYADKNLIAKWKKQGYENLCCLRCIQTRDTNFGTNCICRVPKSKLEVGRIIECTHCGCRGCSG

SEQ ID NO: 142008 - protein, 103 aa, Artificial Sequence
  derived and/or modified sequence
MPKVKRSRKAPPDGWELIEPTLDELDQKMREELYEYCIKEGYADKNLIAKWKKQGYENLCCLRCIQTRDTNFGTNCICRVPKSKLEVGRIIECTHCGCRGCSG

SEQ ID NO: 142009 - DNA, 435 bp, Artificial Sequence
  derived and/or modified sequence
atgccaaaagtcaagcggtctaggaaggccccccctgatggttgggagctgatagagcccactctcgatgagctggatcagaagatgagagaagctgagaccgaacctcacgaaggaaagcggaaagtcgaatccctgtggcccattttccggattcaccatcagaagaccagatatatcttcgatttgttttacaagcgcaaggcaatctcccgggaactttacgaatattgtatcaaggaaggctatgccgataagaacctgatagccaagtggaagaagcaaggctatgagaacctgtgctgcttgaggtgcattcaaacgagagatactaactttggcactaattgcatctgcagggtcccaaaatccaaactggaggtgggccgaattatcgaatgtactcactgtggctgtcgcggttgcagcggttag

SEQ ID NO: 142010 - DNA, 312 bp, Artificial Sequence
  derived and/or modified sequence
atgcccaaagtcaaaagatcccgcaaggctccacccgacgggtgggaactcatcgaaccaaccctagacgaactggatcagaaaatgagggaagagctttatgaatactgtattaaggaggggtacgccgacaagaatctgatcgctaagtggaaaaagcaggggtacgaaaatctctgttgtcttcggtgcatacagactcgcgacactaatttcgggactaactgcatctgcagggtgcctaaatccaagctcgaagttggacggataatcgaatgcacccactgcggttgtcgaggctgcagcggatag

SEQ ID NO: 142011 - DNA, 435 bp, Artificial Sequence
  derived and/or modified sequence
atgcccaaggtgaagaggagcaggaaggcccccccagatggctgggagctgattgagcccaccctggatgagctggaccagaagatgagggaggccgagacagagccccatgagggcaagaggaaggtggagagcctgtggcccatcttccgcatccaccaccagaagacccgctacatctttgacctcttctacaagaggaaggccatcagccgggagctgtatgagtactgcatcaaggagggctacgccgacaagaacctgattgccaagtggaagaagcagggctatgagaacctgtgctgcctgcgctgcatccagacccgggacaccaactttggcaccaactgcatctgccgggtgcccaagagcaagctggaggtgggccgcatcattgaatgtacccactgcggctgccggggctgcagcggctag

SEQ ID NO: 142012 - DNA, 312 bp, Artificial Sequence
  derived and/or modified sequence
atgcccaaggtgaagaggagcaggaaggcccccccagatggctgggagctgattgagcccaccctggatgagctggaccagaagatgagggaggagctgtatgagtactgcatcaaggagggctatgctgacaagaacctgattgccaagtggaagaagcagggctatgagaacctgtgctgcctgcgctgcatccagacccgggacaccaactttggcaccaactgcatctgccgggtgcccaagagcaagctggaggtgggccgcatcatcgagtgcacccactgcggctgccggggctgcagcggctag

SEQ ID NO: 142013 - DNA, 435 bp, Artificial Sequence
  derived and/or modified sequence
atgcccaaggtgaagcggagccggaaggccccccccgacggctgggagctaattgagcctaccctggacgagctagatcagaaaatgcgcgaggcagagaccgagccacatgagggtaaacggaaagtggagagcctgtggccgatattccgtatccaccaccagaaaacccgatacattttcgacttgttttataagcgaaaggctatttccagagagctgtatgagtactgcataaaggagggatatgctgacaaaaacctgattgctaagtggaagaagcaaggctatgaaaatctctgctgtctgagatgtatccagacacgggacactaactttggcaccaattgtatatgtcgtgtccctaaatccaaactggaagtcggtaggatcattgagtgcactcactgtgggtgtcgcggatgctcggggtag

SEQ ID NO: 142014 - DNA, 312 bp, Artificial Sequence
  derived and/or modified sequence
atgcccaaggtgaagcggagccggaaggccccccccgacggctgggagcttattgagcccacccttgacgagttggatcagaagatgagggaggaactgtatgagtactgtataaaagagggttatgccgataagaacttgattgccaaatggaagaaacaagggtacgagaacctgtgctgcttgcggtgcatccaaacccgcgacacaaacttcgggaccaactgcatttgtagggtacccaaaagtaaattagaagtgggacggataattgaatgtacacattgtggatgccgtgggtgttccggctag

SEQ ID NO: 142015 - DNA, 435 bp, Artificial Sequence
  derived and/or modified sequence
atgcctaaagtgaagcgctcaaggaaggcgcctcctgatggctgggaattgattgagccaacccttgatgagctcgaccagaagatgagagaggcggaaaccgaacctcatgaggggaagaggaaggtggagagcttatggcccatctttcgaatacatcaccaaaaaaccaggtatatattcgacctcttctacaagagaaaagccatttcccgtgagttatatgagtattgcattaaagagggctacgcagataaaaaccttattgcgaagtggaagaagcaggggtacgaaaatctctgctgtctgcggtgcatccagactagagacactaacttcggtacaaactgtatctgccgcgttccgaagtctaagctcgaggtaggacgcattattgaatgcactcactgcggctgccgaggttgtagtggatag

SEQ ID NO: 142016 - DNA, 312 bp, Artificial Sequence
  derived and/or modified sequence
atgccaaaagttaagaggtctcgaaaggcacccccagacgggtgggagcttattgaacccacccttgacgagctggaccagaagatgcgggaagagctgtacgaatactgcatcaaagagggatacgccgacaagaacctgattgccaagtggaaaaaacagggttatgaaaatctctgctgtctgcgctgcatccagacgagggacaccaacttcgggaccaactgtatctgtcgggtgcccaaaagcaaactggaagtgggccgaattatcgaatgcactcactgcggatgcaggggatgctctggatag

SEQ ID NO: 142017 - DNA, 1035 bp, Artificial Sequence
  derived and/or modified sequence
cagctacccaagctccaggagcttccggtatgtgttttccctctgttctcgattaccttggcaacggctgaggcgggagaccggtggtctgcaccgtcctggagggagatatgagtggctggactctcagccagccactgggatgtgttcgggctttggaccttgaggccggagagagctcccgagaggaggcggcgccacgttcgttcttctgaggggacggtagatttgggggttttcctctaggattctcgcgccgtttcctctgaagaaacaggaccagagagggaaggtgacctgaaagtcacagaataattttttagagctgaacaagaatccaagcctgcaactgcagagacgagagatctttctgctgtctatactcttggaaagcacatcctaagatctttgcagattatcctgtggaaggaaaatgcctaaagtcaaaagaagccggaaagcacccccagatggctgggagttgattgagccaacactggatgaattagatcaaaagatgagagaagctgaaacagaaccgcatgagggaaagaggaaagtggaatctctgtggcccatcttcaggatccaccaccagaaaacccgctacatcttcgacctcttttacaagcggaaagccatcagcagagaactctatgaatattgtattaaagaaggctatgcagacaaaaacctgattgcaaaatggaaaaagcaaggatatgagaacttgtgctgcctgcggtgcattcagacacgggacaccaacttcgggacgaactgcatctgccgcgtgcccaaaagcaagctggaagtgggccgcatcatcgagtgcacacactgtggctgtcgtggctgctctggctgaggctggcgcgctccaccctggactctggacttcgcaggttcctgcctgtcacgccacccccttcctgggagcagcgagcagtgccccaggcccgagttggagcacggtctctatggggaaggcttcgctgtctatcagctgtgatttgtaaaaataaaatctttaaa

SEQ ID NO: 142018 - DNA, 1139 bp, Artificial Sequence
  derived and/or modified sequence
gccgccgccgccgcttcagtggccgcagtggccgcaaggacccggacctcagggaggcctccgcacgaagtcggaccgtcctgcgcgccgcctaagtccaggcttgcccgtctgctgccaggcaacaacgcccctagtctctccgttcgggaagacgcgtggccctgcctgccacccaccggaagtgagggcaaatggcaacagcggctctggaattctatacaggcattgctgaggacacctaagatgacgcaatctccgcgcgggtagggcggggctccgcaaggacctcatgccttagagatcgcctgaagagcggaagccttctgtcgagaagcagctacccaagctccaggagcttccgaagaaacaggaccagagagggaaggtgacctgaaagtcacagaataattttttagagctgaacaagaatccaagcctgcaactgcagagacgagagatctttctgctgtctatactcttggaaagcacatcctaagatctttgcagattatcctgtggaaggaaaatgcctaaagtcaaaagaagccggaaagcacccccagatggctgggagttgattgagccaacactggatgaattagatcaaaagatgagagaagctgaaacagaaccgcatgagggaaagaggaaagtggaatctctgtggcccatcttcaggatccaccaccagaaaacccgctacatcttcgacctcttttacaagcggaaagccatcagcagagaactctatgaatattgtattaaagaaggctatgcagacaaaaacctgattgcaaaatggaaaaagcaaggatatgagaacttgtgctgcctgcggtgcattcagacacgggacaccaacttcgggacgaactgcatctgccgcgtgcccaaaagcaagctggaagtgggccgcatcatcgagtgcacacactgtggctgtcgtggctgctctggctgaggctggcgcgctccaccctggactctggacttcgcaggttcctgcctgtcacgccacccccttcctgggagcagcgagcagtgccccaggcccgagttggagcacggtctctatggggaaggcttcgctgtctatcagctgtgatttgtaaaaataaaatctttaaatctctcga

SEQ ID NO: 142019 - DNA, 519 bp, Artificial Sequence
  derived and/or modified sequence
cccccagatctttgcagattatcctgtggaaggaaaatgcctaaagtcaaaagaagccggaaagcacccccagatggctgggagttgattgagccaacactggatgaattagatcaaaagatgagagaagaactctatgaatattgtattaaagaaggctatgcagacaaaaacctgattgcaaaatggaaaaagcaaggatatgagaacttgtgctgcctgcggtgcattcagacacgggacaccaacttcgggacgaactgcatctgccgcgtgcccaaaagcaagctggaagtgggccgcatcatcgagtgcacacactgtggctgtcgtggctgctctggctgaggctggcgcgctccaccctggactctggacttcgcaggttcctgcctgtcacgccacccccttcctgggagcagcgagcagtgccccaggcccgagttggagcacggtctctatggggaaggcttcgctgtctatcagctgtgatttgtaaaaataaaatctttaaatctc

SEQ ID NO: 142020 - DNA, 435 bp, Artificial Sequence
  derived and/or modified sequence
atgcccaaggtgaagagaagcagaaaggccccccccgacggctgggagctgatcgagcccaccctggacgagctggaccagaagatgagagaggccgagaccgagccccacgagggcaagagaaaggtggagagcctgtggcccatcttcagaatccaccaccagaagaccagatacatcttcgacctgttctacaagagaaaggccatcagcagagagctgtacgagtactgcatcaaggagggctacgccgacaagaacctgatcgccaagtggaagaagcagggctacgagaacctgtgctgcctgagatgcatccagaccagagacaccaacttcggcaccaactgcatctgcagagtgcccaagagcaagctggaggtgggcagaatcatcgagtgcacccactgcggctgcagaggctgcagcggctag

SEQ ID NO: 142021 - DNA, 312 bp, Artificial Sequence
  derived and/or modified sequence
atgcccaaggtgaagagaagcagaaaggccccccccgacggctgggagctgatcgagcccaccctggacgagctggaccagaagatgagagaggagctgtacgagtactgcatcaaggagggctacgccgacaagaacctgatcgccaagtggaagaagcagggctacgagaacctgtgctgcctgagatgcatccagaccagagacaccaacttcggcaccaactgcatctgcagagtgcccaagagcaagctggaggtgggcagaatcatcgagtgcacccactgcggctgcagaggctgcagcggctag

SEQ ID NO: 142022 - DNA, 435 bp, Artificial Sequence
  derived and/or modified sequence
atgccaaaagtaaagcggagcaggaaggccccacctgatggctgggagttgattgagcccaccctggatgagcttgaccagaaaatgcgtgaggctgagacggaacctcatgagggcaaacgcaaggtggagagcttatggcctatatttaggatccaccaccagaaaaccagatatatcttcgacttgttttacaagcgcaaagcaatctcgcgggaactttacgagtattgtatcaaggagggctacgcggacaagaacctgattgccaagtggaagaagcagggatatgagaacctttgttgtttgcgctgcattcagacccgggacaccaacttcggcactaactgcatctgtcgtgtcccgaagtccaagctggaagttggcagaattattgagtgtactcactgtggctgccgtggatgttctggctag

SEQ ID NO: 142023 - DNA, 435 bp, Artificial Sequence
  derived and/or modified sequence
atgcccaaggtgaagcggagccggaaggccccccccgacggctgggaactcatcgagccgactctagatgaactcgatcagaagatgcgggaagctgagacggagccgcacgaaggtaaacggaaagtggagtcactttggccaattttcagaatccaccatcagaaaacaaggtatatattcgatctgttctataaacggaaggctatctcgcgagagttatacgaatattgtattaaagaagggtacgccgacaagaacctgatcgccaagtggaaaaagcaggggtatgaaaacttgtgctgcttgaggtgcatccagacccgtgacactaactttggtacaaactgcatctgccgggtgccgaagtcaaaactagaggtggggcgcataatcgaatgcacgcactgtggatgtcgcgggtgttccggctag

SEQ ID NO: 142024 - DNA, 435 bp, Artificial Sequence
  derived and/or modified sequence
atgcctaaagtgaagcgctcccggaaagcacccccagatggctgggagttaattgaacctaccctggatgagttagatcagaaaatgagggaggccgagacagagccccacgagggaaagaggaaggtggagtctctgtggccaattttcagaatccaccatcagaaaacccgatatatcttcgatttgttctataagcggaaggctatcagcagggagctatatgagtactgcataaaagaaggatatgctgacaaaaacctcatcgcaaagtggaagaagcagggatatgaaaatctctgctgcttgaggtgcatccaaactagggacacaaacttcggtactaattgcatttgtagggttcctaaaagcaagctggaggtcgggagaattatcgagtgtacacactgcggatgcagaggctgttctggctag

SEQ ID NO: 142025 - protein, 1007 aa, Artificial Sequence
  derived and/or modified sequence
MAAAETQSLREQPEMEDANSEKSINEENGEVSEDQSQNKHSRHKKKKHKHRSKHKKHKHSSEEDKDKKHKHKHKHKKHKRKEIIDASDKEGMSPAKRTKLDDLALLEDLEKQRALIKAELDNELMEGKVQSGMGLILQGYESGSEEEGEIHEKARNGNRSSTRSSSTKGKLELVDNKITTKKRSKSRSKERTRHRSDKKKSKGGIEIVKEKTTRSKSKERKKSKSPSKRSKSQDQARKSKSPTLRRRSQEKIGKARSPTDDKVKIEDKSKSKDRKKSPIINESRSRDRGKKSRSPVDLRGKSKDRRSRSKERKSKRSETDKEKKPIKSPSKDASSGKENRSPSRRPGRSPKRRSLSPKPRDKSRRSRSPLLNDRRSKQSKSPSRTLSPGRRAKSRSLERKRREPERRRLSSPRTRPRDDILSRRERSKDASPINRWSPTRRRSRSPIRRRSRSPLRRSRSPRRRSRSPRRRDRGRRSRSRLRRRSRSRGGRRRRSRSKVKEDKFKGSLSEGMKVEQESSSDDNLEDFDVEEEDEEALIEQRRIQRQAIVQKYKYLAEDSNMSVPSEPSSPQSSTRTRSPSPDDILERVAADVKEYERENVDTFEASVKAKHNLMTVEQNNGSSQKKLLAPDMFTESDDMFAAYFDSARLRAAGIGKDFKENPNLRDNWTDAEGYYRVNIGEVLDKRYNVYGYTGQGVFSNVVRARDNARANQEVAVKIIRNNELMQKTGLKELEFLKKLNDADPDDKFHCLRLFRHFYHKQHLCLVFEPLSMNLREVLKKYGKDVGLHIKAVRSYSQQLFLALKLLKRCNILHADIKPDNILVNESKTILKLCDFGSASHVADNDITPYLVSRFYRAPEIIIGKSYDYGIDMWSVGCTLYELYTGKILFPGKTNNHMLKLAMDLKGKMPNKMIRKGVFKDQHFDQNLNFMYIEVDKVTEREKVTVMSTINPTKDLLADLIGCQRLPEDQRKKVHQLKDLLDQILMLDPAKRISINQALQHAFIQEKI

SEQ ID NO: 142026 - protein, 993 aa, Artificial Sequence [sequence omitted]

SEQ ID NO: 142027 - DNA, 3024 bp, Artificial Sequence
  derived and/or modified sequence
atggctgccgctgagacccaatccttgcgggagcagccagagatggaagacgcaaattccgagaaaagcataaacgaagaaaacggtgaggtgtccgaggatcagagtcagaacaagcacagtcggcataagaagaagaaacataagcaccggtccaagcataagaagcataagcacagttccgaggaagataaggataaaaaacataaacacaagcataagcacaagaaacataagagaaaggaaatcatagatgcctccgataaagaggggatgtcacctgctaaacgcactaagttggacgacctggcattgctggaggacctggagaaacaacgagctctgataaaggctgagctggataacgagcttatggagggaaaagtacaatctggaatgggcctcatcctgcagggctatgagagcggttctgaggaagagggggagatccacgagaaagcccgaaatgggaatagaagttccaccagaagttcatcaaccaaaggtaaactggagctcgttgacaacaaaatcactacgaagaaacgatctaaatctcgctctaaagaacgcacacggcatcgttcggacaagaagaaatcaaagggcggaatcgagattgtgaaagaaaagaccacaaggagtaaatctaaagagaggaagaagagtaagtctccttcaaaaaggtccaagagtcaggatcaagctaggaagtccaagagccctacgcttagacgaaggagccaggaaaagattggtaaggcgagaagtcccactgatgataaggtaaagatcgaggacaagtctaagagtaaagatagaaaaaagtccccaataattaatgaaagcaggtctcgagatcgggggaagaagtctcgatctcctgtggacttaaggggaaaaagtaaggatcgtaggtctcgcagcaaggagagaaagagcaagcggtccgagacggacaaagagaaaaaaccaatcaaatctcctagtaaggatgcatcatccgggaaagagaaccgcagcccgtctcgtcggcccggccgcagtcccaaacgacggtcactttcccccaagccccgggataaatcccggaggtctcgctccccccttttgaatgatcggaggagcaaacagtcaaaatctccctcccgtaccctcagtccaggcaggagggccaaaagtcgcagcctggagaggaagcggagagaaccagaacgcagaaggctcagctctccccggacaagacctagggatgacattttgagccggagagaaagaagcaaggacgcctcccccataaatcgatggtcccctaccaggagacggagcaggtccccgattaggagaaggtcaaggtctcctctccggagatctcggtctccccgacgcagatctcgaagtcctcgtagacgggacaggggcaggaggtccagaagccgtttgagaaggaggtctaggtcacgggggggacgccgccgtcgctctcggagcaaggtgaaggaggataagttcaaaggctccctatcagagggaatgaaggtggaacaggagagcagcagtgatgacaacctggaagatttcgatgtggaggaagaggatgaagaggccctcatcgagcagaggcggatacaaagacaggccatcgtccagaagtataaatatcttgcggaagactcgaatatgtccgtgccctccgaacctagtagccctcagagttccactcgcacacgctcaccctcgcctgatgatattctggagcgggtggccgctgacgttaaagagtacgagagagagaatgtggacacctttgaggcctcagtcaaagctaaacacaatctcatgaccgtagaacaaaataacggctcctctcaaaaaaagttgcttgctccagatatgtttacagaatccgatgacatgtttgcagcatatttcgattctgccaggcttcgcgctgcgggcataggtaaggacttcaaggaaaacccaaatttgagagacaattggactgatgcagaagggtactacagagtgaacattggcgaagtgttagataagagatacaatgtttacgggtatactggccagggtgtgttctccaacgtcgttagggcacgcgacaacgcaagggccaatcaggaggttgctgtcaaaataattaggaacaacgaactgatgcagaaaactggactaaaggagctggagttcttgaagaagttgaacgatgctgatccggatgacaagttccattgtctgcgcttatttcggcacttctaccataagcagcacctctgcctcgtgtttgagcccttgtccatgaatctgcgcgaagtgcttaaaaaatacggaaaggatgtcggactgcacatcaaggcggttcggagctacagccagcagttgtttctcgctctgaaactgcttaaacggtgcaatatccttcatgcagatattaaaccagataacatcctcgttaacgagtccaaaaccatcttgaaactgtgtgactttggttctgcatcccacgtggcggacaacgacatcacaccgtaccttgtttctagattttatcgggccccagagatcatcattggaaagtcatacgactacgggatcgacatgtggtccgttggctgcacgctgtacgaattgtacacaggcaaaatacttttccccggaaaaaccaacaaccacatgctgaaactagcaatggacttaaaagggaaaatgcctaataagatgatcaggaaaggggtattcaaagaccagcactttgaccagaatttgaactttatgtacattgaagtagataaagttaccgagagggagaaggtgactgtgatgagcacgatcaaccctacaaaggatctgctggccgatttaataggctgccaaagacttcctgaggatcagagaaagaaagttcaccagcttaaggacctactggatcagatcctcatgctggatcctgcaaagaggatctccatcaaccaggctttgcagcacgccttcattcaggaaaagatttag

SEQ ID NO: 142028 - DNA, 3024 bp, Artificial Sequence
  derived and/or modified sequence
atggccgccgcggagactcaaagtctgcgggagcagccagagatggaggacgctaattcagagaaaagtattaatgaagagaacggtgaagtgagcgaagatcagtctcaaaacaaacactcccgacacaaaaaaaagaagcataaacacaggagtaagcacaagaagcacaagcatagcagcgaggaagacaaggacaagaagcacaaacacaaacacaaacataagaagcacaagaggaaggagattatagatgccagcgacaaagaggggatgagtcctgcgaagcggaccaaactggatgacctggcgcttctggaagacttggagaagcagcgggctctaatcaaggcggagctcgacaacgagttgatggaaggtaaggtacagtctgggatggggctcattctgcagggctatgagtctgggagtgaagaggaaggcgagatacacgagaaggcaaggaacggcaaccgcagctctaccaggagttcctccacaaagggtaaactggaactcgtggataataaaattactaccaagaagcgatccaaatctagatccaaagagaggacccgccacagatctgacaagaaaaagtctaaaggcggcatcgaaatcgtgaaagagaagaccaccagatcaaaatctaaagaacgaaaaaaatcgaaaagcccttctaagaggagtaaatctcaggatcaggctcggaagtcgaagagccccacacttaggcggcggtcccaagagaagatcgggaaggcccgctcgcccactgatgacaaggtcaaaattgaggacaaatctaagtccaaggaccgcaaaaagagtcctatcataaacgagtcacggtcccgcgatagagggaagaaatcaagatctccagtggatctgcgcggcaagtctaaggaccggcgttcgcggtccaaggagaggaaatccaaacgttccgagacagataaggagaagaaacctatcaagtctcccagcaaggacgcctctagcggaaaagagaaccgctccccctcccggagacccggtcggtcacctaaaaggcgtagccttagtccgaagccaagggacaaaagccgcaggtctcgctccccactgttaaatgaccgtcgctcaaaacaatccaaatctccttcccgcactctcagcccaggcaggagagcgaaaagtaggtccctggagcgaaaacggagggaacctgagcggagacgtctgtctagcccaaggacgagaccaagggatgatatcctgtctcggcgcgagcggtccaaagatgcttctccgataaaccggtggtcgcctacacgccgcaggtcaagatctccaatacgccgtcgttccaggtctccactccggcggtcgcggtctccccgacgtcgctcacgatctccgaggcggcgtgacagaggtcgccgctctagaagtagacttagaaggcgcagtaggtctcgaggggggcgcaggcgccggtcaagaagcaaggtgaaagaggacaaatttaagggctccctgagcgagggaatgaaggtagagcaagaatcttccagcgacgacaacctggaagattttgacgtcgaggaagaggacgaagaggcactcatagagcaaagacgcattcagagacaagccattgtccagaagtataaatatctggccgaggacagtaacatgagtgttcctagcgaaccaagctcaccccaaagctcaactcgaacaaggagcccctctcctgatgacatactggagcgggtagctgcggacgtgaaggagtacgaacgtgagaacgtggacacttttgaagcctccgtgaaggccaagcacaacttaatgaccgtggaacagaacaacggatcttcacagaagaaattacttgcaccagatatgtttacagaaagcgatgacatgttcgccgcgtacttcgacagcgccaggctgagagctgcaggcattgggaaggacttcaaagaaaatccaaatctccgtgataactggacggatgccgaagggtactaccgcgtcaatattggggaagtgctcgacaaacggtacaatgtgtacgggtacactggccagggcgtttttagtaacgtggttagagctagggataacgcgcgggccaatcaggaggttgcagtgaagattattaggaacaacgaactgatgcagaagactgggcttaaagagctggagtttctcaagaagctcaatgatgctgatccggatgacaagttccactgcctgagactctttcggcacttttaccacaagcagcatctatgtttagtgttcgaacccctgtccatgaatctgagagaagtgctgaagaaatatggtaaggacgtgggtctgcacattaaggcagtccgtagctactcacagcagttattccttgcgcttaaactactgaagaggtgtaatatcctccacgctgatatcaagccagacaatatattagtcaacgaatcgaagactattttgaaactttgcgatttcggaagcgccagtcacgtggcagacaatgacatcaccccttacctggtcagcagattctatagagcgcctgaaatcattatcggcaagagctatgactatggaattgatatgtggtccgtgggttgtaccctctatgagctttacacaggcaaaatcctgttcccagggaaaacgaacaaccacatgctgaagttggcgatggatctgaaaggtaagatgcccaacaagatgataagaaaaggtgtgtttaaggaccagcattttgaccagaaccttaactttatgtacatagaagtggacaaagtgaccgaacgggagaaggtgacggttatgagcaccattaacccaacaaaagatcttttggccgatcttataggttgtcagcggttgccagaggaccaaagaaaaaaagtccatcagctgaaggacttattagatcagattctgatgcttgatccggcaaaacggatctccatcaaccaggcgctgcagcacgcatttatacaagaaaagatctag

SEQ ID NO: 142029 - DNA, 2982 bp, Artificial Sequence
  derived and/or modified sequence
atggaagacgcaaactccgagaagtccattaatgaagaaaatggcgaggtctccgaagatcaaagccagaataagcattctcgccacaagaagaaaaaacacaagcacagaagcaagcataaaaagcataaacacagttccgaggaggataaggacaaaaagcataaacataaacataaacataagaagcacaagcggaaggagattatagatgctagcgataaagagggaatgtctcccgcaaaacgcacaaagctggacgacctggctctgctggaggatcttgagaaacagcgcgctttaattaaggctgagctggacaacgagctgatggagggtaaggtgcagagcgggatgggtctcatcttgcaaggctacgaatcaggaagcgaagaggagggcgagattcacgaaaaggcacggaatgggaaccgcagttctacacgatctagctccaccaagggtaaactggaactggtggacaacaagatcacaacaaagaaaaggtctaaaagtcgaagtaaagaacgtactagacatcgaagcgataaaaagaagagtaaaggagggattgagattgtcaaagaaaaaaccactcgaagtaagtccaaggagaggaagaaatccaagtcaccttcgaagaggtcaaagagccaggaccaggctagaaaatctaaatctccgaccctccgccgtagatcacaggagaaaataggaaaagctcggtctcccaccgacgacaaagtgaagatcgaggacaaaagcaaatctaaagatcgcaaaaagtcacccattatcaacgagagccggtcaagggatagggggaagaagtcccgctctcctgttgatctccgcgggaaatccaaagatcgcagatcacgatctaaggagcgcaagtcaaagcgatcagagacagataaagaaaagaaacccataaagtctccttcgaaggacgcctccagtggcaaagaaaataggagtccatccaggcgccctgggagaagtcctaagcgtcgcagcctttcacccaaaccacgtgacaagagcaggcgatctagatctccgttgttaaacgatcgcagaagcaagcaatctaaatctccttccagaaccctcagccctggcaggcgggccaagagcaggtcacttgaaagaaagcgcagggaacctgagcggcgccgtctcagtagtccacgaacgcgccctagagacgacattctgtccaggcgagaacggtctaaagatgctagccctatcaataggtggtctcctactcgaaggagaagtcggagcccaataagacggagatcgagaagcccgctccggcggagtcgttctccaaggcggcgttctagaagcccccggagaagggacagagggagacggtcaagatctcgcttgcgtcggagaagcaggtcacgcgggggccggcggcgccgcagcaggagtaaggtcaaggaggacaaatttaagggttccctgtccgagggtatgaaggtagaacaggaatcctcctcagacgataatcttgaagactttgacgtcgaggaggaggacgaagaagcgctgattgagcaacgcaggatccaaagacaggcaatcgttcaaaagtataaatatctggccgaagacagcaatatgagcgtgcccagtgaaccctccagcccccagagctcaacacgcacaagaagcccttctcctgatgacatcctagagagggtagccgctgacgtaaaagaatacgagcgtgaaaatgtcgatacttttgaggcatcagtgaaggctaaacataatctaatgactgtcgagcagaacaatggatcctcccagaagaagctgctggctccagacatgtttaccgagagtgacgatatgttcgccgcctatttcgacagcgctagattgcgcgcagccggcatcggcaaagactttaaggagaaccccaatcttagggacaattggactgatgccgagggttattatcgcgtgaacattggggaggtcctggacaagagatataatgtctatggctatacggggcagggggtgtttagtaatgtggtgagagcgagagacaatgccagggccaaccaagaggttgcggtgaagatcattcggaacaacgagctaatgcaaaaaaccggtctcaaagagctggagtttctgaaaaagcttaatgatgccgaccctgacgataaattccactgtcttcgactgttccggcacttttaccataagcagcacctttgccttgtttttgagcctctgagtatgaatttgcgtgaggtcctgaaaaaatacggcaaggatgtgggacttcatataaaagctgttaggagctacagtcagcagctgttcctcgcactcaagctgcttaaacgctgcaatatcctgcacgcggatattaagcccgataacattctggtgaacgagagtaagaccattttgaagctttgcgattttggctcagcttcccatgtcgcggacaacgacattacaccctatctggtctcaaggttctacagagctccagagataatcatcgggaaaagctatgactacgggatcgatatgtggtccgttggctgtaccttgtacgaactgtacaccggcaagattctgttccccggcaaaactaataatcatatgttgaagttagcaatggatcttaagggtaagatgcctaacaagatgataagaaagggtgtgtttaaggatcagcacttcgaccaaaacctaaatttcatgtatatcgaggtggataaagtgaccgagcgcgaaaaggtcacagtgatgtccacaataaatcccaccaaagatcttttagcggacctcatcggatgtcaacggctgcccgaggaccaaagaaagaaagtccaccagcttaaagatcttttggatcaaattctcatgctggatcccgccaaacgcatctcaatcaatcaggctctacaacacgctttcatccaggagaagatttag

SEQ ID NO: 142030 - DNA, 3024 bp, Artificial Sequence
  derived and/or modified sequence
atggctgctgctgagacccagagcctgcgggagcagcctgagatggaggatgccaacagcgagaagagcatcaatgaagaaaatggagaggtgtctgaggaccagagccagaacaagcacagccgccacaagaagaagaagcacaagcacaggagcaagcacaagaagcacaagcacagcagcgaggaggacaaggacaagaagcacaagcacaagcacaagcacaagaagcacaagaggaaggagatcattgatgccagtgacaaggagggcatgagccctgccaagaggaccaagctggatgacctggccctgctggaggacctggagaagcagagggccctgatcaaggccgagctggacaatgagctgatggagggcaaggtgcagagcggcatgggcctcatcctgcagggctatgagagcggcagcgaggaggagggggagatccacgagaaggccagaaatggaaacagaagcagcaccaggagcagcagcaccaagggcaagctggagctggtggacaacaagatcaccaccaagaagaggagcaagagccgcagcaaggagaggaccaggcacagaagtgacaagaagaagagcaagggcggcattgaaattgtgaaggagaagaccaccaggagcaagagcaaggagaggaagaagagcaagagccccagcaagaggagcaagagccaggaccaggccaggaagagcaagagccccaccctgcggcggcgcagccaggagaagattggcaaggcccggagccccacagatgacaaggtgaagattgaggacaagagcaagagcaaggacaggaagaagagccccatcatcaatgaaagccgcagccgggaccggggcaagaagagccgcagccctgtggacctgcggggcaagagcaaggacagaagaagccgcagcaaggagaggaagagcaagagaagtgaaacagacaaggagaagaagcccatcaagagccccagcaaggatgccagcagcggcaaggagaacagaagccccagccggcggcccggccgcagccccaagaggaggagcctgagccccaagccccgggacaagagccgccgcagccgcagccccctgctgaatgaccggcgcagcaagcagagcaagagccccagcaggaccctgagccctggccggcgggccaagagccgcagcctggagaggaagagaagagagcctgagcggcggcggctgagcagccccaggacccggcccagagatgacatcctgagcagaagagagaggagcaaggatgccagccccatcaaccgctggagccccaccaggagaagaagccgcagccccatcagaagaagaagccgcagccccctgcggcgcagccgcagccccaggagaagaagccgcagcccccggcggcgggaccggggcagaagaagccgcagccggctgcggcggcgcagccgcagcagaggaggaagaagaagaagaagccgcagcaaggtgaaggaggacaagttcaagggcagcctgtctgagggcatgaaggtggagcaggagagcagcagtgatgacaacctggaggactttgatgtggaggaggaggatgaggaggccctgattgagcagaggcgcatccagaggcaggccatcgtgcagaagtacaagtacctggccgaggacagcaacatgtctgtgcccagcgagcccagcagcccccagagcagcaccaggaccaggagccccagcccagatgacatcctggagcgggtggccgcagatgtgaaggagtatgagcgggagaatgtggacacctttgaggcctctgtgaaggccaagcacaacctgatgacagtggagcagaacaacggcagcagccagaagaagctgctggccccagacatgttcacagaaagtgatgacatgtttgctgcctactttgacagcgcccggctgcgggccgccggcatcggcaaggacttcaaggagaaccccaacctgcgggacaactggacagatgctgagggctactacagagtgaacattggagaggtgctggacaagcgctacaacgtgtatggctacacaggccagggcgtcttcagcaatgtggtgcgggcccgggacaatgcccgggccaaccaggaggtggccgtgaagatcatccggaacaatgagctgatgcagaagacaggcctgaaggagctggagttcctgaagaagctgaatgatgctgaccctgatgacaagttccactgcctgcggctcttccgccacttctaccacaagcagcacctgtgcctggtgtttgagcccctgtccatgaacctgcgggaggtgctgaagaagtatggcaaggatgtgggcctgcacatcaaggctgtgcgcagctacagccagcagctgttcctggccctgaagctgctgaagcgctgcaacatcctgcacgccgacatcaagccagacaacatcctggtgaatgaaagcaagaccatcctgaagctgtgtgactttggaagtgccagccacgtggccgacaatgacatcaccccctacctggtgagccgcttctaccgggcccctgagatcatcatcggcaagagctatgactatggcatcgacatgtggagcgtgggctgcaccctgtatgagctgtacaccgggaagatcctcttccctgggaagaccaacaaccacatgctgaagctggccatggacctgaagggcaagatgcccaacaagatgatcagaaaaggagtcttcaaggaccagcactttgaccagaacctgaacttcatgtacatcgaggtggacaaggtgacagagcgggagaaggtgacagtgatgagcaccatcaaccccaccaaggacctgctggccgacctgattggctgccagaggctgcctgaggaccagaggaagaaggtgcaccagctgaaggacctgctggaccagatcctgatgctggaccctgccaagaggatcagcatcaaccaggccctgcagcacgccttcatccaggagaagatctag

SEQ ID NO: 142031 - DNA, 2982 bp, Artificial Sequence
  derived and/or modified sequence
atggaggatgccaacagcgagaagagcatcaatgaagaaaatggagaggtgtctgaggaccagagccagaacaagcacagccgccacaagaagaagaagcacaagcacaggagcaagcacaagaagcacaagcacagcagcgaggaggacaaggacaagaagcacaagcacaagcacaagcacaagaagcacaagaggaaggagatcattgatgccagtgacaaggagggcatgagccctgccaagaggaccaagctggatgacctggccctgctggaggacctggagaagcagagggccctgatcaaggccgagctggacaatgagctgatggagggcaaggtgcagagcggcatgggcctcatcctgcagggctatgagagcggcagcgaggaggagggggagatccacgagaaggccagaaatggaaacagaagcagcaccaggagcagcagcaccaagggcaagctggagctggtggacaacaagatcaccaccaagaagaggagcaagagccgcagcaaggagaggaccaggcacagaagtgacaagaagaagagcaagggcggcattgaaattgtgaaggagaagaccaccaggagcaagagcaaggagaggaagaagagcaagagccccagcaagaggagcaagagccaggaccaggccaggaagagcaagagccccaccctgcggcggcgcagccaggagaagattggcaaggcccggagccccacagatgacaaggtgaagattgaggacaagagcaagagcaaggacaggaagaagagccccatcatcaatgaaagccgcagccgggaccggggcaagaagagccgcagccctgtggacctgcggggcaagagcaaggacagaagaagccgcagcaaggagaggaagagcaagagaagtgaaacagacaaggagaagaagcccatcaagagccccagcaaggatgccagcagcggcaaggagaacagaagccccagccggcggcccggccgcagccccaagaggaggagcctgagccccaagccccgggacaagagccgccgcagccgcagccccctgctgaatgaccggcgcagcaagcagagcaagagccccagcaggaccctgagccctggccggcgggccaagagccgcagcctggagaggaagagaagagagcctgagcggcggcggctgagcagccccaggacccggcccagagatgacatcctgagcagaagagagaggagcaaggatgccagccccatcaaccgctggagccccaccaggagaagaagccgcagccccatcagaagaagaagccgcagccccctgcggcgcagccgcagccccaggagaagaagccgcagcccccggcggcgggaccggggcagaagaagccgcagccggctgcggcggcgcagccgcagcagaggaggaagaagaagaagaagccgcagcaaggtgaaggaggacaagttcaagggcagcctgtctgagggcatgaaggtggagcaggagagcagcagtgatgacaacctggaggactttgatgtggaggaggaggatgaggaggccctgattgagcagaggcgcatccagaggcaggccatcgtgcagaagtacaagtacctggccgaggacagcaacatgtctgtgcccagcgagcccagcagcccccagagcagcaccaggaccaggagccccagcccagatgacatcctggagcgggtggccgcagatgtgaaggagtatgagcgggagaatgtggacacctttgaggcctctgtgaaggccaagcacaacctgatgacagtggagcagaacaacggcagcagccagaagaagctgctggccccagacatgttcacagaaagtgatgacatgtttgctgcctactttgacagcgcccggctgcgggccgccggcatcggcaaggacttcaaggagaaccccaacctgcgggacaactggacagatgctgagggctactacagagtgaacattggagaggtgctggacaagcgctacaacgtgtatggctacacaggccagggcgtcttcagcaatgtggtgcgggcccgggacaatgcccgggccaaccaggaggtggccgtgaagatcatccggaacaatgagctgatgcagaagacaggcctgaaggagctggagttcctgaagaagctgaatgatgctgaccctgatgacaagttccactgcctgcggctcttccgccacttctaccacaagcagcacctgtgcctggtgtttgagcccctgtccatgaacctgcgggaggtgctgaagaagtatggcaaggatgtgggcctgcacatcaaggctgtgcgcagctacagccagcagctgttcctggccctgaagctgctgaagcgctgcaacatcctgcacgccgacatcaagccagacaacatcctggtgaatgaaagcaagaccatcctgaagctgtgtgactttggaagtgccagccacgtggccgacaatgacatcaccccctacctggtgagccgcttctaccgggcccctgagatcatcatcggcaagagctatgactatggcatcgacatgtggagcgtgggctgcaccctgtatgagctgtacaccgggaagatcctcttccctgggaagaccaacaaccacatgctgaagctggccatggacctgaagggcaagatgcccaacaagatgatcagaaaaggagtcttcaaggaccagcactttgaccagaacctgaacttcatgtacatcgaggtggacaaggtgacagagcgggagaaggtgacagtgatgagcaccatcaaccccaccaaggacctgctggccgacctgattggctgccagaggctgcctgaggaccagaggaagaaggtgcaccagctgaaggacctgctggaccagatcctgatgctggaccctgccaagaggatcagcatcaaccaggccctgcagcacgccttcatccaggagaagatctag

SEQ ID NO: 142032 - DNA, 3024 bp, Artificial Sequence
  derived and/or modified sequence
atggccgccgccgagacccagagcctgcgggagcagcccgagatggaggatgctaactctgagaaaagcatcaacgaagagaatggagaagttagcgaggaccaatcccagaataaacattctaggcacaagaaaaaaaagcacaagcatagaagtaagcataaaaaacacaaacactccagtgaagaggacaaggataagaagcacaagcacaaacataagcataagaaacacaaaaggaaagaaatcatcgatgcctccgataaggagggaatgtcaccggctaagagaacgaaactggatgatcttgcgctcctggaagacctggaaaagcagcgtgcccttatcaaggctgaactggataatgagctgatggagggaaaggttcaaagcggaatgggtctaatcctgcaaggatatgaatctggttctgaggaagagggggaaattcacgaaaaggccaggaacgggaatcgttcctccacgcgcagcagttccaccaagggcaagctggagctggttgacaacaagattaccacaaagaaacgatcaaaaagcaggagcaaagaaagaacacggcatcggtcagataagaaaaagtcgaaaggcggcattgagatcgttaaggagaaaacaacaagaagtaaatccaaggaacgcaaaaagtccaagtccccaagtaagcgctccaaatcacaggaccaggcacgcaaatcaaagagccctactttgagacggcgcagccaagagaagatcgggaaagcacgtagcccgacagatgacaaggtgaaaatcgaagacaaatccaagtctaaggatcggaaaaaatctccgattatcaacgaatcgcggtcgcgcgaccgcgggaagaagagtagatcgcccgtggacctgaggggcaagagcaaagacaggaggagccggagcaaggagaggaagagtaagcgctcagaaactgacaaggaaaaaaaaccaataaaaagtccatccaaagacgcctcatccgggaaagaaaatcgatctccatctcggcgccccgggcgtagtcctaagcggagatccctgagtccgaagcctagggacaaatctagaagatctcggtctccactgttaaatgatcgaagatcaaagcaatccaagagtccctctcggaccctctctcccggccgaagagctaaatcacgctctctggaaaggaagaggagagagcccgagagacggagacttagttcacccaggacacgaccccgcgacgatattctatctaggcgggagagatctaaggacgcaagcccgatcaataggtggtctccgacacgccggcgaagcagatcacctattaggagacgatctaggagccccttgcgccgttctcgtagcccccggcggcgtagcagatcaccacgaagaagggaccgcggtaggcggagccgcagccgtttgcgtaggcggtcgcgttcccggggaggccgccggaggcggtccagatctaaggtaaaggaggacaaattcaagggatccctttctgagggcatgaaggtggaacaagagtccagttccgacgataaccttgaggacttcgatgtcgaggaggaggatgaagaggcccttattgagcagcgcagaattcagcggcaggccattgtgcagaagtacaagtatctggctgaagattcaaatatgtctgtaccatctgaacccagttcccctcagtccagcacccgcaccagatctccctctccggatgacatccttgaacgtgtagccgctgatgtcaaagagtacgaaagagagaacgtagatacatttgaggctagcgtaaaagctaaacacaacctcatgaccgttgaacaaaataacgggagtagtcagaagaagctgctggcacctgacatgttcactgaaagcgatgacatgttcgcagcctactttgactctgctagattacgtgcagccggcattggcaaggacttcaaagaaaatcctaacctcagagataactggactgacgccgagggttactatcgggtcaatattggcgaggtccttgacaaacgatacaatgtctatgggtacacggggcaaggagttttctccaatgtcgtgcgcgcgcgggacaacgcacgcgcgaaccaggaggtcgctgttaaaatcatccgtaataacgagctgatgcagaagactggtcttaaagagttagagtttcttaaaaagcttaacgatgccgaccccgatgataagttccactgtttacggctgttcaggcatttctatcacaaacagcacctgtgcttggtgtttgagccattgtcaatgaacctgcgggaggtgctgaagaaatatggtaaagacgtcggacttcacataaaagcggttaggagttactcacagcagctcttcctggctttgaaacttctcaaacggtgcaacatactgcacgcagacataaaacccgataatatcctggtgaacgagtcgaaaactattctgaagttgtgcgactttgggagcgctagtcacgtcgcagacaatgatattacgccttacctggtaagccggttttacagggcacctgagataatcatcggtaagtcctatgactatggaattgatatgtggtcagttggctgtactctctacgagctctacaccggtaaaatcctctttcccggtaagactaataatcacatgcttaaattagccatggatctcaagggaaaaatgccaaataaaatgatcaggaaaggcgtgttcaaagaccagcacttcgaccagaatctgaactttatgtacattgaggtcgacaaggtaaccgaaagagagaaagtgacagtgatgagcactattaatccaactaaagatcttctggcagacttaattgggtgccaaaggttacccgaggatcagcgaaagaaagtccaccagctcaaggacttgctggatcagattttaatgctggacccagccaagcgcatctccatcaaccaggcactgcagcacgcttttatacaggagaagatttag

SEQ ID NO: 142033 - DNA, 3024 bp, Artificial Sequence
  derived and/or modified sequence
atggccgccgccgagacccagagcctgcgggagcagcccgagatggaggacgctaatagtgaaaagtcaatcaacgaggaaaacggagaggtgagtgaggaccagagccaaaacaagcacagtaggcataaaaaaaagaagcataaacataggagtaaacacaagaaacacaagcattcaagtgaagaggacaaggataagaaacataagcacaagcacaaacacaaaaagcacaagagaaaggaaataatcgacgcctccgacaaggaggggatgtcgcctgccaagaggactaaactggacgatctggcgctcctcgaggacctggaaaaacaacgagccttaatcaaggccgaactcgataacgaactgatggagggaaaggttcagtctgggatggggcttatcctgcaggggtacgagtccgggtcagaagaggagggcgagattcacgaaaaggctcggaacggcaatcggtccagcacaagaagttcatccactaaggggaaacttgagcttgtggataacaaaattaccactaagaaaaggtccaaatcacggtctaaggaaaggacccgacataggtccgacaagaagaaatcaaagggcggaatcgaaattgtgaaggaaaagaccactcggagcaagtccaaagagagaaagaaatcaaagtctccttctaaacgctcaaagtcccaggaccaagcaaggaagtcaaaatccccaactctccggaggcgctctcaagagaagattggcaaggctcggtcccctacagacgacaaagtgaagatagaggacaaatcgaaatctaaagatcgcaagaaaagtcctatcattaatgaatcccggagccgggacaggggaaaaaagagccgaagcccggtggatctccgaggtaagtccaaagaccggagaagcagatcaaaagaacgcaaaagcaaaagatccgagaccgataaggagaaaaaacccattaaaagccccagcaaagacgcctcatctggtaaagagaatcgctctccctcgcgccggccaggacggagccccaagagacggagcctgagccccaaaccccgtgacaaaagccggaggtcacgaagccctctgctcaatgatcggcgtagcaagcaatctaagtctccaagccggacactctcgcctggaaggagggctaagagtagatccttggagcggaagcgccgcgagcctgagcgaaggaggttgtcaagccctcggaccagaccacgggacgatattttaagccggcgggaaaggagcaaggacgcttctcctatcaacagatggtcaccgacaaggaggcggtcacgctccccaattaggagaaggtcccggtcaccattacggcgaagccgtagtccgcgtcgcaggtcacgctcccctcgtcgccgtgataggggccggaggtcccgcagcaggctgagacgcagatccaggtcccggggaggtagaaggcgtcggagccggtccaaggtgaaggaagacaagttcaagggatcgctctctgagggcatgaaagtcgaacaggaatctagctccgacgacaacctcgaggactttgacgtggaggaggaagacgaagaggctcttatagagcagcgtcgaatccagagacaggctatcgtgcagaaatacaagtacctcgcggaggattcaaacatgtctgttccttcagaaccctcctccccacagtcctcaactcgtactaggtctccgtctcccgatgacattcttgaacgcgttgcggcagatgtcaaggaatatgagcgagagaacgttgatacattcgaggcaagtgttaaggcaaaacacaatctgatgactgttgagcagaacaatgggagcagccagaaaaaactactcgctcccgacatgttcactgaatctgatgatatgttcgcagcgtacttcgatagcgcaaggctcagggctgctggaatcggtaaggattttaaagagaaccctaatctcagggacaactggaccgatgctgagggttactatagggtgaacatcggggaggtgctggacaaaaggtacaacgtatacggctacacaggtcagggcgtctttagtaacgtagtacgagcaagagataacgctagggccaaccaggaggtcgcggtgaaaatcatcagaaataatgagctaatgcagaagaccggtctgaaagaacttgagtttctcaagaaattgaacgatgccgaccccgacgacaaattccattgtctgcggctgtttaggcacttttaccacaagcaacatctctgtctggtcttcgagcccctgtcaatgaacttacgggaggtgctgaaaaaatacggcaaggatgttggcttgcatatcaaagccgtgcggtcgtatagccaacagttgttcttggctctgaagctgctgaagagatgtaatattctacatgctgatatcaagccagacaacatacttgtgaacgagtccaaaacaatcctgaaactgtgcgatttcgggtctgcttcacatgtggccgataacgatattactccctatctcgtttctaggttctaccgagccccagagatcatcattggaaagtcatatgattatggcattgacatgtggagcgtcggctgcactctctatgaattgtatacaggtaaaattttgttccctgggaagactaacaatcacatgttgaaactcgccatggacctcaaagggaagatgccaaataagatgatcaggaagggggtttttaaggatcagcacttcgaccaaaatctgaacttcatgtacatagaggtagacaaggtgactgaacgcgaaaaggtgaccgtaatgtccactatcaaccctacaaaagacctgctcgccgatctgatcggctgtcaacggctcccagaggaccaacgcaagaaggtccatcagctcaaggatctgttggatcagatcctcatgctggacccagccaaacgcattagcatcaatcaagcactgcagcacgcttttatccaagagaaaatttag

SEQ ID NO: 142034 - DNA, 2982 bp, Artificial Sequence
  derived and/or modified sequence
atggaggacgccaacagcgagaagagcatcaacgaggagaacggcgaagtgtcagaggatcagtcccagaataagcacagtcgccacaaaaagaagaaacataagcaccgcagcaagcataagaagcacaaacacagttccgaagaagataaggacaagaagcataaacacaagcacaagcacaaaaaacacaaaaggaaggagattattgatgcatccgacaaagaaggcatgtcaccggctaaacgaactaagttggacgacctcgcattacttgaggacctggaaaagcagagggcactgattaaagctgagctcgataatgaattgatggaaggtaaagtgcagtctggcatggggctgatccttcaaggctacgagtcaggctccgaagaggaaggggaaatacatgagaaggcccggaacggcaataggagcagcacccgcagctcttcaacaaagggtaagctggagcttgtggataacaagatcacaacaaagaagaggtccaagtcccgttctaaagagagaacccgacacaggagcgacaaaaagaagagtaagggcggtattgaaattgtaaaggaaaagactactagatctaaaagtaaagagaggaagaaatcgaagtccccaagtaagcggagtaaaagccaagaccaggcacggaaatctaagtcccccactttgcgtaggcgatcacaggaaaagatcggaaaggcccggagtccaacagacgataaagtcaagatcgaggacaaatcgaaatcaaaggacagaaagaaaagccccataattaatgaatcaagatccagagacagaggcaagaaaagcagatctcccgtagacttaagaggaaagagcaaagatagacgatcccggtccaaagagcgaaagtccaagagatctgagactgataaggagaagaagcctatcaagtcaccctctaaggacgcctcttccggtaaagaaaacaggtccccttccagaaggcccggccggtcaccaaaaaggcggagcctctcgccaaaaccgcgagacaagtctcgacgcagccgatcacccctgctcaatgataggcgctccaagcagagcaaatctccttcaaggaccctgagccccggccgtcgcgcaaagtctcgctctcttgagcggaaacgccgtgagcctgagaggcgccgcctatcctcaccgcgtactcgccctcgtgatgatattttgtctagaagggaaagaagtaaggatgcgagcccaattaaccgctggtccccaacccggaggcggtctagaagtcctatccggagacgttctcggtcacccctacgccggtccaggtcacccagaaggcgtagtaggtctcctcgcagacgcgacagaggccgtagaagtcggagccgtctccggcggcggtctcgatcgagaggaggaagacgcaggcggtcacgatccaaggtcaaggaagacaagtttaagggaagcctaagtgaggggatgaaggtggagcaggagtcatctagtgacgataatctggaggatttcgacgtggaggaagaagacgaggaagcccttatcgagcaaaggagaattcaacgccaggccatagtacagaagtacaaatatctggccgaggactctaatatgtcagtgccaagcgagccttcatcaccgcagtcatccacccgaacccgatctcctagtccagacgacatcctggagcgtgtggccgccgacgtgaaagagtacgaacgggaaaatgtcgacacatttgaagcttctgtaaaggctaagcataacctcatgaccgtggaacaaaacaatggctccagccagaaaaagttgttggcacctgatatgtttacagagagcgacgacatgttcgctgcctatttcgatagcgcccgcttgagggccgcaggcatcggtaaggactttaaggagaatccaaacctccgggacaactggaccgacgccgaaggctactaccgcgtaaacattggcgaagttctggacaaacgttacaatgtctatggctacacagggcaaggggtttttagcaacgtggtccgagcgagggataatgctcgagctaatcaagaggtggccgtcaaaataattaggaacaatgagcttatgcagaaaaccggcctgaaggagttggaattcctaaaaaaacttaacgatgccgatcccgatgataaatttcactgtctaagattgttcagacacttctaccacaaacagcacctgtgtctggtgtttgaaccactctctatgaacctgcgggaggtcctgaagaaatacggaaaggacgttggcctgcatattaaagccgtcagaagctatagccagcaattattcctcgccctgaagctccttaagcgttgtaacattttacatgccgacatcaagccagataacatcctggtgaacgagagtaaaactatcctgaaactatgtgattttgggagcgctagccacgtggccgacaatgatatcactccatatttagttagcaggttctacagagccccggaaatcataattggaaaaagctatgactacggcatcgacatgtggtcagtcggctgtaccctgtacgaactgtatactggaaaaattctgtttcccggaaaaactaataatcatatgctgaagttggctatggacctgaaaggcaagatgcctaataagatgataaggaagggggttttcaaggaccaacattttgatcaaaacctgaatttcatgtatattgaagtggataaggtgaccgagagggagaaagtgaccgtcatgtcaaccataaatccgacaaaggacctgctcgccgatttgatagggtgtcaacgtctccctgaagaccagaggaagaaggtgcatcaacttaaggatctgctcgaccagattctgatgcttgatcccgctaagagaatttccatcaatcaagcgctccagcacgcattcatccaggagaagatctag

SEQ ID NO: 142035 - DNA, 3024 bp, Artificial Sequence
  derived and/or modified sequence
atggcagctgcggagactcagtctctacgcgaacaacctgaaatggaggatgctaactctgagaagtccattaatgaggagaatggcgaagtttccgaagaccagagtcagaataagcattccaggcataaaaaaaaaaagcataaacacagatccaagcataagaagcataagcattcatcagaggaagataaggacaaaaaacataaacacaagcacaagcataagaagcacaagagaaaagagattatcgatgcatccgacaaagaaggaatgtcacccgctaaacggacaaagctggatgatctggccctactggaggacctggaaaagcagcgtgctcttattaaggccgagctggacaatgaactgatggagggaaaggtgcagagtggcatgggtctgatcctgcagggctacgagagtgggtctgaggaagaaggcgagattcacgagaaggcacgtaatgggaatagatcaagcacaaggagcagctcgacaaaggggaagctggagctggtggataacaagatcacaactaaaaagcgtagcaaatctcgaagcaaggaaaggactcggcaccgcagtgacaagaagaaaagcaagggcggtattgagatcgtcaaagaaaaaacaacccgctcgaagagtaaagaaaggaagaaaagcaaatccccatccaagagatcgaagtctcaggaccaggccagaaaatctaaatcccccacgctgaggcggcgttcccaggagaaaatcggtaaagccagatctcctactgatgacaaggtcaaaatagaggataagagcaagtctaaagaccgcaaaaaaagtccaattatcaatgaaagtaggagcagagaccggggtaagaagtcccggagccccgtggatttgcggggtaaaagtaaagaccggaggtctcgaagtaaagaacgcaaaagtaagcggagcgaaactgataaggaaaaaaagcctatcaagagcccatcaaaagatgcctccagtggaaaagagaatcgatccccttctagacgccctggcagatctcccaaacgccgatctttgtcaccaaaacctagagacaagtcccgtaggtcaaggagtcccctgttgaatgacaggcggtctaagcaaagcaagtctcccagccgcaccttaagccccggacggagagctaagtcacggagtttggagcgaaagagacgggagcccgaacggaggagactctcttcacctaggacccgtccccgagatgatatcttgtccagacgagagaggtccaaggacgcttcacctatcaacaggtggtccccgactcgcagacggtctaggtcacccatccggaggagaagtcggtcacccctgcggagatctcggagccctaggagaaggtccagatccccacgccgacgagataggggtagaaggtcacgctcccggcttcggaggcgctctcgatcaagaggaggacgccgtcggagatcccgatcaaaagtgaaggaggacaagttcaagggtagcctgtccgaaggcatgaaggtggagcaggaatccagttctgatgacaacctcgaagattttgatgtagaagaggaggacgaggaggccttgatcgagcaaaggagaatccagcgccaagccattgtacaaaagtataagtacctggccgaagattctaatatgtcagtacctagcgagccctcctccccacaaagctcgacacggacccggagtccatctccggacgatatcctggagagggtcgctgcagatgttaaggagtatgaacgcgagaacgtggacacctttgaggcttccgttaaagccaaacataaccttatgactgtggaacagaataacgggagttcacaaaagaagctcctggcgccagatatgtttactgagagcgatgatatgttcgccgcatattttgatagtgcgagactgcgggctgctggcatcggaaaggacttcaaagagaatcctaacctaagagataactggacagatgctgagggatactacagagtcaatatcggggaggtcctggataaacgctataatgtctacggctataccggccagggcgtgttcagcaacgtggtgcgggcacgagacaacgctcgcgcaaatcaggaggttgcggtgaaaatcatccgcaataatgagctgatgcagaaaacaggccttaaagagcttgagttcctgaaaaagctgaacgacgccgacccagatgacaaatttcactgcctccggctgtttaggcacttctaccataagcagcacctgtgtttagtgtttgaaccactttcgatgaatctgcgcgaggttctaaaaaaatatggaaaggacgtgggtctacacatcaaggccgttcgaagctattcccagcagttgttcctggcactgaagctgttaaagcggtgtaatatccttcacgcggacatcaagcccgacaacatactggttaatgaaagcaagacaatcctgaaactgtgcgatttcgggtctgcttcccatgtagcagataatgatatcaccccgtatctcgtttcgcggttctatcgagcgccagaaatcattatcggtaaaagctacgactacgggattgacatgtggagcgtggggtgtaccctctacgaactgtacaccggcaaaatattattccctgggaagactaataaccatatgcttaaattggccatggacctcaaggggaaaatgcccaataagatgatcaggaagggggtcttcaaggaccagcacttcgaccaaaacttgaatttcatgtatattgaggtcgataaagtaaccgagcgcgagaaggtcaccgtcatgagtaccatcaacccaacaaaggacctgcttgctgaccttatcgggtgtcagcgcctcccggaagatcagaggaaaaaagtgcaccagctcaaagacctattggaccaaattctgatgttagaccccgcaaagcgaatatctatcaatcaggcccttcagcacgcctttatacaggagaaaatatag

SEQ ID NO: 142036 - DNA, 3024 bp, Artificial Sequence
  derived and/or modified sequence
atggccgcagccgagacccagagcttgcgggagcagcccgaaatggaagacgccaattcagagaagtcaattaacgaagaaaatggcgaagtgtctgaagaccagtcgcaaaacaagcattccaggcacaaaaagaaaaaacacaagcatcgtagtaaacacaagaagcataagcattctagcgaggaagataaagataaaaagcataaacacaagcacaagcacaagaagcacaaacggaaagagatcatcgatgcatccgacaaagaaggcatgtcacccgctaagagaactaagctggacgatctggccctgctcgaggatttggaaaaacagagggcactgattaaagccgagctggataatgagctgatggagggaaaggtccagtccggaatggggctgattctacaggggtacgaatctgggtctgaagaggagggagagattcacgagaaagctcggaatgggaaccggagttccactaggagctcttccaccaagggaaagcttgaattagttgacaataagataaccacgaagaagcgaagcaaatccagaagtaaagaacggactcggcaccgcagtgacaagaagaaatctaaaggaggcattgaaatagtcaaagagaagacaacacgatccaagagcaaagagaggaagaagagtaagtccccctcaaagagaagcaagagtcaggaccaggcgcgtaaaagcaagagtccgaccctgcggagacgttcccaagaaaagatcgggaaggccaggagccctactgatgataaggtgaagattgaagataagagtaagagtaaggacaggaaaaagtcccccataattaatgagtcccggtcccgcgaccgcggtaagaaaagccgttctcccgttgacctgcgcggtaaaagtaaggatagaaggtcgaggtctaaagaacgaaaatcaaaacgttctgaaaccgataaagagaagaaacctatcaaatcacctagcaaggatgctagcagtgggaaggaaaatcggtctccttccagaaggccaggaagatctccgaagagaagaagcctgagccctaaacccagggacaaaagtagaaggagccggtccccactgcttaacgatagacgttcaaagcagtccaagtctccttccagaacgctgtccccgggaaggagagcaaagagcaggtcccttgaaagaaaacgaagggaaccggaacgcaggcggctgagcagtcctcggacacgtcccagggacgacattttgtctcggagagaacggagcaaagatgcttcccccattaaccggtggagtcctacccgccgtcgaagcagaagcccgatcaggcgccgatcacgatcccctcttcgaagatcaaggagtccacggaggaggagccgatctcccagacgaagagacaggggaagacgaagccgatccagattaaggagacggtcaagatcccgcggtggcagacggcgtagaagcagatcaaaggtgaaggaggataagtttaaaggaagcttgtctgaggggatgaaagttgagcaagaaagctctagtgacgacaatttggaggattttgacgtggaggaggaggatgaggaagctctgatcgagcagcgccgtatccagcgccaggctatagtccagaagtacaagtacctcgccgaagactccaacatgagcgttccctcagagccaagtagcccccagtcatcaacaaggaccagaagtccctctcccgacgacattcttgaaagggtggcagctgacgtgaaggaatacgagagagaaaatgtggacacctttgaggcatcggtgaaggcgaaacataatctgatgacagtggagcaaaacaacgggagttcacagaaaaagctgctcgcaccggacatgttcaccgaatctgacgacatgtttgccgcttacttcgacagcgctagactacgggcagccggtattgggaaggactttaaggaaaatcctaatttgcgcgataattggaccgatgcagaaggatactatcgagtaaacatcggagaggtgcttgataagcggtataacgtgtacgggtacacgggacaaggcgtgttttcgaacgtggtcagggcccgtgacaacgcaagggctaatcaagaggtcgccgtcaaaattattagaaacaacgaacttatgcagaagacggggttgaaggaattggaattcctaaaaaagttgaacgacgcagatccagacgataaattccactgtttgcggttgttcaggcatttctatcacaagcagcatctgtgtctggtatttgagcccctcagcatgaatctccgggaagtgctgaagaaatatgggaaggacgtcggcttgcacattaaggctgttagatcttactctcagcagctctttctggccctgaagctgctgaagagatgcaacatcctgcatgcagacataaagccagataatatcctcgtcaacgaatcgaagactatcctcaagctgtgcgacttcggcagcgcttcgcatgtggctgataacgatatcacgccctacctggtgagccggttttatagggcccctgagatcattatcggtaagtcgtacgattatggcatcgatatgtggtctgtgggctgtactctgtacgaactgtacaccggaaagatcctgtttcctggtaaaacaaataaccacatgctgaaacttgctatggacctgaaggggaagatgccaaacaaaatgatccgcaaaggggtgtttaaggatcagcactttgatcagaatctaaatttcatgtatatcgaggttgataaggtgacagagagagaaaaagtgacagtcatgtctacgatcaatccaactaaggacctcctggccgaccttatcgggtgtcaaaggcttccagaggaccagcgcaagaaagtgcaccagctgaaggatctgctggatcagatcctgatgctcgatcctgccaaaagaatctccattaaccaggccctgcagcacgccttcatccaggagaaaatctag

SEQ ID NO: 142037 - DNA, 2982 bp, Artificial Sequence
  derived and/or modified sequence
atggaagatgcaaatagcgaaaagagcattaacgaggaaaacggtgaggtgagtgaagaccaatctcagaacaaacacagtaggcacaagaagaaaaagcacaagcatagatcgaaacataaaaaacacaagcattcgagtgaggaggacaaagacaagaaacataagcacaagcacaagcataagaagcacaaaaggaaagagattatcgacgcttcagataaggaaggaatgtcacctgccaagcgaaccaagctggatgatctagcactgcttgaagatctcgaaaagcagagagccttaataaaagccgagctcgacaatgaactgatggaggggaaagttcaaagcggcatgggacttatccttcaaggctatgagtccggtagcgaagaagaaggggagatccacgaaaaagctaggaatggcaatcggagtagcacccgcagttcttcaacgaagggaaaactcgagctggtcgataacaagatcacgacaaaaaagcgttcgaagagtagaagcaaagagcggacaagacataggagcgacaaaaagaaatcgaaaggtgggatcgaaatcgtcaaagagaagaccactcgcagcaagtcaaaagagcgcaaaaaatctaagtcacctagtaaaagatctaaatcccaggatcaggctagaaaatccaagtccccaaccttaaggagacggtcacaggaaaagataggcaaagccagatcccctaccgacgacaaggtgaagatcgaagacaagtcaaaatctaaggaccgaaagaaaagcccaatcataaacgagagtcgctcacgggaccggggaaagaaaagcagaagccctgtggatctgcgaggcaagagtaaagatcgcaggagcaggtccaaggagcggaaatcaaaacgtagcgagactgacaaagaaaaaaagccgataaagagcccttccaaagacgcaagctcagggaaagaaaaccgatccccttcccggagaccaggacggagccccaagcgcaggagcctcagtcctaagcccagagacaagtcacgccgaagccggtctccgctgcttaacgatagaaggagcaagcaatctaagagtccgtcacgtactctgtcccctggccgaagggccaaatcacggtctcttgaaagaaaacgacgggaacccgaacgacgcagactgtccagcccccgtactcggccacgggatgatattctctcgcggcgtgagcgcagcaaggacgccagcccaatcaaccggtggtcccccactcgacgccgtagtagatcccccattcggaggcgctctaggtcaccactccggaggtcccggtcccccagaagacgctctcgcagccctcggcgacgcgatcggggtcgaaggtcacgatcaaggcttcgcaggcgttctcgatcccggggaggtcgcaggcggagatcacgatcgaaggtaaaagaagacaagttcaagggctcattgtcagaaggtatgaaagtggagcaagaatcctccagtgacgataacctggaggactttgacgtggaggaggaagatgaggaagcactgatcgaacaacgtcgtattcaacggcaggcaatagtgcagaagtacaaatatctcgcagaggattccaatatgagtgtcccatctgagccaagctcaccacagtcgagtacacggaccagatctccaagtcctgacgatatccttgaaagggtcgctgcagacgtgaaggaatacgaaagagagaacgtggacacctttgaggctagcgtgaaagctaaacacaatctgatgaccgttgaacaaaataatggctcctcccagaaaaagctgctcgctcccgacatgttcaccgaatcagatgatatgttcgctgcttactttgactccgccagattgagagccgcaggtattggtaaggacttcaaggaaaaccccaaccttcgcgataactggaccgatgctgagggttactaccgggttaacattggcgaagtcctcgacaagcgttataacgtgtacgggtacacagggcagggagtcttttcaaacgtggtaagagccagggataatgccagagctaaccaagaggtggctgttaaaataattagaaacaacgagttaatgcagaaaactggcttaaaggagctggagttcctgaagaagctgaacgatgccgatcccgacgataaattccactgccttcgcctatttaggcacttttatcacaaacagcatctgtgcttagtgtttgaacccctgagcatgaatctacgagaggtgctgaagaagtacggtaaggacgttggcctgcacattaaagctgttcgtagctattctcagcaattgtttctcgccctcaagctgctaaagcggtgtaatattttgcacgctgacatcaaacctgataacatcttggtaaatgagagcaaaaccatactgaaactctgcgacttcggtagtgcctcacacgtggccgataatgatattacaccctatttagtctctcggttctatagagccccagaaatcatcatcgggaaaagctacgactacggaattgatatgtggtctgttggatgtactttgtatgagctttatacaggcaaaattctcttccctggaaaaaccaataatcatatgcttaagcttgccatggatttgaagggcaaaatgcccaacaagatgattagaaaaggagtctttaaagaccagcacttcgaccagaacttaaatttcatgtatatcgaagtggacaaagttaccgagagggaaaaagttacagtcatgtcaaccattaaccctacaaaagaccttttggcggacctcatcggatgccagcggcttcctgaggatcaacggaaaaaggtgcaccaactgaaggacctgctggaccagatcctgatgctggaccccgctaaaagaattagcatcaaccaggcactccagcacgcatttattcaggagaagatttag

SEQ ID NO: 142038 - DNA, 4415 bp, Artificial Sequence
  derived and/or modified sequence
ggcacatgcgcggcagctcttttccttcttcctccacttcccctaccctccaccgtccgggagccgccgccaccgccgccgaggagtcaggaagttcaagatggccgccgcggagacccagtcgctacgggagcagccagagatggaagatgctaattctgaaaagagtataaatgaagaaaatggagaagtatcagaagaccagtctcaaaataagcacagtcgtcacaaaaaaaagaagcataaacacagaagtaaacataagaaacataaacattcctcagaagaagacaaggataaaaaacataaacataagcataaacataagaaacacaaaagaaaagagattattgatgcttctgataaagagggtatgtctccagcaaaaagaactaaacttgatgatttagctttgctagaagacttggaaaaacagagagccttgattaaggccgaacttgataatgagttaatggaaggaaaggtccagtctggtatggggctcattttgcaaggttatgagtctggctctgaagaagagggggaaattcatgaaaaggcaagaaatggaaataggtctagtactagatcttcaagtacaaaggggaaacttgaacttgtggacaataaaattactacaaagaaacgaagtaaaagcagatccaaagaacggactagacataggtctgataaaaagaaaagtaaggggggtattgaaatcgttaaagagaaaacaactaggagcaagtcaaaggagaggaaaaaatctaaaagcccatccaaaagaagtaagtctcaagatcaagcaaggaaatcaaaatcccctacccttagaaggcgatctcaagagaaaattggtaaggccagatctcctactgatgataaggttaaaattgaagataaaagtaaatcaaaagataggaaaaaatccccaattataaatgaaagtagaagtcgcgatcgaggtaaaaaatccagatccccagttgatttaagaggtaaatccaaagacagaaggtcacggtccaaagagagaaaatcaaaacggtctgaaactgataaagaaaagaagccaattaaatctccctctaaagatgcttcatctgggaaagaaaataggtcacccagcagaagacctggtcgtagtcctaaaagaagaagtttgtctccaaaaccacgtgataaatcaagaagaagcaggtctccacttttgaatgatagaagatctaagcagagcaaatccccctcgcggacactgtctcctgggagaagagccaagagccgatccttagaaagaaaacgacgagaaccagagaggagacgactttcttctccaagaacacgacctcgagatgatatcctcagtagacgtgaaagatcaaaagatgccagccccatcaatagatggtctccaacccgaagaagaagtagatctcccattagaaggaggtctcgttccccactcagacgtagcaggtctccaagaagaagaagcagatctcctcggagaagggacagaggtcggaggagcagatcacgcttgcgaaggcggtctcgatcacgcggtggtcgtagacgaaggagcagaagcaaagtaaaggaagataaatttaaaggaagtctttctgaaggaatgaaagttgagcaggaatcttcgtctgatgataaccttgaagactttgatgtagaggaagaagatgaagaagccctaatagaacagagaagaatccaaaggcaggcaattgttcagaaatataaataccttgctgaagatagcaacatgtctgtgccatctgaaccaagcagcccccagagcagtacgagaacacgatcaccatctccagatgacattctggagcgagtagctgctgatgttaaagagtatgaacgggaaaatgttgatacatttgaggcctcagtgaaagccaagcataatctaatgacagttgaacagaataatggttcatctcagaagaagttgttggcacctgatatgtttacagaatctgatgatatgtttgctgcgtattttgatagtgctcgtcttcgggccgctggcattggaaaagatttcaaagagaatcccaacctcagagataactggaccgatgcagaaggctattatcgtgtgaacataggtgaagtcctagataaacgttacaatgtgtatggctacactgggcaaggtgtattcagtaatgttgtacgagccagagataatgcaagagccaaccaagaagtggctgtaaagatcatcagaaacaatgagctcatgcaaaagactggtttaaaagaattagagttcttgaaaaaacttaatgatgctgatcctgatgacaaatttcattgtctgagactcttcaggcacttctatcacaagcagcatctttgtctggtattcgagcctctcagcatgaacttacgagaggtgttaaaaaaatatggtaaagatgttggtcttcatattaaagctgtaagatcctatagtcagcagttgttcctggcattgaaactccttaaaagatgcaatatcctacatgcagatatcaagccagacaatatcctggttaatgaatccaaaactattttaaagctttgcgattttgggtcggcttcacatgttgcggataatgacataacaccttatcttgtcagtagattttatcgtgctcctgaaatcattataggtaaaagctatgactatggtatagatatgtggtctgtaggttgcaccttatacgaactctatactggaaaaattttattccctggcaaaaccaataaccatatgctgaagcttgcaatggatctcaaaggaaagatgccaaataagatgattcgaaaaggtgtgttcaaagatcagcattttgatcaaaatctcaacttcatgtacatagaagttgataaagtaacagagagggagaaagttactgttatgagcaccattaatccaactaaggacctgttggctgacttgattgggtgccagagacttcctgaagaccaacgtaagaaagtacaccagctaaaggacttgttggaccagattctgatgttggacccagctaaacgaattagcatcaaccaggccctacagcacgccttcatccaggaaaaaatttaaacaagatgaagaaactccaagggtttgagtaaatacaaagactgaagaaatttcacagcagtttattaatgtatataaacttataaatatttctccagcaaatttgaggaagcatgatatatttgaattaacaccaagggtgatatttcttttagagatgttagttaatctgttttgtgtcttacgtgaaatttcactgtagactgttttaaattgccaagactgcacaaaattacagtgctaatgtatatggttgcagttcacataaagacaaaagcatctgttatgaaatgagtagtaatattgggtggttgatttgttcttagcagacttggcttcattttggtcttgagataaaatggccagcataaatgctgtttatattcacgttttcctaggtgtgtgtgtgcaggccacagcagcatgcccttggtgtagtcagtgccgaaaggggtctgttccttcttgagcctgcctgcagggatggtctccttttaaagcaggttgtgtgcagcattcagtacactgaaggtaagctaaaccatcaacatctctggtgttttaagatgttattttattggaacaactgacaaatgagggatgttagctttgtggcagaattccctgcatgtgtgataactgatcttgttttattttttggcattgcaactgtggcatagttacaatttctgtttgttcatcacatttaaaattggaagagaacgcgcttgatggatagagcgccttcagtgtactgtttcttattaactttactttttttaaatcaacttgctatagactttatatacattttgttaaatatagttcctagtgacatagaaacgatgcgtagttttcatttactaattacaaatgttgaggcctaattctgaaagtcctcatatttaaaggctagacaacgtaatgaaatttttaactatttgtatgtcattttgaaagtgtactgctttatggtaaaagtgtttttcatttgttcattgttttcattatttgtgatcatgttgtctttcaatacaggcataaaccttccactcttgaacaaagcagctgctttttaaaagcggtaattgcttctttaccttttatttcttttgtaaatgaagcttttctttaagaatgtgactttaaagtgttgtctattgcataaaacagttgacactcacttattgtaaagtgaagattgttctactgcatgtgaagtggaccatgcagatttctgtatgttctcagtatgcatcactagataataaagtcttttgtgaacaaggca

SEQ ID NO: 142039 - DNA, 6775 bp, Artificial Sequence
  derived and/or modified sequence
ggggttttatatccggattcttagcgcggactcagaacccagctcttccctacacggtcggcacatgcgcggcagctcttttccttcttcctccacttcccctaccctccaccgtccgggagccgccgccaccgccgccgaggagtcaggaagttcaagatggccgccgcggagacccagtcgctacgggagcagccagagatggaagatgctaattctgaaaagagtataaatgaagaaaatggagaagtatcagaagaccagtctcaaaataagcacagtcgtcacaaaaaaaagaagcataaacacagaagtaaacataagaaacataaacattcctcagaagaagacaaggataaaaaacataaacataagcataaacataagaaacacaaaagaaaagagattattgatgcttctgataaagagggtatgtctccagcaaaaagaactaaacttgatgatttagctttgctagaagacttggaaaaacagagagccttgattaaggccgaacttgataatgagttaatggaaggaaaggtccagtctggtatggggctcattttgcaaggttatgagtctggctctgaagaagagggggaaattcatgaaaaggcaagaaatggaaataggtctagtactagatcttcaagtacaaaggggaaacttgaacttgtggacaataaaattactacaaagaaacgaagtaaaagcagatccaaagaacggactagacataggtctgataaaaagaaaagtaaggggggtattgaaatcgttaaagagaaaacaactaggagcaagtcaaaggagaggaaaaaatctaaaagcccatccaaaagaagtaagtctcaagatcaagcaaggaaatcaaaatcccctacccttagaaggcgatctcaagagaaaattggtaaggccagatctcctactgatgataaggttaaaattgaagataaaagtaaatcaaaagataggaaaaaatccccaattataaatgaaagtagaagtcgcgatcgaggtaaaaaatccagatccccagttgatttaagaggtaaatccaaagacagaaggtcacggtccaaagagagaaaatcaaaacggtctgaaactgataaagaaaagaagccaattaaatctccctctaaagatgcttcatctgggaaagaaaataggtcacccagcagaagacctggtcgtagtcctaaaagaagaagtttgtctccaaaaccacgtgataaatcaagaagaagcaggtctccacttttgaatgatagaagatctaagcagagcaaatccccctcgcggacactgtctcctgggagaagagccaagagccgatccttagaaagaaaacgacgagaaccagagaggagacgactttcttctccaagaacacgacctcgagatgatatcctcagtagacgtgaaagatcaaaagatgccagccccatcaatagatggtctccaacccgaagaagaagtagatctcccattagaaggaggtctcgttccccactcagacgtagcaggtctccaagaagaagaagcagatctcctcggagaagggacagaggtcggaggagcagatcacgcttgcgaaggcggtctcgatcacgcggtggtcgtagacgaaggagcagaagcaaagtaaaggaagataaatttaaaggaagtctttctgaaggaatgaaagttgagcaggaatcttcgtctgatgataaccttgaagactttgatgtagaggaagaagatgaagaagccctaatagaacagagaagaatccaaaggcaggcaattgttcagaaatataaataccttgctgaagatagcaacatgtctgtgccatctgaaccaagcagcccccagagcagtacgagaacacgatcaccatctccagatgacattctggagcgagtagctgctgatgttaaagagtatgaacgggaaaatgttgatacatttgaggcctcagtgaaagccaagcataatctaatgacagttgaacagaataatggttcatctcagaagaagttgttggcacctgatatgtttacagaatctgatgatatgtttgctgcgtattttgatagtgctcgtcttcgggccgctggcattggaaaagatttcaaagagaatcccaacctcagagataactggaccgatgcagaaggctattatcgtgtgaacataggtgaagtcctagataaacgttacaatgtgtatggctacactgggcaaggtgtattcagtaatgttgtacgagccagagataatgcaagagccaaccaagaagtggctgtaaagatcatcagaaacaatgagctcatgcaaaagactggtttaaaagaattagagttcttgaaaaaacttaatgatgctgatcctgatgacaaatttcattgtctgagactcttcaggcacttctatcacaagcagcatctttgtctggtattcgagcctctcagcatgaacttacgagaggtgttaaaaaaatatggtaaagatgttggtcttcatattaaagctgtaagatcctatagtcagcagttgttcctggcattgaaactccttaaaagatgcaatatcctacatgcagatatcaagccagacaatatcctggttaatgaatccaaaactattttaaagctttgcgattttgggtcggcttcacatgttgcggataatgacataacaccttatcttgtcagtagattttatcgtgctcctgaaatcattataggtaaaagctatgactatggtatagatatgtggtctgtaggttgcaccttatacgaactctatactggaaaaattttattccctggcaaaaccaataaccatatgctgaagcttgcaatggatctcaaaggaaagatgccaaataagatgattcgaaaaggtgtgttcaaagatcagcattttgatcaaaatctcaacttcatgtacatagaagttgataaagtaacagagagggagaaagttactgttatgagcaccattaatccaactaaggacctgttggctgacttgattgggtgccagagacttcctgaagaccaacgtaagaaagtacaccagctaaaggacttgttggaccagattctgatgttggacccagctaaacgaattagcatcaaccaggccctacagcacgccttcatccaggaaaaaatttaaacaagatgaagaaactccaagggtttgagtaaatacaaagactgaagaaatttcacagcagtttattaatgtatataaacttataaatatttctccagcaaatttgaggaagcatgatatatttgaattaacaccaagggtgatatttcttttagagatgttagttaatctgttttgtgtcttacgtgaaatttcactgtagactgttttaaattgccaagactgcacaaaattacagtgctaatgtatatggttgcagttcacataaagacaaaagcatctgttatgaaatgagtagtaatattgggtggttgatttgttcttagcagacttggcttcattttggtcttgagataaaatggccagcataaatgctgtttatattcacgttttcctaggtgtgtgtgtgcaggccacagcagcatgcccttggtgtagtcagtgccgaaaggggtctgttccttcttgagcctgcctgcagggatggtctccttttaaagcaggttgtgtgcagcattcagtacactgaaggtaagctaaaccatcaacatctctggtgttttaagatgttattttattggaacaactgacaaatgagggatgttagctttgtggcagaattccctgcatgtgtgataactgatcttgttttattttttggcattgcaactgtggcatagttacaatttctgtttgttcatcacatttaaaattggaagagaacgcgcttgatggatagagcgccttcagtgtactgtttcttattaactttactttttttaaatcaacttgctatagactttatatacattttgttaaatatagttcctagtgacatagaaacgatgcgtagttttcatttactaattacaaatgttgaggcctaattctgaaagtcctcatatttaaaggctagacaacgtaatgaaatttttaactatttgtatgtcattttgaaagtgtactgctttatggtaaaagtgtttttcatttgttcattgttttcattatttgtgatcatgttgtctttcaatacaggcataaaccttccactcttgaacaaagcagctgctttttaaaagcggtaattgcttctttaccttttatttcttttgtaaatgaagcttttctttaagaatgtgactttaaagtgttgtctattgcataaaacagttgacactcacttattgtaaagtgaagattgttctactgcatgtgaagtggaccatgcagatttctgtatgttctcagtatgcatcactagataataaagtcttttgtgaacaaggcatttgtagccatttttaaaagtttttgtcttcagtgctggtaagtcaggtaaaccataaatagttaaaagcaaccttttgtttttttcctgaaagtttttaattgaaagtattattagttaaagatgtaaacctagccaaaattaccagtttattaataattaggatcctaattatttcaaaaaatcctacaaatattgtcagctttcagtgtagtgagattattcctgtaggttatggggtataattcaggatttaactaatgtttctgctattttctcacttttccttttgatggtgcggaaagagaaaaaggaaaacggggcacaggccattcgacgccttctccaaggggtctgatttgctgagacaccagcttcaccttcttaacaaggtgcagctcagtggaagatgatgacaaccagaagacatgagctaaggtttctgtcctataaaagatttattaaaaaacaatccttcatttattttttgtctaattttttagttttcagcattatgatttgggttttattggtgtttggtatttagaattagtgctgttgtggagtgcgtctgtaaagtgcttgttttatcatacttcctgcctctcccctcccccagtttctcctcccctaaaataaaaatagtggtcaactttagtaatataaaaggctgctggatgctgagattccacataacacatggttgtcaaaattggatgttaaggattcttagaaaaacagcaaccaccagaatagcatatatctgaaagtagtcttcagctttaggcagatgcaaaagaatacaaactggaatattaagaatactgttcaactcctttagtatctgttccccaacttaccctgtagaaacctcgttattaaccagtgttccagtcttaaagtagacaaaatattcagagccattttttttaagggaaatgaaaaagatactctgggttttttatactccccaatttagcatatctagactacctatttgaaaggaaccctatcaactgtcttatgtacgttacatgattttcctacactctgtaattttgctgaggtgcaatttggaactctgcaagacctactagattgaatttatttagtgaatgctcctgaataaatgtgcattcctcttttagagtagctgtatgcttttcaaatgctatctgccgtgaattttttgcttttattatactttatggcaaaagtgatatcaagtgattgtcagacttgagggctcatagaagtgttaggtacggctctcaaagatgttacagttttttctagggttgggagaatagttgagatctggaaagcatagacattttttacactctggatagactttattcttgaagatcatcagaaatgaggttggaatttcgaggttttgagcagggggagcatcttatattcacccttaaatcgttattaatacatcctgttttcttcattccctgatagctatctcatttcactctactgtctcaaaattttgttttaaaataatagaaatgttttgccattattaagtaccactttattcctaacaaaaataagtactcaggacttttttttcaaaatgaaatatttatgtactgttttatggtatgtggtagagtaagtaaaatgtaatgttctcagttttgttccatatttgcattcctcttatgctttacctgtattttatcatttgtaagcagaactctagctatatggggtagaaataaaatctctgagatgaaacaaaggaatcaacatgataaaatttaggcgaagtagttaagaaatggcccttttgaatgttgaagataggaaagaaagccatatattcaaatatgtaattttcctcatttagttataatgacatctttaccaattgggcttcataaatgtgtttctttcttaatagtatcctagttccagcatatattcaacatgaattttatcattctcctcctaatggaatgtcttccttatagaaatgttcacgacaaattcatttgtgttttttacatgtcaataatgtatgctaaattaaaatgttttccagttattctgatagatgtcattatggcatccttaatttttcttctccttctgtatatagggtaagggactgttctgaagaacctttccatttagtgatcaagatatggaagctgatttctgaaaatgctcagtgtgtactctaattatttatggtaccatttgaattgtaacttgcattttagcagtgcatgtttctaattgacttactgggaaactgaataaaatatgcctcttattatc

SEQ ID NO: 142040 - DNA, 3216 bp, Artificial Sequence
  derived and/or modified sequence
gttgccccgggaggcgtaggcgcgagcggcctctacaggtccggtgcgcgtggcggctgccgcggcagtgaggtcgcgctttcctatgcctcttttggggacccatctgagctccctggccgcagctcttagcggcatctgtgttggggacacgagggatggaagatgctaattctgaaaagagtataaatgaagaaaatggagaagtatcagaagaccagtctcaaaataagcacagtcgtcacaaaaaaaagaagcataaacacagaagtaaacataagaaacataaacattcctcagaagaagacaaggataaaaaacataaacataagcataaacataagaaacacaaaagaaaagagattattgatgcttctgataaagagggtatgtctccagcaaaaagaactaaacttgatgatttagctttgctagaagacttggaaaaacagagagccttgattaaggccgaacttgataatgagttaatggaaggaaaggtccagtctggtatggggctcattttgcaaggttatgagtctggctctgaagaagagggggaaattcatgaaaaggcaagaaatggaaataggtctagtactagatcttcaagtacaaaggggaaacttgaacttgtggacaataaaattactacaaagaaacgaagtaaaagcagatccaaagaacggactagacataggtctgataaaaagaaaagtaaggggggtattgaaatcgttaaagagaaaacaactaggagcaagtcaaaggagaggaaaaaatctaaaagcccatccaaaagaagtaagtctcaagatcaagcaaggaaatcaaaatcccctacccttagaaggcgatctcaagagaaaattggtaaggccagatctcctactgatgataaggttaaaattgaagataaaagtaaatcaaaagataggaaaaaatccccaattataaatgaaagtagaagtcgcgatcgaggtaaaaaatccagatccccagttgatttaagaggtaaatccaaagacagaaggtcacggtccaaagagagaaaatcaaaacggtctgaaactgataaagaaaagaagccaattaaatctccctctaaagatgcttcatctgggaaagaaaataggtcacccagcagaagacctggtcgtagtcctaaaagaagaagtttgtctccaaaaccacgtgataaatcaagaagaagcaggtctccacttttgaatgatagaagatctaagcagagcaaatccccctcgcggacactgtctcctgggagaagagccaagagccgatccttagaaagaaaacgacgagaaccagagaggagacgactttcttctccaagaacacgacctcgagatgatatcctcagtagacgtgaaagatcaaaagatgccagccccatcaatagatggtctccaacccgaagaagaagtagatctcccattagaaggaggtctcgttccccactcagacgtagcaggtctccaagaagaagaagcagatctcctcggagaagggacagaggtcggaggagcagatcacgcttgcgaaggcggtctcgatcacgcggtggtcgtagacgaaggagcagaagcaaagtaaaggaagataaatttaaaggaagtctttctgaaggaatgaaagttgagcaggaatcttcgtctgatgataaccttgaagactttgatgtagaggaagaagatgaagaagccctaatagaacagagaagaatccaaaggcaggcaattgttcagaaatataaataccttgctgaagatagcaacatgtctgtgccatctgaaccaagcagcccccagagcagtacgagaacacgatcaccatctccagatgacattctggagcgagtagctgctgatgttaaagagtatgaacgggaaaatgttgatacatttgaggcctcagtgaaagccaagcataatctaatgacagttgaacagaataatggttcatctcagaagaagttgttggcacctgatatgtttacagaatctgatgatatgtttgctgcgtattttgatagtgctcgtcttcgggccgctggcattggaaaagatttcaaagagaatcccaacctcagagataactggaccgatgcagaaggctattatcgtgtgaacataggtgaagtcctagataaacgttacaatgtgtatggctacactgggcaaggtgtattcagtaatgttgtacgagccagagataatgcaagagccaaccaagaagtggctgtaaagatcatcagaaacaatgagctcatgcaaaagactggtttaaaagaattagagttcttgaaaaaacttaatgatgctgatcctgatgacaaatttcattgtctgagactcttcaggcacttctatcacaagcagcatctttgtctggtattcgagcctctcagcatgaacttacgagaggtgttaaaaaaatatggtaaagatgttggtcttcatattaaagctgtaagatcctatagtcagcagttgttcctggcattgaaactccttaaaagatgcaatatcctacatgcagatatcaagccagacaatatcctggttaatgaatccaaaactattttaaagctttgcgattttgggtcggcttcacatgttgcggataatgacataacaccttatcttgtcagtagattttatcgtgctcctgaaatcattataggtaaaagctatgactatggtatagatatgtggtctgtaggttgcaccttatacgaactctatactggaaaaattttattccctggcaaaaccaataaccatatgctgaagcttgcaatggatctcaaaggaaagatgccaaataagatgattcgaaaaggtgtgttcaaagatcagcattttgatcaaaatctcaacttcatgtacatagaagttgataaagtaacagagagggagaaagttactgttatgagcaccattaatccaactaaggacctgttggctgacttgattgggtgccagagacttcctgaagaccaacgtaagaaagtacaccagctaaaggacttgttggaccagattctgatgttggacccagctaaacgaattagcatcaaccaggccctacagcacgccttcatccaggaaaaaatttaaacaagatgaagaaactccaagggtttgagtaaatacaaagactgaagaaatttcacagcagtttattaatgtatat

SEQ ID NO: 142041 - DNA, 3024 bp, Artificial Sequence
  derived and/or modified sequence
atggccgccgccgagacccagagcctgagagagcagcccgagatggaggacgccaacagcgagaagagcatcaacgaggagaacggcgaggtgagcgaggaccagagccagaacaagcacagcagacacaagaagaagaagcacaagcacagaagcaagcacaagaagcacaagcacagcagcgaggaggacaaggacaagaagcacaagcacaagcacaagcacaagaagcacaagagaaaggagatcatcgacgccagcgacaaggagggcatgagccccgccaagagaaccaagctggacgacctggccctgctggaggacctggagaagcagagagccctgatcaaggccgagctggacaacgagctgatggagggcaaggtgcagagcggcatgggcctgatcctgcagggctacgagagcggcagcgaggaggagggcgagatccacgagaaggccagaaacggcaacagaagcagcaccagaagcagcagcaccaagggcaagctggagctggtggacaacaagatcaccaccaagaagagaagcaagagcagaagcaaggagagaaccagacacagaagcgacaagaagaagagcaagggcggcatcgagatcgtgaaggagaagaccaccagaagcaagagcaaggagagaaagaagagcaagagccccagcaagagaagcaagagccaggaccaggccagaaagagcaagagccccaccctgagaagaagaagccaggagaagatcggcaaggccagaagccccaccgacgacaaggtgaagatcgaggacaagagcaagagcaaggacagaaagaagagccccatcatcaacgagagcagaagcagagacagaggcaagaagagcagaagccccgtggacctgagaggcaagagcaaggacagaagaagcagaagcaaggagagaaagagcaagagaagcgagaccgacaaggagaagaagcccatcaagagccccagcaaggacgccagcagcggcaaggagaacagaagccccagcagaagacccggcagaagccccaagagaagaagcctgagccccaagcccagagacaagagcagaagaagcagaagccccctgctgaacgacagaagaagcaagcagagcaagagccccagcagaaccctgagccccggcagaagagccaagagcagaagcctggagagaaagagaagagagcccgagagaagaagactgagcagccccagaaccagacccagagacgacatcctgagcagaagagagagaagcaaggacgccagccccatcaacagatggagccccaccagaagaagaagcagaagccccatcagaagaagaagcagaagccccctgagaagaagcagaagccccagaagaagaagcagaagccccagaagaagagacagaggcagaagaagcagaagcagactgagaagaagaagcagaagcagaggcggcagaagaagaagaagcagaagcaaggtgaaggaggacaagttcaagggcagcctgagcgagggcatgaaggtggagcaggagagcagcagcgacgacaacctggaggacttcgacgtggaggaggaggacgaggaggccctgatcgagcagagaagaatccagagacaggccatcgtgcagaagtacaagtacctggccgaggacagcaacatgagcgtgcccagcgagcccagcagcccccagagcagcaccagaaccagaagccccagccccgacgacatcctggagagagtggccgccgacgtgaaggagtacgagagagagaacgtggacaccttcgaggccagcgtgaaggccaagcacaacctgatgaccgtggagcagaacaacggcagcagccagaagaagctgctggcccccgacatgttcaccgagagcgacgacatgttcgccgcctacttcgacagcgccagactgagagccgccggcatcggcaaggacttcaaggagaaccccaacctgagagacaactggaccgacgccgagggctactacagagtgaacatcggcgaggtgctggacaagagatacaacgtgtacggctacaccggccagggcgtgttcagcaacgtggtgagagccagagacaacgccagagccaaccaggaggtggccgtgaagatcatcagaaacaacgagctgatgcagaagaccggcctgaaggagctggagttcctgaagaagctgaacgacgccgaccccgacgacaagttccactgcctgagactgttcagacacttctaccacaagcagcacctgtgcctggtgttcgagcccctgagcatgaacctgagagaggtgctgaagaagtacggcaaggacgtgggcctgcacatcaaggccgtgagaagctacagccagcagctgttcctggccctgaagctgctgaagagatgcaacatcctgcacgccgacatcaagcccgacaacatcctggtgaacgagagcaagaccatcctgaagctgtgcgacttcggcagcgccagccacgtggccgacaacgacatcaccccctacctggtgagcagattctacagagcccccgagatcatcatcggcaagagctacgactacggcatcgacatgtggagcgtgggctgcaccctgtacgagctgtacaccggcaagatcctgttccccggcaagaccaacaaccacatgctgaagctggccatggacctgaagggcaagatgcccaacaagatgatcagaaagggcgtgttcaaggaccagcacttcgaccagaacctgaacttcatgtacatcgaggtggacaaggtgaccgagagagagaaggtgaccgtgatgagcaccatcaaccccaccaaggacctgctggccgacctgatcggctgccagagactgcccgaggaccagagaaagaaggtgcaccagctgaaggacctgctggaccagatcctgatgctggaccccgccaagagaatcagcatcaaccaggccctgcagcacgccttcatccaggagaagatctag

SEQ ID NO: 142042 - DNA, 2982 bp, Artificial Sequence
  derived and/or modified sequence
atggaggacgccaacagcgagaagagcatcaacgaggagaacggcgaggtgagcgaggaccagagccagaacaagcacagcagacacaagaagaagaagcacaagcacagaagcaagcacaagaagcacaagcacagcagcgaggaggacaaggacaagaagcacaagcacaagcacaagcacaagaagcacaagagaaaggagatcatcgacgccagcgacaaggagggcatgagccccgccaagagaaccaagctggacgacctggccctgctggaggacctggagaagcagagagccctgatcaaggccgagctggacaacgagctgatggagggcaaggtgcagagcggcatgggcctgatcctgcagggctacgagagcggcagcgaggaggagggcgagatccacgagaaggccagaaacggcaacagaagcagcaccagaagcagcagcaccaagggcaagctggagctggtggacaacaagatcaccaccaagaagagaagcaagagcagaagcaaggagagaaccagacacagaagcgacaagaagaagagcaagggcggcatcgagatcgtgaaggagaagaccaccagaagcaagagcaaggagagaaagaagagcaagagccccagcaagagaagcaagagccaggaccaggccagaaagagcaagagccccaccctgagaagaagaagccaggagaagatcggcaaggccagaagccccaccgacgacaaggtgaagatcgaggacaagagcaagagcaaggacagaaagaagagccccatcatcaacgagagcagaagcagagacagaggcaagaagagcagaagccccgtggacctgagaggcaagagcaaggacagaagaagcagaagcaaggagagaaagagcaagagaagcgagaccgacaaggagaagaagcccatcaagagccccagcaaggacgccagcagcggcaaggagaacagaagccccagcagaagacccggcagaagccccaagagaagaagcctgagccccaagcccagagacaagagcagaagaagcagaagccccctgctgaacgacagaagaagcaagcagagcaagagccccagcagaaccctgagccccggcagaagagccaagagcagaagcctggagagaaagagaagagagcccgagagaagaagactgagcagccccagaaccagacccagagacgacatcctgagcagaagagagagaagcaaggacgccagccccatcaacagatggagccccaccagaagaagaagcagaagccccatcagaagaagaagcagaagccccctgagaagaagcagaagccccagaagaagaagcagaagccccagaagaagagacagaggcagaagaagcagaagcagactgagaagaagaagcagaagcagaggcggcagaagaagaagaagcagaagcaaggtgaaggaggacaagttcaagggcagcctgagcgagggcatgaaggtggagcaggagagcagcagcgacgacaacctggaggacttcgacgtggaggaggaggacgaggaggccctgatcgagcagagaagaatccagagacaggccatcgtgcagaagtacaagtacctggccgaggacagcaacatgagcgtgcccagcgagcccagcagcccccagagcagcaccagaaccagaagccccagccccgacgacatcctggagagagtggccgccgacgtgaaggagtacgagagagagaacgtggacaccttcgaggccagcgtgaaggccaagcacaacctgatgaccgtggagcagaacaacggcagcagccagaagaagctgctggcccccgacatgttcaccgagagcgacgacatgttcgccgcctacttcgacagcgccagactgagagccgccggcatcggcaaggacttcaaggagaaccccaacctgagagacaactggaccgacgccgagggctactacagagtgaacatcggcgaggtgctggacaagagatacaacgtgtacggctacaccggccagggcgtgttcagcaacgtggtgagagccagagacaacgccagagccaaccaggaggtggccgtgaagatcatcagaaacaacgagctgatgcagaagaccggcctgaaggagctggagttcctgaagaagctgaacgacgccgaccccgacgacaagttccactgcctgagactgttcagacacttctaccacaagcagcacctgtgcctggtgttcgagcccctgagcatgaacctgagagaggtgctgaagaagtacggcaaggacgtgggcctgcacatcaaggccgtgagaagctacagccagcagctgttcctggccctgaagctgctgaagagatgcaacatcctgcacgccgacatcaagcccgacaacatcctggtgaacgagagcaagaccatcctgaagctgtgcgacttcggcagcgccagccacgtggccgacaacgacatcaccccctacctggtgagcagattctacagagcccccgagatcatcatcggcaagagctacgactacggcatcgacatgtggagcgtgggctgcaccctgtacgagctgtacaccggcaagatcctgttccccggcaagaccaacaaccacatgctgaagctggccatggacctgaagggcaagatgcccaacaagatgatcagaaagggcgtgttcaaggaccagcacttcgaccagaacctgaacttcatgtacatcgaggtggacaaggtgaccgagagagagaaggtgaccgtgatgagcaccatcaaccccaccaaggacctgctggccgacctgatcggctgccagagactgcccgaggaccagagaaagaaggtgcaccagctgaaggacctgctggaccagatcctgatgctggaccccgccaagagaatcagcatcaaccaggccctgcagcacgccttcatccaggagaagatctag

SEQ ID NO: 142043 - protein, 465 aa, Artificial Sequence
  derived and/or modified sequence
METGFPAIMYPGSFIGGWGEEYLSWEGPGLPDFVFQQQPVESEAMHCSNPKSGVVLATVARGPDACQILTRAPLGQDPPQRTVLGLLTANGQYRRTCGQGITRIRCYSGSENAFPPAGKKALPDCGVQEPPKQGFDIYMDELEQGDRDSCSVREGMAFEDVYEVDTGTLKSDLHFLLDFNTVSPMLVDSSLLSQSEDISSLGTDVINVTEYAEEIYQYLREAEIRHRPKAHYMKKQPDITEGMRTILVDWLVEVGEEYKLRAETLYLAVNFLDRFLSCMSVLRGKLQLVGTAAMLLASKYEEIYPPEVDEFVYITDDTYTKRQLLKMEHLLLKVLAFDLTVPTTNQFLLQYLRRQGVCVRTENLAKYVAELSLLEADPFLKYLPSLIAAAAFCLANYTVNKHFWPETLAAFTGYSLSEIVPCLSELHKAYLDIPHRPQQAIREKYKASKYLCVSLMEPPAVLLLQ

SEQ ID NO: 142044 - DNA, 1398 bp, Artificial Sequence
  derived and/or modified sequence
atggagaccggcttccccgccatcatgtaccccggcagcttcatcggcggctggggcgaggagtacctgagctgggagggccccggcctgcccgacttcgtgttccagcagcagcccgtggagagcgaggccatgcactgcagcaaccccaagagcggcgtggtgctggccaccgtggccagaggccccgacgcctgccagatcctgaccagagcccccctgggccaggaccccccccagagaaccgtgctgggcctgctgaccgccaacggccagtacagaagaacctgcggccagggcatcaccagaatcagatgctacagcggcagcgagaacgccttcccccccgccggcaagaaggccctgcccgactgcggcgtgcaggagccccccaagcagggcttcgacatctacatggacgagctggagcagggcgacagagacagctgcagcgtgagagagggcatggccttcgaggacgtgtacgaggtggacaccggcaccctgaagagcgacctgcacttcctgctggacttcaacaccgtgagccccatgctggtggacagcagcctgctgagccagagcgaggacatcagcagcctgggcaccgacgtgatcaacgtgaccgagtacgccgaggagatctaccagtacctgagagaggccgagatcagacacagacccaaggcccactacatgaagaagcagcccgacatcaccgagggcatgagaaccatcctggtggactggctggtggaggtgggcgaggagtacaagctgagagccgagaccctgtacctggccgtgaacttcctggacagattcctgagctgcatgagcgtgctgagaggcaagctgcagctggtgggcaccgccgccatgctgctggccagcaagtacgaggagatctacccccccgaggtggacgagttcgtgtacatcaccgacgacacctacaccaagagacagctgctgaagatggagcacctgctgctgaaggtgctggccttcgacctgaccgtgcccaccaccaaccagttcctgctgcagtacctgagaagacagggcgtgtgcgtgagaaccgagaacctggccaagtacgtggccgagctgagcctgctggaggccgaccccttcctgaagtacctgcccagcctgatcgccgccgccgccttctgcctggccaactacaccgtgaacaagcacttctggcccgagaccctggccgccttcaccggctacagcctgagcgagatcgtgccctgcctgagcgagctgcacaaggcctacctggacatcccccacagaccccagcaggccatcagagagaagtacaaggccagcaagtacctgtgcgtgagcctgatggagccccccgccgtgctgctgctgcagtag

SEQ ID NO: 142045 - DNA, 1879 bp, Artificial Sequence
  derived and/or modified sequence
ccgcccttccgtgccctgcccttccctgcccttccccgccctgccccgcccggcccggcccggccctgcccaaccctgccccgccctgccccgcccagccggccacctcttaaccgcgatcctccagtgcacttgccagttgttccggacacatagaaagataacgacgggaagagcggggcccgctttggggtccaggcaggttttggggcctcctgtctggtgggaggaggccgcagcgcagcaccctgctcgtcacttgggatggagaccggctttcccgcaatcatgtaccctggatcttttattgggggctggggagaagagtatctcagctgggaaggaccggggctcccagatttcgtcttccagcagcagcccgtggagtctgaagcaatgcactgcagcaaccccaagagtggagttgtgctggctacagtggcccgaggtcccgatgcttgtcagatactcaccagagccccgctgggccaggatcccccgcagaggacagtgctagggctgctaactgcaaatgggcagtacaggaggacctgtggccaggggatcacaagaatcaggtgttattctggatcagaaaatgccttccctccagctggaaagaaagcactccctgactgtggggtccaagagccccccaagcaagggtttgacatctacatggatgaactagagcagggggacagagacagctgctcggtcagagaggggatggcatttgaggatgtgtatgaagtagacaccggcacactcaagtcagacctgcacttcctgctggatttcaacacagtttcccctatgctggtagattcatctctcctctcccagtctgaagatatatccagtcttggcacagatgtgataaatgtgactgaatatgctgaagaaatttatcagtaccttagggaagctgaaataaggcacagacccaaagcacactacatgaagaagcagccagacatcacggaaggcatgcgcacgattctggtggactggctggtggaggttggggaagaatataaacttcgagcagagaccctgtatctggctgtcaacttcctggacaggttcctttcatgtatgtctgttctgagagggaaactgcagctcgtaggaacagcagctatgcttttggcttcgaaatatgaagagatatatcctcctgaagtagacgagtttgtctatatcaccgatgatacatacacaaaacgacaactgttaaaaatggaacacttgcttctgaaagttctagcttttgatctgacagtaccaaccaccaaccagtttctccttcagtacttgaggcgacaaggagtgtgcgtcaggactgagaacctggctaagtacgtagcagagctgagtctacttgaagcagatccattcttgaaatatcttccttcactgatagctgcagcagctttttgcctggcaaactatactgtgaacaagcacttttggccagaaacccttgctgcatttacagggtattcattaagtgaaattgtgccttgcctgagtgagcttcataaagcgtaccttgatataccccatcgacctcagcaagcaattagggagaagtacaaggcttcaaagtacctgtgtgtgtccctcatggagccacctgcagttcttcttctacaataagtttctgaatggaagcacttccagaacttcacctccatatcagaagtgccaataatcgtcataggcttctgcacgttggatcaactaatgttgtttacaatatagatgacattttaaaaatgtaaatgaatttagtttcccttagactttagtagtttgtaatatagtccaacattttttaaacaataaactgcttgtcttatgaccatgtgttaga

SEQ ID NO: 142046 - DNA, 1844 bp, Artificial Sequence
  derived and/or modified sequence
gccgcagcctgcgcagccccgaggaccccgcgtcgctctcccgagccagggttctcaggagcgggccgcgcaggagacgttagagggggttgttagcggctgttgggagaacgggtcacggaaacagtcccttccaaagccggggccatcgtggggtgggcgagtccgccctcccaggccgggggcgcggaccagaggggacgtgtgcagacggccgcggtcagccccacctcgcccgggcggagacgcacagctggagctggagggccgtcgcccgttgggccctcaggggcctgaacgcccaggggtcgcggcgagtccacccggagcgagtcagcagcagcccgtggagtctgaagcaatgcactgcagcaaccccaagagtggagttgtgctggctacagtggcccgaggtcccgatgcttgtcagatactcaccagagccccgctgggccaggatcccccgcagaggacagtgctagggctgctaactgcaaatgggcagtacaggaggacctgtggccaggggatcacaagaatcaggtgttattctggatcagaaaatgccttccctccagctggaaagaaagcactccctgactgtggggtccaagagccccccaagcaagggtttgacatctacatggatgaactagagcagggggacagagacagctgctcggtcagagaggggatggcatttgaggatgtgtatgaagtagacaccggcacactcaagtcagacctgcacttcctgctggatttcaacacagtttcccctatgctggtagattcatctctcctctcccagtctgaagatatatccagtcttggcacagatgtgataaatgtgactgaatatgctgaagaaatttatcagtaccttagggaagctgaaataaggcacagacccaaagcacactacatgaagaagcagccagacatcacggaaggcatgcgcacgattctggtggactggctggtggaggttggggaagaatataaacttcgagcagagaccctgtatctggctgtcaacttcctggacaggttcctttcatgtatgtctgttctgagagggaaactgcagctcgtaggaacagcagctatgcttttggcttcgaaatatgaagagatatatcctcctgaagtagacgagtttgtctatatcaccgatgatacatacacaaaacgacaactgttaaaaatggaacacttgcttctgaaagttctagcttttgatctgacagtaccaaccaccaaccagtttctccttcagtacttgaggcgacaaggagtgtgcgtcaggactgagaacctggctaagtacgtagcagagctgagtctacttgaagcagatccattcttgaaatatcttccttcactgatagctgcagcagctttttgcctggcaaactatactgtgaacaagcacttttggccagaaacccttgctgcatttacagggtattcattaagtgaaattgtgccttgcctgagtgagcttcataaagcgtaccttgatataccccatcgacctcagcaagcaattagggagaagtacaaggcttcaaagtacctgtgtgtgtccctcatggagccacctgcagttcttcttctacaataagtttctgaatggaagcacttccagaacttcacctccatatcagaagtgccaataatcgtcataggcttctgcacgttggatcaactaatgttgtttacaatatagatgacattttaaaaatgtaaatgaatttagtttcccttagactttagtagtttgtaatatagtccaacattttttaaacaataaactgcttgtcttatgaccatgtgttaga

SEQ ID NO: 142047 - DNA, 1398 bp, Artificial Sequence
  derived and/or modified sequence
atggaaaccggattccctgcgattatgtacccaggctcctttatagggggatggggtgaagaatacctcagttgggaaggccctggcctgccggattttgtgttccaacagcagcccgtggaaagcgaagcgatgcactgctccaatccgaaatccggcgtggtgctagccacagtggcacggggtcctgacgcgtgtcagattctgacaagggcccctcttggccaggatccacctcagagaactgtcctgggcttgctgactgctaacggtcaataccgtagaacatgcgggcagggaatcacacggattcgctgctatagtggtagcgaaaacgcattcccacccgcgggcaagaaagctttgccagattgcggagtccaggagccgccgaagcaggggtttgacatctacatggatgagctggagcagggtgatagggactcatgctctgtgagggagggcatggcctttgaggatgtgtatgaagtggacactggaacactgaagtccgatttgcactttctgctcgacttcaatacggtgtccccgatgctagttgactctagcctgctgagtcagtccgaagacataagcagccttggaacagacgtcataaacgttaccgagtatgctgaggagatctaccaatatctgagagaggccgagattcgacatagacctaaggcccactatatgaagaaacaacccgacattacagagggcatgaggaccatcctcgtcgattggctggtggaagtcggagaagaatataaactgagagctgaaaccctctatctggcagtgaacttcctggacaggttcctgtcatgtatgtctgttctgcgcgggaaactacagttggtcggaaccgccgcaatgctgctagcctcaaagtatgaggagatttacccccctgaagtggatgaattcgtttatataaccgatgacacatacactaagcgccagctgcttaaaatggaacacctgctcctgaaggtgcttgcctttgacctgactgtgcccaccaccaaccagttcctgctccagtaccttagaagacagggcgtgtgtgtgaggaccgagaacttggccaagtatgtcgccgaactttccctgctggaagctgatccctttctcaagtacctaccatctctgattgccgcagccgcgttttgtttggcaaactatacagtaaacaaacatttctggcctgaaacactggccgcattcaccggctacagcttgagtgaaattgtaccctgtcttagcgaattgcataaggcctatttagatattccccacagaccccaacaagctatccgagaaaagtacaaggcctcaaagtacctgtgtgtgtccctgatggagccgcccgcggtgttgctcctccagtag

SEQ ID NO: 142048 - DNA, 1398 bp, Artificial Sequence
  derived and/or modified sequence
atggagaccggcttccctgccatcatgtacccaggcagcttcatcggcggctggggcgaggagtacctgtcctgggagggccctggcctgcctgactttgtgttccagcagcagcctgtggagagcgaggccatgcactgcagcaaccccaagagcggcgtggtgctggccaccgtggcccggggcccagatgcctgccagatcctgacccgggcccccctgggccaggaccccccccagaggacagtgctgggcctgctgacagccaacggccagtacagaaggacctgtggccagggcatcacccgcatccgctgctacagcggctctgaaaatgccttccccccagctgggaagaaggccctgcctgactgtggggtgcaggagccccccaagcagggctttgacatctacatggatgagctggagcagggcgaccgggacagctgcagcgtgcgggagggcatggcctttgaagatgtgtatgaggtggacaccggcaccctgaagagtgacctgcacttcctgctggacttcaacacagtgagccccatgctggtggacagcagcctgctgagccagagcgaggacatcagcagcctgggcacagatgtgatcaacgtgacagaatatgcagaggagatctaccagtacctgcgggaggccgagatccgccaccggcccaaggcccactacatgaagaagcagcctgacatcacagagggcatgaggaccatcctggtggactggctggtggaggtgggggaggagtacaagctgcgggcagagaccctgtacctggccgtgaacttcctggaccgcttcctgagctgcatgtctgtgctgcggggcaagctgcagctggtgggcacagctgccatgctgctggccagcaaatatgaggagatctacccacctgaggtggatgaatttgtgtacatcacagatgacacctacaccaagaggcagctgctgaagatggagcacctgctgctgaaggtgctggcctttgacctgactgtgcccaccaccaaccagttcctgctgcagtacctgcggcggcagggcgtgtgtgtgaggacagagaacctggccaagtatgtggccgagctgagcctgctggaggccgaccccttcctgaagtacctgcccagcctgattgctgctgctgccttctgcctggccaactacacagtgaacaagcacttctggccagagaccctggccgccttcaccggctacagcctgtctgaaattgtgccctgcctgtctgagctgcacaaggcctacctggacatcccccaccggccccagcaggccatccgggagaagtacaaggccagcaagtacctgtgtgtgtccctgatggagcccccagctgtgctgctgctgcagtag

SEQ ID NO: 142049 - DNA, 1398 bp, Artificial Sequence
  derived and/or modified sequence
atggagaccggcttccccgccatcatgtaccccggcagcttcatcggcggttggggggaggagtatctctcatgggaaggaccagggttgcctgatttcgtgttccagcaacagccagtcgagtccgaggccatgcattgcagtaaccccaaatcaggcgtagttctcgctaccgttgcacgtggcccagacgcttgccaaatcctgacaagggcccctctaggacaggacccaccccagagaactgtgctcggcctgctgaccgccaacgggcaatatcgcagaacctgcggccagggcattacccggattcgttgttactcaggctccgagaacgcctttccacctgcgggcaagaaggcgctgcccgattgcggtgtccaggaaccacctaaacagggcttcgatatttacatggacgagctggagcagggtgaccgggactcttgttctgtccgtgagggcatggcattcgaagatgtgtatgaggtcgacacagggactctcaagtcggatctgcatttcctcctcgacttcaatacagtgagtcccatgctagtcgattccagcttgctgagccagtccgaggacatttcaagcctgggtaccgatgtaatcaacgtcacggagtatgcagaagagatctaccagtacctgagggaggccgagatacgccaccggcccaaggctcattatatgaagaagcaaccggatatcaccgagggtatgaggaccatcctggtagattggttggttgaagtgggggaggaatacaagctacgggccgagacgctgtatctggctgtaaattttttggatagatttctgtcatgtatgagcgtacttagaggcaagctgcagctggtgggaactgctgccatgctcctggctagcaagtacgaggagatctacccacccgaggtggacgaattcgtgtacattacggacgacacatataccaaaagacagctgttaaagatggaacatctgctgcttaaggtgttggctttcgatctgaccgttccgacgactaatcagttcctgctacagtacctgaggaggcagggcgtctgtgtgcgaaccgagaacctcgccaaatacgtcgcagagttgtctctgttagaagccgatcctttcttgaaatacctccctagcttgatagctgccgctgccttttgtcttgccaattatacagtgaataaacacttttggcccgaaacactcgcggcatttactggttactctctgtctgaaatagttccttgcctgtcagagcttcacaaagcatatctggacatcccccataggcctcaacaggctatccgtgagaaatacaaggcctcaaaatatctgtgtgtgtctctaatggaacccccagctgtgctgctccttcaatag

SEQ ID NO: 142050 - DNA, 1398 bp, Artificial Sequence
  derived and/or modified sequence
atggaaaccggcttccccgcaattatgtacccgggaagctttatcggaggctggggcgaggagtacctaagttgggagggacccggacttcccgactttgtgttccagcaacagcctgtcgaatcggaggccatgcattgctcaaaccctaaaagcggagtcgtcctggcaacagttgcaagagggcctgacgcctgccaaattcttaccagggcgcctctgggacaggatccaccgcagcggaccgtgctggggctcctcaccgcgaatggacagtaccgccgtacttgtgggcagggaattaccagaatccggtgctactcgggcagtgagaatgcttttcctcctgctgggaagaaagctctgcccgactgtggagtgcaagaaccgcctaagcaggggttcgatatctacatggacgagctggagcagggggatcgggatagctgctctgttcgagaaggtatggcgtttgaagatgtctacgaagtggacactgggacactgaagagcgatctccattttctcctggattttaatactgtgagtccaatgctggtggattcatcactcctatctcagtccgaggacatcagcagtttaggcaccgacgtgatcaatgtcacagagtacgcagaggaaatctatcagtacctgcgcgaggccgagattcgccacagacctaaagcccattacatgaagaagcagccggacataaccgaaggcatgaggactatccttgttgattggctcgtggaggtgggtgaggaatataaattacgagctgaaactctgtatcttgccgtcaacttcctcgacaggttcctcagctgcatgtctgtactgagaggaaaactgcagctggtaggaactgccgcaatgctgctggcatcgaagtacgaggagatctacccacctgaagtggacgagttcgtatacatcactgatgatacatacacgaaaagacaactcctcaagatggagcacttactgttgaaggtcctggctttcgacctgacggttccaacgaccaaccagtttttactgcaatatcttaggcgacagggcgtctgtgttcgcacagaaaatctcgccaaatacgtcgctgagttatcactcctagaggccgacccttttctgaagtatctgccaagcctgatcgctgcggctgctttctgtctggctaactacacagtcaacaagcacttttggccagaaactctggcagcgttcaccggctatagcctgtcagaaattgtgccctgcctgtctgaattacacaaggcctacctagatattccgcacagaccccagcaagcaattcgggaaaaatacaaagcctccaaatacttgtgcgtatcactaatggaaccacccgcagtcctgttgctgcagtag

SEQ ID NO: 142051 - protein, 542 aa, Artificial Sequence
  derived and/or modified sequence
MKMMHMAHCVTLVQLSISCDHLIDKDIGSKSDPLCVLLQDVGGGSWAELGRTERVRNCSSPEFSKTLQLEYRFETVQKLRFGIYDIDNKTPELRDDDFLGGAECSLGQIVSSQVLTLPLMLKPGKPAGRGTITVSAQELKDNRVVTMEVEARNLDKKDFLGKSDPFLEFFRQGDGKWHLVYRSEVIKNNLNPTWKRFSVPVQHFCGGNPSTPIQVQCSDYDSDGSHDLIGTFHTSLAQLQAVPAEFECIHPEKQQKKKSYKNSGTIRVKICRVETEYSFLDYVMGGCQINFTVGVDFTGSNGDPSSPDSLHYLSPTGVNEYLMALWSVGSVVQDYDSDKLFPAFGFGAQVPPDWQVSHEFALNFNPSNPYCAGIQGIVDAYRQALPQVRLYGPTNFAPIINHVARFAAQAAHQGTASQYFMLLLLTDGAVTDVEATREAVVRASNLPMSVIIVGVGGADFEAMEQLDADGGPLHTRSGQAAARDIVQFVPYRRFQNAPREALAQTVLAEVPTQLVSYFRAQGWAPLKPLPPSAKDPAQAPQA

SEQ ID NO: 142052 - protein, 136 aa, Artificial Sequence
  derived and/or modified sequence
MAHCVTLVQLSISCDHLIDKDIGSKSDPLCVLLQDVGGGSWAELGRTERVRNCSSPEFSKTLQLEYRFETVQKLRFGIYDIDNKTPELRDDDFLGGAECSLGQIVSSQVLTLPLMLKPGKPAGRGTITVSAQELKD

SEQ ID NO: 142053 - protein, 209 aa, Artificial Sequence
  derived and/or modified sequence
MAHCVTLVQLSISCDHLIDKDIGSKSDPLCVLLQDVGGGSWAELGRTERVRNCSSPEFSKTLQLEYRFETVQKLRFGIYDIDNKTPELRDDDFLGGAECSLGQIVSSQVLTLPLMLKPGKPAGRGTITVSAQELKDNRVVTMEVEARNLDKKDFLGKSDPFLEFFRQGDGKWHLVYRSEVIKNNLNPTWKRFSVPVQHFCGGNPSTPIQ

SEQ ID NO: 142054 - protein, 202 aa, Artificial Sequence
  derived and/or modified sequence
MAHCVTLVQLSISCDHLIDKDIGSKSDPLCVLLQDVGGGSWAELGRTERVRNCSSPEFSKTLQLEYRFETVQKLRFGIYDIDNKTPELRDDDFLGGAECSLGQIVSSQVLTLPLMLKPGKPAGRGTITVSAQELKDNRVVTMEVEARNLDKKDFLGKSDPFLEFFRQGDGKWHLVYRSEVIKNNLNPTWKRFSVPVQHFCGG

SEQ ID NO: 142055 - protein, 67 aa, Artificial Sequence
  derived and/or modified sequence
MAHCVTLVQLSISCDHLIDKDIGSKSDPLCVLLQDVGGGSWAELGRTERVRNCSSPEFSKTLQLEYR

SEQ ID NO: 142056 - DNA, 1614 bp, Artificial Sequence
  derived and/or modified sequence
atggcccactgcgtgaccctggtgcagctgagcatcagctgcgaccacctgatcgacaaggacatcggcagcaagagcgaccccctgtgcgtgctgctgcaggacgtgggcggcggcagctgggccgagctgggcagaaccgagagagtgagaaactgcagcagccccgagttcagcaagaccctgcagctggagtacagattcgagaccgtgcagaagctgagattcggcatctacgacatcgacaacaagacccccgagctgagagacgacgacttcctgggcggcgccgagtgcagcctgggccagatcgtgagcagccaggtgctgaccctgcccctgatgctgaagcccggcaagcccgccggcagaggcaccatcaccgtgagcgcccaggagctgaaggacaacagagtggtgaccatggaggtggaggccagaaacctggacaagaaggacttcctgggcaagagcgaccccttcctggagttcttcagacagggcgacggcaagtggcacctggtgtacagaagcgaggtgatcaagaacaacctgaaccccacctggaagagattcagcgtgcccgtgcagcacttctgcggcggcaaccccagcacccccatccaggtgcagtgcagcgactacgacagcgacggcagccacgacctgatcggcaccttccacaccagcctggcccagctgcaggccgtgcccgccgagttcgagtgcatccaccccgagaagcagcagaagaagaagagctacaagaacagcggcaccatcagagtgaagatctgcagagtggagaccgagtacagcttcctggactacgtgatgggcggctgccagatcaacttcaccgtgggcgtggacttcaccggcagcaacggcgaccccagcagccccgacagcctgcactacctgagccccaccggcgtgaacgagtacctgatggccctgtggagcgtgggcagcgtggtgcaggactacgacagcgacaagctgttccccgccttcggcttcggcgcccaggtgccccccgactggcaggtgagccacgagttcgccctgaacttcaaccccagcaacccctactgcgccggcatccagggcatcgtggacgcctacagacaggccctgccccaggtgagactgtacggccccaccaacttcgcccccatcatcaaccacgtggccagattcgccgcccaggccgcccaccagggcaccgccagccagtacttcatgctgctgctgctgaccgacggcgccgtgaccgacgtggaggccaccagagaggccgtggtgagagccagcaacctgcccatgagcgtgatcatcgtgggcgtgggcggcgccgacttcgaggccatggagcagctggacgccgacggcggccccctgcacaccagaagcggccaggccgccgccagagacatcgtgcagttcgtgccctacagaagattccagaacgcccccagagaggccctggcccagaccgtgctggccgaggtgcccacccagctggtgagctacttcagagcccagggctgggcccccctgaagcccctgccccccagcgccaaggaccccgcccaggccccccaggcctag

SEQ ID NO: 142057 - DNA, 1629 bp, Artificial Sequence
  derived and/or modified sequence
atgaagatgatgcacatggcccactgcgtgaccctggtgcagctgagcatcagctgcgaccacctgatcgacaaggacatcggcagcaagagcgaccccctgtgcgtgctgctgcaggacgtgggcggcggcagctgggccgagctgggcagaaccgagagagtgagaaactgcagcagccccgagttcagcaagaccctgcagctggagtacagattcgagaccgtgcagaagctgagattcggcatctacgacatcgacaacaagacccccgagctgagagacgacgacttcctgggcggcgccgagtgcagcctgggccagatcgtgagcagccaggtgctgaccctgcccctgatgctgaagcccggcaagcccgccggcagaggcaccatcaccgtgagcgcccaggagctgaaggacaacagagtggtgaccatggaggtggaggccagaaacctggacaagaaggacttcctgggcaagagcgaccccttcctggagttcttcagacagggcgacggcaagtggcacctggtgtacagaagcgaggtgatcaagaacaacctgaaccccacctggaagagattcagcgtgcccgtgcagcacttctgcggcggcaaccccagcacccccatccaggtgcagtgcagcgactacgacagcgacggcagccacgacctgatcggcaccttccacaccagcctggcccagctgcaggccgtgcccgccgagttcgagtgcatccaccccgagaagcagcagaagaagaagagctacaagaacagcggcaccatcagagtgaagatctgcagagtggagaccgagtacagcttcctggactacgtgatgggcggctgccagatcaacttcaccgtgggcgtggacttcaccggcagcaacggcgaccccagcagccccgacagcctgcactacctgagccccaccggcgtgaacgagtacctgatggccctgtggagcgtgggcagcgtggtgcaggactacgacagcgacaagctgttccccgccttcggcttcggcgcccaggtgccccccgactggcaggtgagccacgagttcgccctgaacttcaaccccagcaacccctactgcgccggcatccagggcatcgtggacgcctacagacaggccctgccccaggtgagactgtacggccccaccaacttcgcccccatcatcaaccacgtggccagattcgccgcccaggccgcccaccagggcaccgccagccagtacttcatgctgctgctgctgaccgacggcgccgtgaccgacgtggaggccaccagagaggccgtggtgagagccagcaacctgcccatgagcgtgatcatcgtgggcgtgggcggcgccgacttcgaggccatggagcagctggacgccgacggcggccccctgcacaccagaagcggccaggccgccgccagagacatcgtgcagttcgtgccctacagaagattccagaacgcccccagagaggccctggcccagaccgtgctggccgaggtgcccacccagctggtgagctacttcagagcccagggctgggcccccctgaagcccctgccccccagcgccaaggaccccgcccaggccccccaggcctag

SEQ ID NO: 142058 - DNA, 2204 bp, Artificial Sequence
  derived and/or modified sequence
cggagccgctgagcgggccgacggccattttgtgaagcggcgaaggaggtggtggctgcgttgggctccgggaagccgttcgggctggggctgtcggccgcggggcggaggcactcgcgcggggggtaattcggggtctgggttctggtgccgcgcagctttccccgtctaaaagttggttttaattggttgcccacaggattgacttggcctctacttcttgttaaggaaattcatctcttgttttatcaggtgtgtgtggtttcagcgcagcatggctgtggtcatccgtttgcaaggtctcccaattgtggcggggaccatggacattcgccacttcttctctggattgaccattcctgatgggggcgtgcatattgtagggggtgaactggatggcccactgcgtgaccttggttcagctgtccatttcctgtgaccatctcattgacaaggacatcggctccaagtctgacccactctgcgtccttttacaggatgtgggagggggcagctgggctgagcttggccggactgaacgggtgcggaactgctcaagccctgagttctccaagactctacagcttgagtaccgctttgagacagtccagaagctacgctttggaatctatgacatagacaacaagacgccagagctgagggatgatgacttcctagggggtgctgagtgttccctaggacagattgtgtccagccaggtactgactctccccttgatgctgaagcctggaaaacctgctgggcgggggaccatcacggtctcagctcaggaattaaaggacaatcgtgtagtaaccatggaggtagaggccagaaacctagataagaaggacttcctgggaaaatcagatccatttctggagttcttccgccagggtgatgggaaatggcacctggtgtacagatctgaggtcatcaagaacaacctgaaccctacatggaagcgtttctcagtccccgttcagcatttctgtggtgggaaccccagcacacccatccaggtgcaatgctccgattatgacagtgacgggtcacatgatctcatcggtaccttccacaccagcttggcccagctgcaggcagtcccggctgagtttgaatgcatccaccctgagaagcagcagaaaaagaaaagctacaagaactctggaactatccgtgtcaagatttgtcgggtagaaacagagtactcctttctggactatgtgatgggaggctgtcagatcaacttcactgtgggcgtggacttcactggctccaatggagacccctcctcacctgactccctacactacctgagtccaacaggggtcaatgagtacctgatggcactgtggagtgtgggcagcgtggttcaggactatgactcagacaagctgttccctgcatttggatttggggcccaggttccccctgactggcaggtctcgcatgaatttgccttgaatttcaaccccagtaacccctactgtgcaggcatccagggcattgtggatgcctaccgccaagccctgccccaagttcgcctctatggccctaccaactttgcacccatcatcaaccatgtggccaggtttgcagcccaggctgcacatcaggggactgcctcgcaatacttcatgctgttgctgctgactgatggtgctgtgacggatgtggaagccacacgtgaggctgtggtgcgtgcctcgaacctgcccatgtcagtgatcattgtgggtgtgggtggtgctgactttgaggccatggagcagctggacgctgatggtggacccctgcatacacgttctgggcaggctgctgcccgcgacattgtgcagtttgtaccctaccgccggttccagaatgcccctcgggaggcattggcacagaccgtgctcgcagaagtgcccacacaactggtctcatacttcagggcccagggttgggccccgctcaagccacttccaccctcagccaaggatcctgcacaggccccccaggcctaggttcccttggaggctgtggcaagtcctcaatcctgtgtcccagaggtccctctgggccacaacccaacccttctcactctcctcagtgctagcactttgtattttttgatacttttatacttgtttctgcttttgctgctcttgatcccacctttgctcctgacaaccctcattcaataaagaccagtgaagacc

SEQ ID NO: 142059 - DNA, 1961 bp, Artificial Sequence
  derived and/or modified sequence
caaatattccattcagcattacaaagatggatgttcttcagttcctagaaggaatcccagtggatgaaaatgctgtacatgttcttgttgataacaatgggcaaggtctaggacaggcattggttcagtttaaaaatgaagatgatgcacatggcccactgcgtgaccttggttcagctgtccatttcctgtgaccatctcattgacaaggacatcggctccaagtctgacccactctgcgtccttttacaggatgtgggagggggcagctgggctgagcttggccggactgaacgggtgcggaactgctcaagccctgagttctccaagactctacagcttgagtaccgctttgagacagtccagaagctacgctttggaatctatgacatagacaacaagacgccagagctgagggatgatgacttcctagggggtgctgagtgttccctaggacagattgtgtccagccaggtactgactctccccttgatgctgaagcctggaaaacctgctgggcgggggaccatcacggtctcagctcaggaattaaaggacaatcgtgtagtaaccatggaggtagaggccagaaacctagataagaaggacttcctgggaaaatcagatccatttctggagttcttccgccagggtgatgggaaatggcacctggtgtacagatctgaggtcatcaagaacaacctgaaccctacatggaagcgtttctcagtccccgttcagcatttctgtggtgggaaccccagcacacccatccaggtgcaatgctccgattatgacagtgacgggtcacatgatctcatcggtaccttccacaccagcttggcccagctgcaggcagtcccggctgagtttgaatgcatccaccctgagaagcagcagaaaaagaaaagctacaagaactctggaactatccgtgtcaagatttgtcgggtagaaacagagtactcctttctggactatgtgatgggaggctgtcagatcaacttcactgtgggcgtggacttcactggctccaatggagacccctcctcacctgactccctacactacctgagtccaacaggggtcaatgagtacctgatggcactgtggagtgtgggcagcgtggttcaggactatgactcagacaagctgttccctgcatttggatttggggcccaggttccccctgactggcaggtctcgcatgaatttgccttgaatttcaaccccagtaacccctactgtgcaggcatccagggcattgtggatgcctaccgccaagccctgccccaagttcgcctctatggccctaccaactttgcacccatcatcaaccatgtggccaggtttgcagcccaggctgcacatcaggggactgcctcgcaatacttcatgctgttgctgctgactgatggtgctgtgacggatgtggaagccacacgtgaggctgtggtgcgtgcctcgaacctgcccatgtcagtgatcattgtgggtgtgggtggtgctgactttgaggccatggagcagctggacgctgatggtggacccctgcatacacgttctgggcaggctgctgcccgcgacattgtgcagtttgtaccctaccgccggttccagaatgcccctcgggaggcattggcacagaccgtgctcgcagaagtgcccacacaactggtctcatacttcagggcccagggttgggccccgctcaagccacttccaccctcagccaaggatcctgcacaggccccccaggcctaggttcccttggaggctgtggcaagtcctcaatcctgtgtcccagaggtccctctgggccacaacccaacccttctcactctcctcagtgctagcactttgtattttttgatacttttatacttgtttctgcttttgctgctcttgatcccacctttgctcctgacaaccctcattcaataaagaccagtgaagaccaa

SEQ ID NO: 142060 - DNA, 2147 bp, Artificial Sequence
  derived and/or modified sequence
cgaaggaggtggtggctgcgttgggctccgggaagccgttcgggctggggctgtcggccgcggggcggaggcactcgcgcggggggtaattcggggtctgggttctggtgccgcgcagctttccccggattgacttggcctctacttcttgttaaggaaattcatctcttgttttatcaggtgtgtgtggtttcagcgcagcatggctgtggtcatccgtttgcaaggtctcccaattgtggcggggaccatggacattcgccacttcttctctggattgaccattcctgatgggggcgtgcatattgtagggggtgaactggatggcccactgcgtgaccttggttcagctgtccatttcctgtgaccatctcattgacaaggacatcggctccaagtctgacccactctgcgtccttttacaggatgtgggagggggcagctgggctgagcttggccggactgaacgggtgcggaactgctcaagccctgagttctccaagactctacagcttgagtaccgctttgagacagtccagaagctacgctttggaatctatgacatagacaacaagacgccagagctgagggatgatgacttcctagggggtgctgagtgttccctaggacagattgtgtccagccaggtactgactctccccttgatgctgaagcctggaaaacctgctgggcgggggaccatcacggtctcagctcaggaattaaaggacaatcgtgtagtaaccatggaggtagaggccagaaacctagataagaaggacttcctgggaaaatcagatccatttctggagttcttccgccagggtgatgggaaatggcacctggtgtacagatctgaggtcatcaagaacaacctgaaccctacatggaagcgtttctcagtccccgttcagcatttctgtggtgggaaccccagcacacccatccaggtgcaatgctccgattatgacagtgacgggtcacatgatctcatcggtaccttccacaccagcttggcccagctgcaggcagtcccggctgagtttgaatgcatccaccctgagaagcagcagaaaaagaaaagctacaagaactctggaactatccgtgtcaagatttgtcgggtagaaacagagtactcctttctggactatgtgatgggaggctgtcagatcaacttcactgtgggcgtggacttcactggctccaatggagacccctcctcacctgactccctacactacctgagtccaacaggggtcaatgagtacctgatggcactgtggagtgtgggcagcgtggttcaggactatgactcagacaagctgttccctgcatttggatttggggcccaggttccccctgactggcaggtctcgcatgaatttgccttgaatttcaaccccagtaacccctactgtgcaggcatccagggcattgtggatgcctaccgccaagccctgccccaagttcgcctctatggccctaccaactttgcacccatcatcaaccatgtggccaggtttgcagcccaggctgcacatcaggggactgcctcgcaatacttcatgctgttgctgctgactgatggtgctgtgacggatgtggaagccacacgtgaggctgtggtgcgtgcctcgaacctgcccatgtcagtgatcattgtgggtgtgggtggtgctgactttgaggccatggagcagctggacgctgatggtggacccctgcatacacgttctgggcaggctgctgcccgcgacattgtgcagtttgtaccctaccgccggttccagaatgcccctcgggaggcattggcacagaccgtgctcgcagaagtgcccacacaactggtctcatacttcagggcccagggttgggccccgctcaagccacttccaccctcagccaaggatcctgcacaggccccccaggcctaggttcccttggaggctgtggcaagtcctcaatcctgtgtcccagaggtccctctgggccacaacccaacccttctcactctcctcagtgctagcactttgtattttttgatacttttatacttgtttctgcttttgctgctcttgatcccacctttgctcctgacaaccctcattcaataaagaccagtgaagaccaatgctttgccacca

SEQ ID NO: 142061 - DNA, 1976 bp, Artificial Sequence
  derived and/or modified sequence
cggagccgctgagcgggccgacggccattttgtgaagcggcgaaggaggtggtggctgcgttgggctccgggaagccgttcgggctggggctgtcggccgcggggcggaggcactcgcgcggggggtaattcggggtctgggttctggtgccgcgcagctttccccgatggcccactgcgtgaccttggttcagctgtccatttcctgtgaccatctcattgacaaggacatcggctccaagtctgacccactctgcgtccttttacaggatgtgggagggggcagctgggctgagcttggccggactgaacgggtgcggaactgctcaagccctgagttctccaagactctacagcttgagtaccgctttgagacagtccagaagctacgctttggaatctatgacatagacaacaagacgccagagctgagggatgatgacttcctagggggtgctgagtgttccctaggacagattgtgtccagccaggtactgactctccccttgatgctgaagcctggaaaacctgctgggcgggggaccatcacggtctcagctcaggaattaaaggacaatcgtgtagtaaccatggaggtagaggccagaaacctagataagaaggacttcctgggaaaatcagatccatttctggagttcttccgccagggtgatgggaaatggcacctggtgtacagatctgaggtcatcaagaacaacctgaaccctacatggaagcgtttctcagtccccgttcagcatttctgtggtgggaaccccagcacacccatccaggtgcaatgctccgattatgacagtgacgggtcacatgatctcatcggtaccttccacaccagcttggcccagctgcaggcagtcccggctgagtttgaatgcatccaccctgagaagcagcagaaaaagaaaagctacaagaactctggaactatccgtgtcaagatttgtcgggtagaaacagagtactcctttctggactatgtgatgggaggctgtcagatcaacttcactgtgggcgtggacttcactggctccaatggagacccctcctcacctgactccctacactacctgagtccaacaggggtcaatgagtacctgatggcactgtggagtgtgggcagcgtggttcaggactatgactcagacaagctgttccctgcatttggatttggggcccaggttccccctgactggcaggtctcgcatgaatttgccttgaatttcaaccccagtaacccctactgtgcaggcatccagggcattgtggatgcctaccgccaagccctgccccaagttcgcctctatggccctaccaactttgcacccatcatcaaccatgtggccaggtttgcagcccaggctgcacatcaggggactgcctcgcaatacttcatgctgttgctgctgactgatggtgctgtgacggatgtggaagccacacgtgaggctgtggtgcgtgcctcgaacctgcccatgtcagtgatcattgtgggtgtgggtggtgctgactttgaggccatggagcagctggacgctgatggtggacccctgcatacacgttctgggcaggctgctgcccgcgacattgtgcagtttgtaccctaccgccggttccagaatgcccctcgggaggcattggcacagaccgtgctcgcagaagtgcccacacaactggtctcatacttcagggcccagggttgggccccgctcaagccacttccaccctcagccaaggatcctgcacaggccccccaggcctaggttcccttggaggctgtggcaagtcctcaatcctgtgtcccagaggtccctctgggccacaacccaacccttctcactctcctcagtgctagcactttgtattttttgatacttttatacttgtttctgcttttgctgctcttgatcccacctttgctcctgacaaccctcattcaataaagaccagtgaagacc

SEQ ID NO: 142062 - DNA, 2061 bp, Artificial Sequence
  derived and/or modified sequence
cggagccgctgagcgggccgacggccattttgtgaagcggcgaaggaggtggtggctgcgttgggctccgggaagccgttcgggctggggctgtcggccgcggggcggaggcactcgcgcggggggtaattcggggtctgggttctggtgccgcgcagctttccccgtctaaaagttggttttaattggttgcccacaggattgacttggcctctacttcttgttaaggaaattcatctcttgttttatcagatggcccactgcgtgaccttggttcagctgtccatttcctgtgaccatctcattgacaaggacatcggctccaagtctgacccactctgcgtccttttacaggatgtgggagggggcagctgggctgagcttggccggactgaacgggtgcggaactgctcaagccctgagttctccaagactctacagcttgagtaccgctttgagacagtccagaagctacgctttggaatctatgacatagacaacaagacgccagagctgagggatgatgacttcctagggggtgctgagtgttccctaggacagattgtgtccagccaggtactgactctccccttgatgctgaagcctggaaaacctgctgggcgggggaccatcacggtctcagctcaggaattaaaggacaatcgtgtagtaaccatggaggtagaggccagaaacctagataagaaggacttcctgggaaaatcagatccatttctggagttcttccgccagggtgatgggaaatggcacctggtgtacagatctgaggtcatcaagaacaacctgaaccctacatggaagcgtttctcagtccccgttcagcatttctgtggtgggaaccccagcacacccatccaggtgcaatgctccgattatgacagtgacgggtcacatgatctcatcggtaccttccacaccagcttggcccagctgcaggcagtcccggctgagtttgaatgcatccaccctgagaagcagcagaaaaagaaaagctacaagaactctggaactatccgtgtcaagatttgtcgggtagaaacagagtactcctttctggactatgtgatgggaggctgtcagatcaacttcactgtgggcgtggacttcactggctccaatggagacccctcctcacctgactccctacactacctgagtccaacaggggtcaatgagtacctgatggcactgtggagtgtgggcagcgtggttcaggactatgactcagacaagctgttccctgcatttggatttggggcccaggttccccctgactggcaggtctcgcatgaatttgccttgaatttcaaccccagtaacccctactgtgcaggcatccagggcattgtggatgcctaccgccaagccctgccccaagttcgcctctatggccctaccaactttgcacccatcatcaaccatgtggccaggtttgcagcccaggctgcacatcaggggactgcctcgcaatacttcatgctgttgctgctgactgatggtgctgtgacggatgtggaagccacacgtgaggctgtggtgcgtgcctcgaacctgcccatgtcagtgatcattgtgggtgtgggtggtgctgactttgaggccatggagcagctggacgctgatggtggacccctgcatacacgttctgggcaggctgctgcccgcgacattgtgcagtttgtaccctaccgccggttccagaatgcccctcgggaggcattggcacagaccgtgctcgcagaagtgcccacacaactggtctcatacttcagggcccagggttgggccccgctcaagccacttccaccctcagccaaggatcctgcacaggccccccaggcctaggttcccttggaggctgtggcaagtcctcaatcctgtgtcccagaggtccctctgggccacaacccaacccttctcactctcctcagtgctagcactttgtattttttgatacttttatacttgtttctgcttttgctgctcttgatcccacctttgctcctgacaaccctcattcaataaagaccagtgaagacc

SEQ ID NO: 142063 - DNA, 2077 bp, Artificial Sequence
  derived and/or modified sequence
cggagccgctgagcgggccgacggccattttgtgaagcggcgaaggaggtggtggctgcgttgggctccgggaagccgttcgggctggggctgtcggccgcggggcggaggcactcgcgcggggggtgtgtgtggtttcagcgcagcatggctgtggtcatccgtttgcaaggtctcccaattgtggcggggaccatggacattcgccacttcttctctggattgaccattcctgatgggggcgtgcatattgtagggggtgaactggatggcccactgcgtgaccttggttcagctgtccatttcctgtgaccatctcattgacaaggacatcggctccaagtctgacccactctgcgtccttttacaggatgtgggagggggcagctgggctgagcttggccggactgaacgggtgcggaactgctcaagccctgagttctccaagactctacagcttgagtaccgctttgagacagtccagaagctacgctttggaatctatgacatagacaacaagacgccagagctgagggatgatgacttcctagggggtgctgagtgttccctaggacagattgtgtccagccaggtactgactctccccttgatgctgaagcctggaaaacctgctgggcgggggaccatcacggtctcagctcaggaattaaaggacaatcgtgtagtaaccatggaggtagaggccagaaacctagataagaaggacttcctgggaaaatcagatccatttctggagttcttccgccagggtgatgggaaatggcacctggtgtacagatctgaggtcatcaagaacaacctgaaccctacatggaagcgtttctcagtccccgttcagcatttctgtggtgggaaccccagcacacccatccaggtgcaatgctccgattatgacagtgacgggtcacatgatctcatcggtaccttccacaccagcttggcccagctgcaggcagtcccggctgagtttgaatgcatccaccctgagaagcagcagaaaaagaaaagctacaagaactctggaactatccgtgtcaagatttgtcgggtagaaacagagtactcctttctggactatgtgatgggaggctgtcagatcaacttcactgtgggcgtggacttcactggctccaatggagacccctcctcacctgactccctacactacctgagtccaacaggggtcaatgagtacctgatggcactgtggagtgtgggcagcgtggttcaggactatgactcagacaagctgttccctgcatttggatttggggcccaggttccccctgactggcaggtctcgcatgaatttgccttgaatttcaaccccagtaacccctactgtgcaggcatccagggcattgtggatgcctaccgccaagccctgccccaagttcgcctctatggccctaccaactttgcacccatcatcaaccatgtggccaggtttgcagcccaggctgcacatcaggggactgcctcgcaatacttcatgctgttgctgctgactgatggtgctgtgacggatgtggaagccacacgtgaggctgtggtgcgtgcctcgaacctgcccatgtcagtgatcattgtgggtgtgggtggtgctgactttgaggccatggagcagctggacgctgatggtggacccctgcatacacgttctgggcaggctgctgcccgcgacattgtgcagtttgtaccctaccgccggttccagaatgcccctcgggaggcattggcacagaccgtgctcgcagaagtgcccacacaactggtctcatacttcagggcccagggttgggccccgctcaagccacttccaccctcagccaaggatcctgcacaggccccccaggcctaggttcccttggaggctgtggcaagtcctcaatcctgtgtcccagaggtccctctgggccacaacccaacccttctcactctcctcagtgctagcactttgtattttttgatacttttatacttgtttctgcttttgctgctcttgatcccacctttgctcctgacaaccctcattcaataaagaccagtgaagacc

SEQ ID NO: 142064 - DNA, 400 bp, Artificial Sequence
  derived and/or modified sequence
tgagcctgcgtaccgaagtggggacgaggccatagcgaggactcccccgtggtctgagagggggcaggccagagctggctggctcagcggcctgcgagctaacggggactgcagtaaaaacacgcctacatcccgagtacggaggatttcttgtctcccccagtgaagcagaggttataactacatctctgtgcctggagatggcccactgcgtgaccttggttcagctgtccatttcctgtgaccatctcattgacaaggacatcggctccaagtctgacccactctgcgtccttttacaggatgtgggagggggcagctgggctgagcttggccggactgaacgggtgcggaactgctcaagccctgagttctccaagactctacagcttgagtaccg

SEQ ID NO: 142065 - DNA, 1614 bp, Artificial Sequence
  derived and/or modified sequence
atggctcactgcgtcaccctggtccagctgagcatttcttgtgatcatctgattgacaaagacattggctccaagagcgatccattatgcgtgctgctacaggatgtcggcggcggcagctgggctgagttagggaggactgaaagggtgcgcaattgctccagtcctgagttctctaagacattgcagctagaatacagattcgagacagtgcagaaacttcgctttggcatttacgacattgacaataagaccccagaattgagggatgacgattttctcggtggcgcagagtgcagcctgggtcaaattgtgtccagccaagtcttgacactccctctgatgctgaaacctggcaagccagcgggcaggggcacaatcacggtgtctgcgcaggaactaaaggacaaccgtgtggtcacaatggaggtcgaagcacggaatctcgataagaaggactttttaggcaagtctgatccctttttggaattctttaggcagggcgacggcaaatggcacctggtgtacagatcagaagttatcaagaacaatttaaatccaacatggaagcggttttctgtccccgttcagcacttctgcggcggaaacccttccacccccatccaggtccagtgtagtgattacgattctgatggttcacatgatctcattgggacatttcacactagcctggcccagctccaagcagtccccgcagaattcgaatgcattcaccccgagaagcagcagaagaagaagtcttacaaaaactctgggactattcgcgtgaagatatgccgcgtggaaacggagtatagcttcctggattatgtcatgggtgggtgccagattaattttaccgtgggagtcgattttacgggctctaatggcgatccaagctcccccgactctctgcactatctctccccaacaggagtaaacgaatacttaatggcactatggagcgtgggctccgtagttcaggactacgactccgataaactcttccctgcctttggctttggcgctcaggtccctcctgattggcaggtcagtcacgaatttgctctgaatttcaatccctcaaacccatattgtgcgggtattcagggcatcgtcgacgcctaccgtcaagccctgccacaggtgcgcctgtatggccctacaaactttgctcccatcatcaaccatgtggcaaggtttgccgcgcaggccgctcaccagggaactgcttcccagtatttcatgctgttactgctgaccgacggtgctgtaaccgacgtcgaagccacccgggaggcagtggtgagagcgtccaacttaccaatgagcgtgataatagtgggggtggggggcgctgactttgaggcaatggaacaattggatgcagatggagggcctcttcacacccgctctggccaagccgccgctcgggatatcgtgcagttcgtcccctatagaagatttcagaacgcgcccagggaggcccttgcacagacggtgttggccgaggtcccaactcagcttgtctcttacttcagagctcagggatgggctcctcttaaaccccttcctccaagcgctaaggatcccgcacaggcccctcaggcatag

SEQ ID NO: 142066 - DNA, 1629 bp, Artificial Sequence
  derived and/or modified sequence
atgaaaatgatgcatatggctcactgtgtgacactggtccaactgtctatctcctgtgaccatttgattgataaagacataggcagtaaatccgaccctctgtgcgtgctcctgcaggacgtcgggggcggtagttgggccgagttaggaagaacagaaagagtgagaaactgtagttcgcccgagtttagtaagacactccagctcgaatacagattcgagacagtacagaagctccggtttggcatatacgatatcgataacaagacacccgagctgagggacgacgacttcttgggcggcgcggagtgctccctagggcagattgtttcgtctcaggttctgacacttccgttaatgttgaagcccggcaagcctgcagggagaggtacaattacggtgtctgcgcaggaactgaaggataatagggtggttaccatggaagtggaagcaagaaatctggacaagaaggacttcctggggaaaagtgatccattccttgagtttttccgacagggcgatggtaaatggcacttggtctacagatctgaagtcataaagaataacctaaaccctacatggaagcgtttttctgtgccggtgcaacatttctgcggaggtaacccgtccacaccaattcaggtgcagtgctccgactatgactcagacggaagccatgacttaatcggcacatttcacacttctctggcccagttacaagctgtcccagccgagtttgaatgcattcaccccgaaaagcagcagaagaaaaaatcctacaagaactcaggaactatccgcgttaaaatttgcagagtagagaccgaatactcatttctggactatgtcatggggggctgtcagatcaacttcaccgtgggtgtagatttcacaggatctaatggcgatccttcctcccctgactcactccactacttgagtccgaccggagtaaatgaatatctgatggccctgtggtccgttggctcagtggtccaggactacgactctgacaaactctttccagcattcgggttcggcgctcaggtgcctcccgactggcaggtatcccacgaattcgcccttaacttcaatccatcaaatccctattgtgctggcatccagggaatcgtcgacgcctatcgccaggctctgccccaggttaggctctacggaccaaccaacttcgcacccattatcaaccacgtggcccggttcgccgcccaggctgcccaccagggtaccgccagccagtatttcatgcttttgctgcttactgacggcgccgtgactgatgtggaagcaactcgagaggcggttgtgagagcttctaacctccccatgagtgtcatcatagtgggggtgggaggggctgacttcgaagcaatggaacagttagacgccgatggagggccactgcatactagatcaggacaagctgctgctagggacatcgtccagtttgtgccttaccgccgctttcagaacgccccccgcgaggccttagcccagaccgtgttggctgaggttcctacccagcttgtttcttactttcgggcccagggctgggcaccgctgaaacctctgcccccctctgcaaaagaccctgcacaggctccccaggcatag

SEQ ID NO: 142067 - DNA, 1614 bp, Artificial Sequence
  derived and/or modified sequence
atggcccactgtgtgacactggtccagctgagcatcagctgcgatcatctaattgacaaggatattgggagtaagagtgaccccctgtgcgtgctcttacaagacgtgggcggtgggtcctgggcagagctgggcaggaccgagcgtgtgaggaactgcagctccccagaattttccaagaccctccaactcgaataccgctttgaaacagtgcaaaagctccggttcggcatctacgacatagacaacaagactccagaactgcgggatgatgacttcctgggcggagccgaatgtagtctcggccagatagtgagctcccaggtgcttaccctgccactgatgttgaaacccggaaaacctgcaggaagaggaacaatcactgtgtcagctcaggagctgaaggataatcgcgtggtcactatggaggtggaggctcggaatcttgataaaaaggactttctaggtaagtccgacccttttctggagttctttcgccagggcgacggtaaatggcacttagtgtatagatcagaggtgataaaaaacaacttaaatccgacctggaaacgcttcagtgtacctgtgcaacacttctgtggaggtaacccatcaacgcctatacaagtccaatgctccgactacgacagcgacggctcacatgacctaataggaacttttcatacctccctggcccagttgcaggccgttcctgctgagttcgagtgtatccaccccgagaaacaacaaaagaaaaaatcttacaaaaacagcggaacgatccgggtcaagatatgccgcgtggagacggagtactcattcctagattacgttatgggtggctgccagatcaactttacggtgggtgttgatttcactggcagcaatggagaccctagttcacctgattcactccactacctctcccccacaggcgtgaatgagtatctgatggccctgtggagtgtcgggagcgtggtacaggactacgactccgacaaactcttccctgcgtttgggttcggagcccaggtcccccccgactggcaagtaagccacgagtttgccctgaatttcaaccctagtaacccttattgcgccggcatacagggcatcgtggatgcctacaggcaggcccttcctcaggtgaggctgtacggcccaactaatttcgctcctatcattaaccatgtggcaaggtttgccgctcaggccgctcaccagggtacagcctcgcaatattttatgctcctcttactgaccgacggcgctgttaccgatgttgaagcaacacgcgaggctgttgtcagagcgtctaatctgcccatgagtgtgatcatcgtgggcgtcggaggtgccgacttcgaggcaatggagcagttggacgccgacggggggccccttcatacaaggtccggtcaggccgccgcgcgggatatcgtccagtttgtgccctatcggcgatttcagaacgcaccccgggaagctctggcccaaaccgtgctggccgaagtgccaactcagttagtaagctacttcagagcccagggctgggctcccctcaagccattaccaccctccgcgaaagatccggctcaggctcctcaagcttag

SEQ ID NO: 142068 - DNA, 1614 bp, Artificial Sequence
  derived and/or modified sequence
atggcgcattgtgtgacattggttcagctgtctattagttgcgaccatctgattgacaaggacattgggtcaaaatccgatccattgtgcgtcctgttgcaagacgttggaggaggctcctgggctgagctcggccgtactgagcgagtcagaaattgctcgagtccagagttctccaagactctacagctggagtatcggtttgagactgttcagaagctgcgcttcggcatttatgacatcgacaacaagacccctgagctgagggatgatgattttcttggcggtgctgagtgttcgctggggcagattgtaagctctcaagtgcttactctcccactgatgcttaagcccggcaagcccgcaggcaggggcactatcacagtctcagcacaggagttgaaagataacagagtagtgacaatggaagtggaggctcgcaatcttgacaaaaaagactttctcggtaaatccgacccttttctggaattcttcagacagggcgatgggaagtggcatctggtgtacagatcagaggtcatcaaaaacaatctcaacccaacctggaagagattcagcgttccagtccagcatttttgtggcggtaatccttcaactcctattcaagtgcaatgctctgactacgactccgatggaagccacgacctcataggcacatttcatactagcctagctcagctgcaggctgttccagcggaatttgaatgcatccacccggaaaaacagcagaaaaaaaaaagctataaaaacagcggcacgattagagtaaagatctgcagagtagagactgagtatagctttctggactatgtcatggggggttgccagattaactttactgttggtgtggacttcacaggcagtaatggagaccccagttcccccgattccctccactacctgtcccccactggagtgaatgagtatctcatggcactttggtccgtgggatctgtcgttcaggactatgattccgataaactgttccctgcttttggcttcggagcacaggtgcctcctgactggcaggtcagtcacgaattcgccttaaattttaatccatccaatccatattgcgccggaattcaggggatcgtggatgcctaccggcaagccttaccccaggtgaggctgtacggccccaccaattttgccccaatcatcaaccatgtagcaaggttcgcggcccaggcggcgcaccaagggacagcatcccagtatttcatgctgctacttttgactgacggcgccgtgaccgacgtggaagctacgcgcgaggcagtcgtgcgcgcctcaaacctcccgatgtctgtgatcatcgtcggcgtggggggcgccgacttcgaggccatggagcaactggatgctgatggtggtcctctccacacacgctccgggcaagcggccgcccgcgacatcgtgcagttcgttccatatcggagattccagaacgcccctcgcgaggcactggctcaaacggtgctggcggaagtccccacacagctggtgtcatactttagagcccagggctgggcccctcttaagcctttacctccatccgctaaagatccggcacaagcaccccaagcttag

SEQ ID NO: 142069 - DNA, 1614 bp, Artificial Sequence
  derived and/or modified sequence
atggcgcattgtgtcactctggtccaacttagcatcagttgtgaccatctgatcgacaaggacatcgggtcaaagtctgaccccctgtgcgtgctcctgcaggatgtgggcggtggctcatgggcagaattagggagaaccgaacgagtgcgcaattgctcaagtccggagttcagtaaaacactccagctggaatatcgcttcgaaaccgtgcagaaactcagattcggcatatatgatatcgataataaaacccctgagctcagggatgacgatttcttggggggggcagagtgtagtttggggcagatagtgtcctctcaagtgcttaccttgcctttgatgctaaagcctggaaagccagcgggaaggggaactatcactgtcagcgcacaggaactgaaggacaatagagtggtgactatggaggtggaagctcgcaacctggacaagaaggacttcctcggtaagagcgaccccttcctcgagttcttccgtcaaggagacgggaagtggcatctcgtttatagatccgaagtgataaaaaacaacctcaacccgacctggaaacgattcagtgtgcccgttcagcacttctgcggcggcaatccctccacgcctatccaggtgcagtgttcagactacgacagcgatggaagccacgatttgattgggacattccatactagcctcgcacaactccaggcggtccctgccgagttcgaatgcatacacccggagaagcaacagaagaaaaaatcctataaaaatagcgggaccatcagagttaaaatctgccgcgtggagacggaatattcctttctggattacgtcatgggtggctgtcagattaactttacagttggagtggatttcaccggttccaacggggatccctcttcccctgacagtcttcattatctgtcgccaactggggtcaacgagtatctgatggccctgtggtcagtagggtcggtggtccaggactatgatagtgacaaattatttcccgccttcggattcggcgcacaagtgccccccgactggcaggtgtcacacgagttcgccctcaatttcaatccttcaaacccctactgtgccggtatccagggcattgttgacgcataccgccaggcccttccccaggtgcgcctgtacggaccaaccaacttcgcccctatcataaatcatgtcgcccgctttgctgcgcaagccgcacatcagggaaccgcttcccaatacttcatgctgctgcttctgacagatggggctgtcaccgatgtcgaggctaccagggaggctgtggtgagggcttcaaatctgcccatgtcagttattatagtgggcgttggcggcgcagatttcgaagccatggagcagctcgacgccgatggcggcccccttcacactcgatccggacaggctgctgctagggatatagtccagtttgttccatatcgcaggtttcagaatgctcccagagaagccctcgctcagaccgtcctcgccgaagtgcccacacagctagtgagttatttccgcgcccaaggatgggcaccgctgaagccgctgccacccagcgcgaaggatcccgcccaggcccctcaggcctag

SEQ ID NO: 142070 - DNA, 1614 bp, Artificial Sequence
  derived and/or modified sequence
atggcccattgtgtgaccctggtccaattatccatctcctgcgaccatctgatagacaaggatatcgggtcgaagagcgaccccttatgcgtgctgctgcaggacgtaggggggggatcatgggctgagctgggtagaacagaaagggtgagaaactgctcatcgccggaattcagcaaaacactccagctggagtacaggtttgagaccgtacagaaactcaggtttgggatctacgatatcgataacaaaacaccagagttgagggatgatgacttcctcggaggggcagaatgctctttaggacaaatcgtttcttcacaagtgctgactctgccattgatgctcaaacccggtaagccagccggccgcggcacaatcacagtgtctgcccaagagcttaaagataatcgggtcgtgactatggaggtggaggctaggaatctagacaaaaaggatttcctggggaagtctgacccctttttagagttctttcgccaaggtgatggcaagtggcatctcgtctacagaagtgaggttattaaaaataatctaaacccaacctggaaaaggttctcagttcctgtacagcacttttgtggtggaaatccctccacaccgatccaggttcagtgctctgactacgatagtgacggttcccacgatcttatagggactttccatacttcacttgcacagctgcaggcggtacccgccgagtttgagtgtatacaccccgaaaaacaacagaagaagaaatcctacaaaaattctggaacgattcgggttaagatttgtcgcgtggaaactgagtattcgttccttgactacgtgatgggtggctgccagattaatttcacggttggtgtggactttaccggaagcaatggagatccaagttcacccgactccctgcactacctttcccctacaggggtcaacgaatacctcatggctttatggtcagtggggagcgtggtgcaagactacgactcagacaagctcttcccagcctttggttttggagcccaggttccaccggactggcaagtgtcacacgaattcgctctcaatttcaatccaagcaatccctattgtgctggcattcaaggaatagtcgacgcttacaggcaagcgttgcctcaggtccgtttatacggcccaacaaacttcgccccgatcattaaccacgtggccaggttcgcggcccaggctgctcaccagggcactgcctcccaatactttatgctgcttctgctgacagatggggcggttacagatgtggaagccactcgcgaagcagtggttcgggcaagtaatctgcctatgagcgtgatcatcgtgggggtcggcggcgccgacttcgaggccatggaacagctggatgcagatggaggccctctccacaccagatctggacaggcagctgctagagacatcgtgcaatttgttccttacaggcggttccagaatgcaccaagagaggcccttgctcagactgtgctcgccgaggtgccgactcagctggtaagttattttcgcgctcagggatgggccccccttaaaccactgcccccatccgccaaagacccagcgcaggccccgcaggcctag

SEQ ID NO: 142071 - DNA, 1614 bp, Artificial Sequence
  derived and/or modified sequence
atggcccactgtgtgaccctggtgcagctgagcatcagctgtgaccacctgattgacaaggacatcggcagcaagagtgaccccctgtgtgtgctgctgcaggatgtgggcggcggctcctgggccgagctgggccgcacagagcgggtgaggaactgcagcagccctgagttcagcaagaccctgcagctggagtacagatttgagaccgtgcagaagctgcgcttcggcatctatgacatcgacaacaagaccccagagctgagagatgatgacttcctgggcggcgctgagtgcagcctgggccagatcgtgagcagccaggtgctgaccctgcccctgatgctgaagccaggcaagccagctggccggggcaccatcaccgtgtctgcccaggagctgaaggacaacagagtggtgaccatggaggtggaggccaggaacctggacaagaaggacttcctgggcaagagtgaccccttcctggagttcttccggcagggagatggcaagtggcacctggtgtacagaagtgaggtgatcaagaacaacctgaaccccacctggaagcgcttctctgtgcctgtgcagcacttctgtggcggcaaccccagcacccccatccaggtgcagtgcagcgactatgacagtgatggcagccatgacctgattggcaccttccacaccagcctggcccagctgcaggccgtgcctgctgagtttgagtgcatccaccctgagaagcagcagaagaagaagagctacaagaacagcggcaccatccgggtgaagatctgccgggtggagacagagtacagcttcctggactatgtgatgggcggctgccagatcaacttcaccgtgggcgtggacttcaccggcagcaatggagaccccagcagcccagacagcctgcactacctgagccccactggagtgaatgagtacctgatggccctgtggagcgtgggctctgtggtgcaggactatgacagcgacaagctgtttcctgcctttggatttggagcccaggtgcccccagactggcaggtgtcccatgaatttgccctgaacttcaaccccagcaacccctactgtgccggcatccagggcatcgtggatgcctaccggcaggccctgccccaggtgcggctgtatggccccaccaactttgcccccatcatcaaccacgtggccaggtttgctgcccaggccgcccaccagggcacagccagccagtacttcatgctgctgctgctgacagatggagctgtgacagatgtggaggccacccgggaggccgtggtgcgggccagcaacctgcccatgtctgtcatcatcgtgggcgtgggcggcgctgactttgaggccatggagcagctggatgctgatggcggccccctgcacaccaggagcggccaggccgccgcccgggacatcgtgcagtttgtgccctaccgccgcttccagaatgccccccgggaggccctggcccagacagtgctggccgaggtgcccacccagctggtgtcctacttccgggcccagggctgggcccccctgaagcccctgcccccatctgccaaggaccctgcccaggccccccaggcctag

SEQ ID NO: 142072 - DNA, 1629 bp, Artificial Sequence
  derived and/or modified sequence
atgaagatgatgcacatggcccactgtgtgaccctggtgcagctgagcatcagctgtgaccacctgattgacaaggacatcggcagcaagagtgaccccctgtgtgtgctgctgcaggatgtgggcggcggctcctgggccgagctgggccgcacagagcgggtgaggaactgcagcagccctgagttcagcaagaccctgcagctggagtacagatttgaaacagtgcagaagctgcgcttcggcatctatgacatcgacaacaagaccccagagctgagagatgatgacttcctgggcggcgcagaatgttccctgggccagatcgtgagcagccaggtgctgaccctgcccctgatgctgaagccaggcaagccagctggccggggcaccatcaccgtgtctgcccaggagctgaaggacaacagagtggtgaccatggaggtggaggccaggaacctggacaagaaggacttcctgggcaagagtgaccccttcctggagttcttccggcagggagatggcaagtggcacctggtgtacagaagtgaggtgatcaagaacaacctgaaccccacctggaagcgcttctctgtgcctgtgcagcacttctgtggcggcaaccccagcacccccatccaggtgcagtgcagcgactatgacagtgatggcagccatgacctgattggcaccttccacaccagcctggcccagctgcaggccgtgcctgctgagtttgagtgcatccaccctgagaagcagcagaagaagaagagctacaagaacagcggcaccatccgggtgaagatctgccgggtggagacagagtacagcttcctggactatgtgatgggcggctgccagatcaacttcaccgtgggcgtggacttcaccggcagcaatggagaccccagcagcccagacagcctgcactacctgagccccaccggggtgaatgagtacctgatggccctgtggagcgtgggctctgtggtgcaggactatgacagcgacaagctgtttcctgccttcggctttggagcccaggtgcccccagactggcaggtgtcccatgaatttgccctgaacttcaaccccagcaacccctactgtgccggcatccagggcatcgtggatgcctaccggcaggccctgccccaggtgcggctgtatggccccaccaactttgcccccatcatcaaccacgtggccaggtttgctgcccaggccgcccaccagggcacagccagccagtacttcatgctgctgctgctgacagatggagctgtgacagatgtggaggccacccgggaggccgtggtgcgggccagcaacctgcccatgtctgtcatcatcgtgggcgtgggcggcgctgactttgaggccatggagcagctggatgctgatggcggccccctgcacaccaggagcggccaggccgccgcccgggacatcgtgcagtttgtgccctaccgccgcttccagaatgccccccgggaggccctggcccagacagtgctggccgaggtgcccacccagctggtgtcctacttccgggcccagggctgggcccccctgaagcccctgccccccagcgccaaggaccctgcccaggccccccaggcctag

SEQ ID NO: 142073 - DNA, 1614 bp, Artificial Sequence
  derived and/or modified sequence
atggcccactgcgtgaccctggtgcagctgagcatcagctgcgaccacctgatcgacaaggatattggtagcaaatcggaccctctgtgcgtgctactgcaggacgtaggcggcggcagctgggctgagctggggcggaccgagcgggttcgcaactgctctagccctgaattcagcaaaacgttacagctggaatatcgtttcgaaactgtgcagaagttgaggtttgggatttatgacatcgataacaagactcctgagctgagagatgatgactttctgggcggcgccgaatgtagtttgggacaaatcgtgagcagccaggtgctaaccctcccattaatgctgaagccagggaaaccggccggtcgtggcaccataaccgtgagcgctcaagaattgaaagataaccgggttgtgactatggaagtggaggccaggaacctcgacaagaaagactttctgggcaaatccgatccattcctcgagttctttcgccagggtgatgggaaatggcacctggtttatcgatccgaggtgatcaaaaacaacttaaacccaacctggaagagattctctgtgccagtacaacacttttgcggcggaaacccctcgacaccaattcaggtacaatgtagcgactacgactccgacggcagtcatgatttgataggaacatttcacacaagtctggcccagttgcaggcggtgcccgctgaatttgaatgcatccacccagagaaacagcagaagaagaaaagctacaaaaattctggtacgattcgcgtgaaaatttgccgtgtggagactgagtactccttcttagactatgtgatgggtggatgtcagatcaatttcactgttggcgtagatttcaccggaagcaacggagacccttctagccccgattccctgcactacctttcgcctacaggggtcaacgaatacctgatggcgttgtggtccgttggatcagttgtgcaggactatgacagcgacaagctgtttcctgcgtttggcttcggagctcaagtgcctcccgactggcaagtgtctcacgagtttgcactgaatttcaacccatcaaacccatactgcgccggtatacaagggatcgttgacgcgtatcgtcaggcattgccgcaggtgaggctctacggcccaaccaacttcgcaccgattattaaccacgtagccaggttcgcagcacaagccgcccaccagggaactgccagccaatacttcatgctcctgctgcttactgatggcgctgtgaccgatgttgaagctacacgggaggcggttgtgagagcgagtaacctgcccatgagtgttatcattgtaggagtcggtggggctgattttgaagccatggaacagctggacgcagatggcggacccctccacacaagatctggccaggccgcagcaagggacattgtacagtttgtgccttacaggagatttcagaacgcaccacgagaggccttggcacaaacggtcctagctgaggtgcctacacaactagtatcttacttcagagcgcagggatgggccccgctaaaaccccttcctcctagtgctaaggaccccgcacaggcaccgcaagcctag

SEQ ID NO: 142074 - DNA, 1629 bp, Artificial Sequence
  derived and/or modified sequence
atgaagatgatgcacatggcccactgcgtgaccctggtgcagctgtccatcagctgtgatcaccttatcgacaaggatatcgggtctaaatcagacccactctgcgttttgttgcaggacgtgggcggcggatcttgggccgagctggggagaactgaaagagttaggaactgctcttcacccgagttcagtaaaaccctccagctggagtaccgtttcgagaccgtgcagaaacttagattcggtatttacgacatagataacaagactccggaactcagggatgacgatttcctgggcggcgctgagtgtagccttggacaaatcgttagttcccaagtccttactctgcctttgatgctcaaaccgggcaaaccggccggcagaggaacaattactgtctcagcccaggagctcaaagacaacagggtcgtgaccatggaagtggaagctaggaatttagataaaaaggatttccttgggaagtcagaccccttcctggagttctttcggcaaggcgatgggaaatggcacctggtttacagatccgaggtgattaagaacaatctgaaccctacctggaagagattctccgttccagtgcaacatttctgtggaggaaatccctctacacctatccaggtccagtgtagcgattacgacagcgacggttctcatgatctgattgggactttccacacttctctagcacagctgcaggcagtcccagccgaattcgaatgcattcatcctgaaaagcagcagaagaagaagtcatataaaaattctgggaccatacgcgtgaaaatttgccgagtggagacggagtattcctttcttgattacgtgatgggaggctgccagatcaactttaccgtgggggtggattttacaggatctaacggagacccaagtagccctgactctctgcattatctgagcccaacaggcgtgaatgaatacctaatggccttatggagtgtgggaagcgtggtgcaagattacgactccgacaaactgttccccgcctttgggttcggggctcaggttccccccgactggcaggtgagtcacgaatttgcactgaattttaacccttcaaacccatactgcgctggtatccaggggatcgtggatgcatatcgacaggccttgccacaggtgcgtctgtacggaccaactaactttgcaccaatcatcaatcatgtcgctcgttttgctgcccaggctgcacaccagggcactgcatctcaatactttatgctacttctactgaccgacggtgccgtcacagacgtggaggccactcgagaggccgtcgtgagagcgtcaaacctgcccatgtctgtgattattgtgggggttggaggagcggatttcgaagcaatggagcaactggacgccgatggtggtcctctccacacaaggagcggccaggcagccgcacgggatattgtccagtttgtgccctaccgaaggttccagaacgccccccgagaagccctggcccagaccgtgctggccgaagttccaacacagctggtcagttatttccgcgcgcagggatgggcccccctgaagccactgcctccgtctgcaaaagacccagctcaggcgcctcaggcttag

SEQ ID NO: 142075 - DNA, 1614 bp, Artificial Sequence
  derived and/or modified sequence
atggcccactgcgtgaccctggtgcagctgagcatcagctgcgaccacctgatcgacaaggatattggaagcaagagtgaccctctctgtgtgcttttgcaggacgttgggggcgggtcttgggccgaactcggaagaacagagcgagtgaggaattgtagtagcccagagtttagcaaaaccctgcaactggaatatcggtttgaaaccgtgcagaaattgcgttttggtatttacgacattgataacaagacacccgagttaagggacgacgattttttggggggtgcagaatgctccctcggccagatcgtaagcagccaagtgctgacgcttcctctaatgctgaagccagggaagccagctggccgggggactatcactgtgtctgcccaggagcttaaggataaccgcgtggtcactatggaagtggaggcgcggaacttagacaaaaaggactttctgggcaagtctgatccatttcttgagttttttcgccagggcgatggcaaatggcacctcgtgtatcgaagcgaggtgattaagaataacctcaacccgacctggaaaaggttcagcgtgcccgtacagcatttttgcggtggcaaccccagcactcccattcaggtccagtgctcagactacgacagtgacggctcccacgatttaatcgggacgttccatacttccctggcacagcttcaagcagtgcccgccgagtttgagtgcatccaccctgaaaaacaacagaagaagaaatcttataagaattccggcaccataagggtgaagatatgtcgtgtcgagacggaatatagttttttggactatgtaatgggcggttgtcaaattaacttcacggtcggagtcgatttcacaggctccaacggtgatccctcctccccagattctctgcactatctgagccctaccggcgtaaatgaatacttgatggccctttggagtgtcggcagcgtggtccaagattatgatagtgacaaactgttccctgcctttgggttcggggctcaagtcccacccgattggcaagttagtcacgaattcgcacttaacttcaacccttcgaacccctactgcgctggtattcagggaatcgtggatgcctatagacaggccctccctcaagtgcgcctgtacggacctacaaacttcgccccaattatcaaccacgtagcccggtttgccgcccaggcagcacaccagggaacggcttcccagtatttcatgctgctgttgctcacagacggggccgtgacagacgtcgaggctaccagagaagcagtcgtgcgggctagcaacctgcccatgagcgttataattgtcggggtaggaggcgcggatttcgaggccatggaacagctggacgccgacggcgggccgctgcatacgcgttccgggcaggccgctgccagggatatagtccagtttgtcccatataggagattccagaatgccccccgagaggcccttgcgcagacagttctagccgaagtaccgacacagttggtgtcctacttccgtgcccaggggtgggctccgttaaagccactgccacctagcgccaaagatccagctcaggcacctcaggcctag

SEQ ID NO: 142076 - DNA, 1614 bp, Artificial Sequence
  derived and/or modified sequence
atggcccactgcgtgaccctggtgcagctgagcatcagctgcgaccacctcatagataaagacataggttccaaaagtgaccccctttgtgtattactgcaggatgtcgggggaggcagttgggcagagttagggcggaccgaaagagtccggaattgctcctccccagaattttccaagaccctccagctcgagtaccggtttgaaaccgtgcagaagctgagattcgggatatacgacatcgacaataagacccccgaactgcgagatgacgactttctggggggcgcagagtgctctctgggacagatcgtttcttctcaagtccttaccctgccgttgatgctgaaacctggtaagcctgccggccgggggacaattactgtgagcgctcaggaactgaaggataatcgagtcgtcaccatggaggtagaggcccggaacctggataaaaaagatttccttggcaagagtgaccccttcctggaattcttcaggcagggcgacggaaaatggcacctggtttaccgcagcgaagtgataaagaataatctgaacccgacatggaagcggtttagcgtgcccgtccaacacttctgtgggggcaacccctcaacccctatccaggttcagtgtagcgactacgactccgacggcagtcatgacctgatcggcacgtttcacacttccctggctcagcttcaggctgtgccggcggagttcgagtgcatccatcctgagaaacagcagaagaagaaatcctacaagaattcaggcaccattcgggtaaagatctgtagagtagaaaccgaatattcgttcttagattacgtcatggggggctgtcaaatcaacttcacagttggggtcgattttaccggcagcaacggggacccatcatccccggattctctgcactacctgtctcccaccggcgtgaatgagtacctcatggcactttggagtgttggttcagtggtgcaagactatgactctgataaactgtttcctgctttcggctttggcgcccaggtgccccctgactggcaagtgtctcatgaattcgccctgaacttcaatccttccaacccctactgtgcaggtatccagggaatcgtcgatgcttaccggcaggcgctgcctcaggttaggctgtatggccccacaaattttgcccctataatcaatcacgtggctagattcgctgctcaagccgcccaccaggggactgcgagccagtacttcatgctcctgcttctgaccgacggggccgtcacagacgttgaggccacgagagaagccgtggtgcgcgccagtaatcttcccatgtccgtgatcatcgttggcgtggggggcgccgactttgaggctatggaacagctagacgctgacggagggcccctgcatacgcgaagcggccaggctgcagcccgggatatagtgcagttcgtgccatatcgccgctttcaaaatgcccctagagaagccctcgcacagaccgttctggcggaagtgcccacacagttagtatcctattttcgggcacaggggtgggctcccttgaagccactgccaccttctgcgaaagatcccgctcaagctcctcaggcctag

SEQ ID NO: 142077 - DNA, 1614 bp, Artificial Sequence
  derived and/or modified sequence
atggcccactgcgtgaccctggtgcagctgagcatcagctgcgaccacttgattgacaaagatatcggaagcaaaagcgacccattgtgtgtactcctgcaagatgtggggggcggcagttgggcagagcttggcaggaccgagcgggtgagaaactgcagcagtcccgaattctcaaagaccttacagctggaatataggtttgagacagtgcaaaagttgcgctttgggatttatgatattgacaataagacccccgagctgcgggatgatgattttttgggcggagccgagtgctctctaggtcagatagtgtcatctcaggttttgacgttgcccctgatgctcaagccgggaaaacctgctggcaggggcacaattactgtgtccgcccaggagttgaaggataatagggtagtgaccatggaagtggaggccagaaacctggacaaaaaagacttcctagggaaaagcgaccctttccttgaattcttccggcaaggggacggcaaatggcatctggtgtatcggtctgaagtcatcaaaaataatcttaaccctacctggaaaaggtttagtgtaccggtccagcatttctgcggaggcaacccttctacccctattcaggtgcagtgtagtgattatgacagcgacggtagccatgacttgataggaacattccacacaagcttagcacagcttcaagcagtgccagctgagtttgaatgtattcatcccgaaaaacagcagaagaaaaagtcatataaaaattcaggcaccatcagagtgaagatctgtcgagtggaaacggagtacagtttcctggattatgtcatgggcggttgccagattaatttcacagtaggcgtcgatttcaccggatccaacggagatccatcttctccagactcacttcattacctttcccccaccggcgtgaacgagtatctaatggcactgtggtcagtgggttccgtggtccaggattacgacagcgacaagcttttccccgctttcgggttcggcgctcaggtacctcccgactggcaggtctcacacgaattcgcgctgaactttaatccctccaacccttattgtgcagggatccagggcattgtagacgcctaccgccaagccttgcctcaggttcgcctctacggaccgaccaactttgctccaatcattaaccacgtcgcccggttcgcagctcaggccgcacaccaggggacagcgagccagtattttatgcttctcctgctaaccgatggagccgttactgatgtggaagccacaagagaagccgttgtacgggcctctaacctcccaatgtcagtcatcatcgtgggtgtgggaggagccgactttgaagccatggagcaactggatgccgacggcggcccactgcataccaggtcaggccaggcggcagccagagacattgtacaattcgtgccataccggagattccagaatgctccacgcgaagccctggctcaaaccgttctggccgaggtaccgactcaactggtgtcttacttcagggctcagggctgggccccactcaagccgctgccaccatcagcgaaggatccggcccaggctcctcaggcatag

SEQ ID NO: 142078 - DNA, 1614 bp, Artificial Sequence
  derived and/or modified sequence
atggcccactgcgtgaccctggtgcagctgagcatcagctgcgaccatctcattgacaaagatatcggatcgaaatccgatcctctttgtgtactgctccaagatgtaggtggaggatcttgggcagagctggggcgtacggaacgcgtccggaactgtagttctcccgaattctccaagacccttcagctggaatacaggttcgagactgtgcagaagctccggttcgggatttacgacattgacaataagacccccgagctgcgtgacgacgactttctgggcggggcagagtgctcactgggccagatcgttagctcacaagtgctcactctgccattgatgctcaagcctggcaagcctgcaggacgcggaacaattaccgtttcagctcaggaactgaaagataaccgagtagtgactatggaagtcgaggcccgcaatctcgacaaaaaagacttcctggggaaatccgaccctttcttagagtttttccgacagggtgacggcaagtggcacctcgtgtaccgatccgaggtaatcaagaacaatttgaatcccacctggaaacggttctcagtgccagtccagcacttctgtggcgggaatccctcaacacctatccaggtgcagtgttcagattacgatagtgacggctctcatgacttgattgggacatttcataccagtttggcccagcttcaggcagtgccagcagagttcgaatgtatccaccccgagaaacaacagaagaaaaagagctataaaaatagcggcacaatcagggtgaagatctgcagggtggagaccgagtactctttcctggactacgtaatgggtggctgccagatcaattttaccgtgggcgtggatttcaccggatctaatggcgacccctcaagccccgatagcctgcactacttaagccccactggagttaacgagtatctgatggcactctggtctgtgggcagcgtcgtccaggattacgacagtgacaaattgtttccagcgttcgggtttggcgcccaagtgcctccagattggcaggtttctcacgagtttgccctcaacttcaaccctagtaacccttattgtgcagggatccaggggatcgttgatgcctacagacaagcccttcctcaggtgaggctctacggcccaaccaatttcgcccccatcatcaatcacgtggcccgatttgctgctcaggccgctcaccaaggaactgccagccagtacttcatgctgctcctgcttacggacggcgccgtcaccgatgttgaggccacccgggaagctgtggtacgtgcaagcaatttgcccatgagcgtcatcatagtcggcgtgggaggagcggacttcgaggctatggagcaattagatgctgatgggggaccactccatactcgcagcgggcaagccgcagctcgggatatagttcagttcgtgccatacaggcggttccagaacgcgccaagagaagcacttgcgcagacagtgttggccgaagtgccaactcagctggtgtcctacttcagagctcaaggatgggctcccctcaaacccctgccccccagtgctaaagacccagcgcaggcaccgcaggcctag

SEQ ID NO: 142079 - DNA, 1614 bp, Artificial Sequence
  derived and/or modified sequence
atggcccattgcgtaacgctggtgcagctgagcatttcatgtgaccatcttatcgacaaggacatagggagtaaatctgatcctctttgcgtgcttctccaagatgtggggggtggctcctgggcggaattaggcaggactgagagagtccgaaattgctccagcccagagttctctaagactctccagctcgagtatcgttttgagacggttcaaaaactccgcttcgggatttatgatatagacaataaaacgcccgagcttcgagacgacgatttcctgggcggagccgagtgctcgctggggcagatagtttcctctcaggtcctgacactcccacttatgctgaaacccggtaagccggctgggcgaggcacaattaccgtgtctgcccaggagctcaaagacaacagggtggtgaccatggaagtggaggcccgtaaccttgacaaaaaagacttcctgggtaagtccgacccttttctggagttcttcagacagggcgatggcaaatggcacctcgtttacaggagcgaggtgatcaaaaacaacctgaaccccacatggaagcggttttcagttccagtgcagcatttctgtggtgggaacccttctactccgattcaggttcagtgttcagattatgacagcgacggttcacatgatctaattggaacatttcacacatccctggctcagctgcaagccgtcccagctgagttcgaatgcattcatcctgaaaagcaacagaagaagaaatcttacaaaaactctggcactatccgcgtgaagatttgccgcgtcgaaaccgagtacagctttctcgattatgtgatgggtgggtgccagattaacttcacagtgggcgtagacttcactggctccaatggcgacccaagcagtcccgactctctgcactatctctcacccaccggcgtcaatgaatacttgatggccttatggagcgtgggttccgtggtgcaggactacgattctgacaaactattccctgcctttggcttcggggctcaagtccccccagattggcaggtgtcacatgaatttgcactgaactttaatcctagcaatccctattgtgctggtattcagggcatcgtggacgcctaccggcaagcgttgccgcaagttcgactttatggccctactaatttcgcccctattataaaccacgtggctcgtttcgccgcacaggcggcacaccagggaaccgcttcacagtactttatgctgctgctgctaacagatggagcagtcactgacgttgaagcgacacgcgaagcggtggttcgggctagcaatctgccaatgagcgtgatcatcgttggcgtaggcggagctgacttcgaggccatggaacaactggacgctgacgggggaccgctgcacactcgctccggccaggcggcagcgcgagacattgtgcagttcgtcccatacaggcgttttcagaatgcccctagggaagcactcgcccagaccgtgctcgccgaagtgcccacccaacttgtatcctatttcagagcccagggttgggcgccactgaagccacttccacccagtgctaaggatccagctcaggcccctcaggcttag

SEQ ID NO: 142080 - DNA, 1629 bp, Artificial Sequence
  derived and/or modified sequence
atgaagatgatgcatatggcgcattgtgtcactctggtgcaactgtctattagttgtgaccacctcattgacaaagacatcggcagcaaatccgaccctttgtgtgtgttgttacaggacgttgggggtggttcgtgggctgagttaggaagaactgaacgagtgcgtaattgctcctcgccagagttttcaaaaaccttgcagttagagtaccgcttcgaaactgtccaaaagctccggtttgggatctacgacattgataataaaactccggaactccgcgatgacgatttcctgggtggcgcagaatgttcccttgggcagatagtctcgtcccaggttttaacactcccactgatgctgaagccaggcaagccagccggtcgtggtaccatcacagtgtcagcacaggagctgaaggacaatagggtggtgacaatggaggtggaagccagaaaccttgataaaaaagactttctaggcaagagcgatccctttctagagttctttcgtcagggtgacggcaaatggcatttagtttatagaagtgaagtgattaagaataacttgaaccccacctggaaaagattttctgtacccgtgcagcacttctgtggcggaaacccttccacccccattcaggtccagtgcagtgattatgactccgacggcagtcacgacctaatagggacatttcacacctctctcgcacagttacaagcagtgccagcagagttcgaatgcatccacccagaaaagcaacaaaagaagaaaagctataaaaactccggcactataagagttaagatttgtcgcgttgagaccgaatattcatttttagactatgtgatgggtgggtgccagattaactttaccgtgggtgtcgatttcaccgggagcaatggcgaccctagctcacctgatagtttacactatctttcgcctacgggcgtaaacgaatatctcatggcgctatggtctgtcggatcagtggtccaggattatgatagtgacaaattgttcccagcctttggcttcggcgctcaggttccaccggactggcaggtgtcacatgagtttgcactgaactttaatccatccaatccatactgtgcaggtattcaggggatagtggacgcctataggcaggcactgccacaagtcagactttatggtcctaccaattttgcccctattattaaccatgttgctagattcgccgctcaggctgcccatcaaggtacggcttcccaatactttatgctgctactcctgacagatggcgctgtgacggacgtggaggcgaccagagaagcagttgttcgggcatccaacttacctatgtcggtcatcattgtcggtgtgggtggcgctgatttcgaggccatggagcagctcgacgccgatggcggacctctccacactcggagcggccaggccgctgccagggacattgttcagtttgtaccttacagaaggtttcaaaacgcgccacgagaggcgctggctcagacagtgctcgccgaggttcccactcagctcgtaagctattttagagctcagggttgggccccactgaaacccttgcctccctccgccaaagacccagcccaagcccctcaggcctag

SEQ ID NO: 142081 - DNA, 1614 bp, Artificial Sequence
  derived and/or modified sequence
atggcccactgtgtgacattggtgcagctttccatatcctgcgatcatctgatagataaggatatcggaagtaagagtgaccccctatgcgtgttattgcaagacgttggcggaggcagctgggcagagctcgggagaacagagcgcgtgcgaaactgctcgtccccagaattcagcaaaacattgcagctggaatatcgatttgagactgtccagaagttgaggtttggcatctacgacatagataataagacacctgaactccgagatgatgactttctaggtggggctgagtgctcactggggcaaatcgtttcatcccaagtgctgaccctccccctgatgctcaagcccggaaaacctgccggacggggaactatcaccgtttccgctcaggagttaaaagataatagggtggtgaccatggaggtggaggccagaaatcttgataaaaaggattttcttgggaaatctgatccatttctggagttcttcaggcaaggagacgggaagtggcacctggtttacaggtcagaggtcattaaaaataacctgaatccgacatggaagcggttctcggtgcccgtgcagcacttctgtgggggaaacccctccacacccatccaagttcagtgttcagattacgattcagacggttcacacgacctgatcggtaccttccacaccagcctagcacagctgcaagcagtccctgcagagtttgaatgtatccacccagaaaaacagcagaaaaagaagagctacaagaacagcggcacaatacgggttaagatatgtagagtagagactgagtactctttcttagattatgtgatgggagggtgtcagattaatttcaccgtcggggtcgacttcaccgggtctaatggagatcctagcagcccagacagcctccactatctgagtcccaccggtgtgaacgaatatctgatggccttgtggagcgtagggtctgtggtgcaagattatgattcagataaactgtttcccgcatttgggttcggtgcccaggtaccaccagactggcaggtaagccacgaatttgccctaaacttcaacccatctaacccgtactgcgccggaatccaggggatcgtggacgcatatcgccaggccctgccccaagtgcgcctgtacggccctactaactttgcccctatcatcaatcatgtcgctcggttcgctgcgcaggccgctcaccaggggactgcaagccagtactttatgttactgctgctcacagacggagctgtaactgacgtggaggccactagggaggccgtcgttagggcatctaatcttcctatgtccgtgatcatcgttggagtggggggagcagactttgaagcaatggaacagctggatgccgacgggggacccctgcataccagatccgggcaggccgcagcacgagacatcgtccagtttgtcccttaccggcgttttcagaacgccccaagggaggcgctcgcccagactgtgctggcggaggtaccaacccaactggtttcatatttcagggctcaaggttgggctccattgaagcctctgcctccttcagcgaaagacccagcacaggccccacaggcttag

SEQ ID NO: 142082 - DNA, 1614 bp, Artificial Sequence
  derived and/or modified sequence
atggcgcactgtgtaaccttggtgcagctctccatctcttgcgatcacctaatagacaaggatatcggcagcaagtctgacccactgtgcgtgctactgcaggatgtcggcggaggctcttgggcagagctgggaaggaccgaacgggtgcgcaattgttcaagcccggaattctccaagacccttcagttggaatataggttcgagacagtgcagaagcttcgctttggcatttatgacatcgataacaagacacctgagctacgggacgacgatttcttgggcggagcagagtgtagtctgggacagatcgtatcctcccaggtgctgacattaccactgatgctcaaacccggaaagccagctgggaggggcactattaccgtatcagcccaagaactgaaggataacagggtggtgaccatggaagtcgaggctagaaacctggacaagaaggatttcctgggaaaatccgacccctttttagagttcttccggcagggcgacgggaaatggcacctggtgtaccgctcggaagtgatcaagaataatctgaacccaacttggaagcgcttctccgtacccgttcaacatttctgtggaggtaatccatcaacccctatccaggtgcagtgctctgattacgactccgatgggagccacgatctgattggcacttttcacaccagtctagctcagctgcaagccgtgccagccgaatttgaatgtatacacccggaaaaacagcagaagaaaaaatcttataagaattccgggaccatacgtgtgaagatatgcagggtggaaacggagtattccttcctagattatgtgatgggcggatgtcagatcaactttacagtcggggtcgatttcacaggctctaatggagaccccagcagtcctgatagtctgcattaccttagccctacaggcgtgaacgaatacctgatggccctttggtctgtgggtagtgtggttcaggactatgactctgacaaactgtttcccgctttcggctttggagcacaagttccaccagattggcaggtgtcacacgagtttgcactaaactttaatccatccaacccttactgtgctgggatccaaggcattgtggatgcctataggcaggcgcttccacaggttcgtctttatggcccaacaaactttgcccctatcatcaatcacgtcgcccgttttgcggctcaggctgctcatcagggaactgcatctcagtatttcatgctcttactgttgacagacggagctgttacagacgtggaggccacgagagaagccgtggttcgcgcttcaaatcttccaatgagcgtgatcattgtgggggttggcggagcggattttgaggcaatggagcagctggatgccgatggagggccactccacacccgatcaggtcaggctgccgctagggatatcgtgcagttcgtcccgtatcgtcggtttcagaatgccccacgcgaggccctggcccagacggtgctggcagaagtcccgactcaattggtgagttacttccgcgcacaaggttgggctcctctcaaaccactgcctccttccgccaaagaccccgcacaagctccccaagcttag

SEQ ID NO: 142083 - DNA, 1614 bp, Artificial Sequence
  derived and/or modified sequence
atggctcactgcgtgacactggtccagctatctatcagttgtgatcacctcatcgacaaagacattgggagtaaaagtgatccattgtgcgtgctgttgcaggacgtcggtggaggcagttgggcagagctggggaggaccgaacgcgtgcgtaactgttcgtccccagaatttagcaagacactccagctggagtatcgcttcgagaccgtgcaaaaattgagatttggcatatacgatatcgacaacaaaaccccagaactacgggatgacgacttcctgggaggagctgaatgcagtctgggtcagatcgttagcagccaggtgcttaccctgccgttgatgctgaaacctggtaagccagcgggaagagggacaatcactgtttcagctcaggagctgaaggacaatagagtggtcacaatggaggttgaggccagaaatctggataaaaaggattttctgggaaagtctgacccattcctcgagtttttcagacagggggacggaaagtggcacctggtgtacagatcggaagtaatcaaaaataatctcaacccaacctggaagcggttcagtgttcccgtacaacatttctgcgggggtaacccgtccacacctatccaggtgcagtgttcagattacgactcagacggcagtcatgacctgatcggaacttttcacaccagcctggctcagctgcaggccgtaccagctgagttcgaatgtatacaccccgagaaacaacagaagaaaaaatcctataaaaacagcggaaccattagggtcaaaatttgcagggtcgaaaccgagtactctttcctggactatgtaatgggtggttgccagataaattttaccgttggtgttgattttacaggttctaatggtgatccctctagcccagacagtctccattacttgtccccaactggcgtgaacgaatacttaatggccctgtggtccgtcggtagcgtcgttcaggattacgacagcgataaactctttcctgccttcggatttggggctcaggtcccccctgattggcaggtgtcccatgagttcgccttaaatttcaacccaagtaacccttattgcgccggaatacaggggatagtcgatgcatataggcaggccctgccccaggtccggctgtacggacccaccaacttcgcccctatcatcaaccacgtggcccgatttgcggctcaggcggcacatcagggaacagcaagccagtactttatgctgcttcttctcaccgatggcgcagttaccgacgtagaggccaccagagaagcagtggtgcgtgctagcaacttaccgatgtcggttattattgttggagttgggggtgccgattttgaggctatggaacagctcgatgccgacggtggccctctccacacacgtagcggacaggcagctgccagggacatcgtgcaattcgtgccctatagacgcttccagaacgccccacgtgaggctttggcacagactgtgctggccgaggtgccaacccaactggttagttattttagagcacaggggtgggcaccgctgaaacccctacctccatcagccaaagaccctgcccaggcccctcaggcatag

SEQ ID NO: 142084 - DNA, 1614 bp, Artificial Sequence
  derived and/or modified sequence
atggcccactgtgttaccctggttcagttaagtatatcctgtgaccacctcatcgacaaagatatcggcagcaagagtgacccactctgtgtgctcttgcaggatgtgggcggaggcagttgggccgagctggggaggacggagagagtccgcaactgctcatcaccagagttcagcaaaacgctgcagcttgagtataggtttgaaaccgtccagaaattgaggttcgggatatacgatatcgataacaagactccagaactgcgcgacgatgactttctcggcggtgctgagtgttccctgggccagattgtgtcatcacaggtgctaactctgccactgatgctgaagcccggtaagcctgccggaaggggtacgatcaccgttagcgcacaggagctgaaagacaatagagtcgtcacgatggaggtggaggcccgaaatcttgataagaaggattttcttgggaagagcgatccctttttagagttctttagacaaggagacggaaaatggcaccttgtctatagatcagaggtgattaaaaataatctgaaccccacgtggaagcggttctctgtgcctgtgcagcacttttgtggtgggaatccgtctacaccaatccaagtgcagtgcagtgactacgatagtgatgggagccacgatctgattggaactttccataccagcctcgcgcagcttcaggcagtgcctgctgaatttgaatgcatacacccagagaagcaacagaaaaaaaaatcttataagaacagcggaaccatccgggtcaagatttgtcgtgtggagaccgagtacagctttcttgactacgtgatggggggatgtcaaattaattttaccgtgggcgtggatttcacaggctcaaacggagaccccagctctcccgattccctgcactacctgagtcccacgggggtgaacgagtacctcatggcactctggagcgtcggctcggtggttcaggactacgacagcgacaaactgttccctgcttttggatttggtgcccaggtgcccccagactggcaagtgtcacacgagtttgccctaaatttcaacccatcaaatccttattgcgccggaatccaggggatcgttgatgcctacaggcaggccctgccccaggtgagactttacggccctacaaatttcgcccctatcatcaaccatgttgcccgatttgccgcacaggcggctcatcaggggacagcttcacagtattttatgctgctgctgttgactgacggggctgtgacagacgtcgaggccacgcgggaagcggtggtgagggcctccaacttgcccatgtctgttatcattgtcggggtggggggtgccgactttgaagctatggaacagctggatgctgacgggggtcctctccataccagatcagggcaggccgcagccagagacatcgtgcaatttgtgccgtaccgtcgcttccagaatgctcctcgcgaggctctggcacagaccgtcttggccgaagtccccacccagctcgtttcttacttccgggctcaggggtgggccccactcaaaccgctgcctccctcggcaaaggatcctgcccaggctccgcaagcctag

SEQ ID NO: 142085 - protein, 157 aa, Artificial Sequence
  derived and/or modified sequence
MQFMLLFSRQGKLRLQKWYVPLSDKEKKKITRELVQTVLARKPKMCSFLEWRDLKIVYKRYASLYFCCAIEDQDNELITLEIIHRYVELLDKYFGSVCELDIIFNFEKAYFILDEFLLGGEVQETSKKNVLKAIEQADLLQEEAETPRSVLEEIGLT

SEQ ID NO: 142086 - DNA, 2237 bp, Artificial Sequence
  derived and/or modified sequence
gcttcccgcgcgtcgcctagcccgcccctcagctcgccgcagccccggctcctccctcgtccggcccccggggcggggtctgtcagcttgccctcccctctccgcctaagcctgccctatgccagccgggtgtcctccccacagcaccacggcttctcttcctcagcacggcgacaggggcttccccttcgccgccgccgccgccgccggccaagctccgccgcgcccgcggcccgcggccgccatgcagtttatgttgctttttagtcgtcagggaaagcttcgactgcaaaaatggtatgtcccactatcagacaaagagaagaaaaagatcacaagagaacttgttcagaccgttttagcacggaaacctaaaatgtgcagcttccttgagtggcgagatctgaagattgtttacaaaagatatgctagtctgtatttttgctgtgctattgaggatcaggacaatgaactaattaccctggaaataattcatcgttatgtggaattacttgacaagtatttcggcagtgtctgtgaactagatatcatctttaattttgagaaggcttattttattttggatgagtttcttttgggaggggaagttcaggaaacatccaagaaaaatgtccttaaagcaattgagcaggctgatctactgcaggaggaagctgaaaccccacgtagtgttcttgaagaaattggactgacataactctcctcccttgttgatgacttcttgtggcatttcacacactgtagatggtcactcccttcatgtccatgttagctcatggtgtaagatgatgtcttgtcagtattactgttttgctaagccgcttcattcatgcctacacaatttttttttaaaagggaactttagttaattaagtgataagggacttaaatatgaattagaatggtgcagaaagagataccttttctggatattttaaagtttaaaggtcagtttctcttaatctgattatgtgcacatatgaaaatggcacatcatatacatgtaaaatcaggcagtatacatttattaattactgtatttgacaaaggaaactcttaaattataatgtgaaacctggttttatgaaaccaaagactagtgcagcatttcagcatatgtaaaaaaaaaaaaaaagggaattgacatgtcacatatcaaatgaatggaaactttgttgaaactttaaaaagcaaatttactccaaagacttgtattggaaattacataccttttttttttttttttaaaggactacagattatttttaatgactaaattggagtgatacttcttacactaaaaattatttcttaggcattctgaatctgggatgagaaacaggattgtttcacaatagtaagcacataatttttaaggccaaggcacatttgactcctgagatgaattttttgtggtcataatcaaatacttagttgtttttgatgccccaaaataaagtgagaatggtaatttgccaggaattcttcataacagtatcttacaaaaaacgtgttgctctcttcacagtattatgtgtaaagtcattgtttaaagcacgaatgttccctctggggtacttgttaaagctaaatttattttgcttccctccacttagaagtgctgcacactttacagcagcttcctttctttccatggcactgcctagttaacagaagtcttataaaaatttaaaaagacacatttcttacaaaaaagagttgaatgaggtaaaatggcattagatggctctatattttttaaagctatgtaattgttcagcgtcacttttctaagtacttatacatatctaaacatgtcttcatggtttatattttcacttatatatgctgggctggattaagctttgttgtgattgtgaccaacattcaggccacgtgagcactgtcttatcacatcgccaattagttgtaataaacgttcaacgtacaaacactggagtgtgtttttatctctttccaaaagtttgtcaaactatgcagagctgctgaaggaagaatttctcatttttttttcagtaaaatgttgaaaattcccctccatttgaatatggtggttgttataagcacacacaagatacatggtggaagatctaaggagtcttcatgtacttcattaaaaaataacatggattccatactgagagcctatctacacatttattttcaatcaataaatgctgcttttaaaaccttga

SEQ ID NO: 142087 - DNA, 474 bp, Artificial Sequence
  derived and/or modified sequence
atgcagtttatgctactgttctcacggcaggggaaattgagactgcagaaatggtatgtgcccctctccgacaaggagaagaagaagattacacgagagctggtgcaaaccgtgctggcacggaagccaaagatgtgctctttcctagagtggcgtgacttaaaaatagtctacaaaagatacgcatctttgtatttctgctgcgccattgaagatcaggataatgagctcatcacgctggagattattcacagatatgtggagctgctggacaaatacttcgggtctgtgtgtgaattggacatcatctttaacttcgaaaaagcatatttcattctggacgaatttttactggggggggaggtacaggagaccagcaaaaaaaacgtgctcaaggccatcgaacaggcggacttgctccaagaagaagcagagacccccagatccgtactcgaggagattggcctgacctag

SEQ ID NO: 142088 - DNA, 474 bp, Artificial Sequence
  derived and/or modified sequence
atgcagttcatgctgctcttcagccggcagggcaagctgcggctgcagaagtggtacgtgcccctgagtgacaaggagaagaagaagatcacccgggagctggtgcagacagtgctggccaggaagcccaagatgtgcagcttcctggagtggagggacctgaagatcgtgtacaagagatatgccagcctgtacttctgctgtgccatcgaggaccaggacaatgaactcatcaccctggagatcatccaccgctacgtggagctgctggacaagtacttcggctctgtgtgtgagctggacatcatcttcaactttgagaaggcctacttcatcctggatgagttcctgctgggcggggaggtgcaggagaccagcaagaagaatgtgctgaaggccatcgagcaggccgacctgctgcaggaggaggccgagacccccaggtctgtgctggaggagatcggcctgacctag

SEQ ID NO: 142089 - DNA, 474 bp, Artificial Sequence
  derived and/or modified sequence
atgcagttcatgctgctgttcagccggcagggcaagctgcggctgcagaagtggtatgtgcctctctccgataaagagaagaagaagatcacgcgcgaactggtgcagaccgtgctggcacgtaagcccaagatgtgtagttttttggagtggagagacctgaaaatcgtgtacaagagatacgcctccctttatttctgttgcgccatagaagatcaagataatgagcttatcacactcgaaatcattcatagatatgttgagcttctggacaagtactttggcagcgtgtgcgagttggacataatcttcaactttgaaaaggcctactttattctggacgaatttctgttaggaggggaagtgcaggagacatctaagaaaaacgtgctgaaggcgattgagcaggcagatttgctgcaagaggaagccgagaccccgaggtcagttctggaggagattgggttgacatag

SEQ ID NO: 142090 - DNA, 474 bp, Artificial Sequence
  derived and/or modified sequence
atgcaatttatgttactctttagccggcaaggaaagctccggctgcagaaatggtacgttccactatctgacaaggaaaagaagaagatcacgagggagctggttcaaacggttctcgcacgcaagccgaagatgtgctctttcctagaatggcgagacctaaaaatagtgtataaaaggtatgcttcactgtacttctgctgcgccatcgaagaccaggacaacgaactgatcactctggagataattcatagatacgtcgagctcctcgacaaatatttcggctctgtctgtgagctggacataatttttaacttcgagaaggcctacttcatccttgatgagtttcttctgggtggtgaagtgcaagagacctcgaagaagaacgtgctaaaggctattgagcaggccgatctactccaggaagaggccgagactcccaggtcagtgcttgaagagataggccttacttag

SEQ ID NO: 142091 - DNA, 474 bp, Artificial Sequence
  derived and/or modified sequence
atgcagttcatgctgctgttcagcagacagggcaagctgagactgcagaagtggtacgtgcccctgagcgacaaggagaagaagaagatcaccagagagctggtgcagaccgtgctggccagaaagcccaagatgtgcagcttcctggagtggagagacctgaagatcgtgtacaagagatacgccagcctgtacttctgctgcgccatcgaggaccaggacaacgagctgatcaccctggagatcatccacagatacgtggagctgctggacaagtacttcggcagcgtgtgcgagctggacatcatcttcaacttcgagaaggcctacttcatcctggacgagttcctgctgggcggcgaggtgcaggagaccagcaagaagaacgtgctgaaggccatcgagcaggccgacctgctgcaggaggaggccgagacccccagaagcgtgctggaggagatcggcctgacctag

SEQ ID NO: 142092 - protein, 501 aa, Artificial Sequence
  derived and/or modified sequence
MSETEFHHGAQAGLELLRSSNSPTSASQSAGMTVTDQAFVTLATNDIYCQGALVLGQSLRRHRLTRKLVVLITPQVSSLLRVILSKVFDEVIEVNLIDSADYIHLAFLKRPELGLTLTKLHCWTLTHYSKCVFLDADTLVLSNVDELFDRGEFSAAPDPGWPDCFNSGVFVFQPSLHTHKLLLQHAMEHGSFDGADQGLLNSFFRNWSTTDIHKHLPFIYNLSSNTMYTYSPAFKQFGSSAKVVHFLGSMKPWNYKYNPQSGSVLEQGSASSSQHQAAFLHLWWTVYQNNVLPLYKSVQAGEARASPGHTLCHSDVGGPCADSASGVGEPCENSTPSAGVPCANSPLGSNQPAQGLPEPTQIVDETLSLPEGRRSEDMIACPETETPAVITCDPLSQPSPQPADFTETETILQPANKVESVSSEETFEPSQELPAEALRDPSLQDALEVDLAVSVSQISIEEKVKELSPEEERRKWEEGRIDYMGKDAFARIQEKLDRFLQ

SEQ ID NO: 142093 - protein, 470 aa, Artificial Sequence
  derived and/or modified sequence
MSVTDQAFVTLATNDIYCQGALVLGQSLRRHRLTRKLVVLITPQVSSLLRVILSKVFDEVIEVNLIDSADYIHLAFLKRPELGLTLTKLHCWTLTHYSKCVFLDADTLVLSNVDELFDRGEFSAAPDPGWPDCFNSGVFVFQPSLHTHKLLLQHAMEHGSFDGADQGLLNSFFRNWSTTDIHKHLPFIYNLSSNTMYTYSPAFKQFGSSAKVVHFLGSMKPWNYKYNPQSGSVLEQGSASSSQHQAAFLHLWWTVYQNNVLPLYKSVQAGEARASPGHTLCHSDVGGPCADSASGVGEPCENSTPSAGVPCANSPLGSNQPAQGLPEPTQIVDETLSLPEGRRSEDMIACPETETPAVITCDPLSQPSPQPADFTETETILQPANKVESVSSEETFEPSQELPAEALRDPSLQDALEVDLAVSVSQISIEEKVKELSPEEERRKWEEGRIDYMGKDAFARIQEKLDRFLQ

SEQ ID NO: 142094 - DNA, 1506 bp, Artificial Sequence
  derived and/or modified sequence
atgtctgaaactgaatttcatcacggcgctcaggcaggcctggaattgctcagatccagcaactcaccaacctctgcaagccagtccgccggaatgacggtcacagaccaggcgttcgtgacccttgccacaaatgacatctattgtcaaggcgcactggtccttggtcagagccttaggagacacaggctaacaagaaaactggtagtgttgattacacctcaggtctcttcactgctgcgagtgattttgagcaaagtcttcgacgaggtcatcgaagtgaatctgatcgatagtgcggattatattcacctcgcattccttaaaagacccgaattgggtctgacattgaccaagctgcattgttggacccttacgcattactcaaagtgtgtatttctcgacgctgacaccctggtcctgtccaatgtcgacgagctattcgacagaggcgagtttagcgcggctccagaccctggttggcccgattgcttcaacagcggagtcttcgtgttccagcccagtctccacacacacaaactcttgctccagcacgctatggaacatggctcttttgacggcgccgaccaggggttgttaaattctttctttaggaactggagcaccaccgatattcataagcatttaccatttatttacaacctctcttctaacaccatgtacacatacagccctgctttcaagcagttcggttcttccgctaaggtggttcacttcttggggagcatgaaaccttggaattataagtataatccccagtccggctcagtgctagagcagggttcagccagctcaagtcagcatcaggctgccttcctgcatctgtggtggaccgtgtatcagaataacgtgttgccattgtataaatctgtccaggccggtgaggcgcgggcctcaccgggacataccctatgtcacagcgacgttggaggcccatgcgccgatagcgcaagtggcgtgggagagccatgcgaaaattcaactcctagtgccggcgtgccatgtgccaatagtcccctgggatcaaaccagccagcgcaggggttgcctgagccaacgcagattgtcgacgagacgctgtccttgcctgagggtaggcgctccgaagatatgatcgcctgtcctgaaactgaaacgccagcagtcattacctgcgatcccctgagtcaaccatctccacagccggcagattttactgagacggaaaccatcttgcaaccagctaataaggtggagtccgtgtcttctgaagaaactttcgagcctagccaggaactcccagctgaggccctgagggacccctcactgcaagacgctctggaagtggatctcgcagtgtccgtgagccagataagtatcgaggagaaggtgaaagagctgagcccagaagaggaacgacgcaaatgggaagagggaaggatcgactacatgggcaaggatgctttcgcccgtatacaggaaaaattggaccgcttcctgcagtag

SEQ ID NO: 142095 - DNA, 3393 bp, Artificial Sequence
  derived and/or modified sequence
cgcgggcttgcgggcaggggctgcagggaggaggagaggacccgcgcccgcgggggctggcggaggcggggccgggcttccggacagaggccaatcgctgccctcggggcctccagcgccggctctgggccgaggcagccagagcgcggaagaggcctggaaatccacgcggattcccggagacggcgcctctgctctgcgggttcgtggcgaggaagtccacccactgctcccgggcgcaggtctgcaggtccgcgcccactgcccgcggcgccactgaccatgtcggagacagagtttcaccatggtgcccaggctggtctcgaactcctgaggtcaagcaattcacccacctcagcctcccaaagtgctggaatgacagtgactgatcaggcttttgtcacactagccaccaatgacatctactgccagggcgccctggtcctggggcagtcactgaggagacacaggctgacgaggaagctggtggtgttgatcactcctcaggtgtccagcctgctcagggtcatcctctcgaaggtgttcgatgaagtcattgaagtgaatctaatcgatagtgccgactacatccacctggcctttctgaagagacctgagctcgggctcaccctcaccaagcttcactgttggactctcactcactacagcaagtgtgtcttcctggatgcagacactctggtgctgtccaatgtcgatgagctgtttgacaggggagagttttctgcggccccggaccccggatggccggattgcttcaatagcggggtgtttgtcttccagccttctctccacacgcataaactcctgctacagcacgccatggaacacggcagctttgacggggcagaccaaggcttactgaatagtttcttcaggaactggtcgaccacagacatccacaagcacctgccgttcatctataacttgagtagtaacacgatgtacacttacagccctgccttcaagcaattcggttccagtgcaaaggtcgtccactttttggggtccatgaaaccttggaactacaagtacaatccacagagtggctcggtgttggagcaaggctcagcgtccagcagccagcaccaggcggcattccttcatctctggtggacggtctaccagaacaacgtgctgcccctttataaaagcgtccaagcgggggaagcacgcgcgtctcctggtcacacactttgccacagtgatgtgggggggccgtgtgcggattcagcctctggtgttggagagccgtgtgaaaattcaacacccagtgcgggcgtgccgtgtgcaaattcaccactgggttctaaccagcctgctcagggccttccggagccgacccagatagtggatgagaccctgtccctacctgaaggacgccgttcagaagatatgatagcttgtcctgaaactgagactcctgccgtgataacgtgtgacccactgtcccagccttcccctcagcctgcagacttcacagagactgaaaccatcttgcagccagcaaataaagtcgaaagtgtctcatccgaggaaaccttcgaaccaagccaggaactccctgctgaggctctcagggaccccagtctgcaggatgcactggaggtcgacctggccgtctctgtttcccagatctccatcgaagagaaggtgaaggaattgagccccgaggaagagaggaggaagtgggaggaaggccgtatcgactacatggggaaggacgcgtttgctcgcatccaggagaagctggaccggttcctgcagtaatccggcagctggtgggcgttgtgtgtagttagacaatgtcctgttgggtggtcctgttgcgtggagatctcctctggtcctttcaaagggaaacgctgttgaaccttgtgcctctatttatgcttaatccatttgagtgcctcacacaaaaaacgtagagtatagaaatccaccttaaagcccctcgccccaacttctccaccaacgccttctgggctttcttcagaggtcacttctacccttgaagctgtcggcaaaagcgagcagtaataacattctagtagactctcgatggtggtctccgctcttgcccgaaggacctctgaagtacgctggagctgtgttgtacaggtgctgtgagacctaccctattcagaattaaacctcactgcaaatttcctcccatcacgaagctaacaacactaatatacgtatttagcacctctgaggctttgccatggagacccatttctgtagggctaaggaaacatttagacgtggtgactgactttcatttggacttggcgaagtgtatctgagaaacacctcggctgtggtctctctgctttaaatcctaacaggacttcctagagcgttgacagaaattctactcgtggacgttgggaagaaagattgtaggtggcttggggaatgtgggtggcttagaggatctaaaccgattcacttcctggttgagaagcaacgagggcttgctctaaatcgtttagaggataacaggatctagagatgctctctgcttgacaacaaaagtcagggtgcagtcggtccacccttgactgctcttggcttggtctctaccctcactacctcagttctcaataacttagtgaatcactgccctcctcaaagccatttccactcagctctttccagagaattctcagttttatgagacgggaaactttatttcacgagaaagcctcattgtcagaagtatcttcattcaatgggcacaatatgctgtgtatctcaccaggtagctgtcaggggccaccgagagtgtcgttaaaaatgggcatggttgtaataaaggaggaaagtgcgacttttgaaatgtttggaaggtttatttctcatgcacattccagggaaaagcagagagtaaattagagacgggataggaaggccgtgggagaactcgatcctagcctgtgtcagctggatgtgtttacgtggagaggcgtggccactttttaggtcacctgaagcagtttagcctttggatagaggaacctgcctgaatttatggcattagtggtggcatttttttgtgtacaagatgtgggtgatggaggggctgtttctttttccgtgtgggtggttaataatcgtcagtctcggagggcgaggctcgtaggatatttcaggtgagtcagggttggatggtcatcggctttcagaaggagaccacgggaatgttcagggaaacaatgtcagcttctctgaggaccagaattcatgttcacgggcagtgatgagttggcttatggagtgagtccagtctggaattccgccgtgcattctagcctgtatcatctcatttggacaaatgctggcacgttgaaattaaaatgttaaaaaaca

SEQ ID NO: 142096 - DNA, 1506 bp, Artificial Sequence
  derived and/or modified sequence
atgtctgaaacagagttccaccacggggcccaggccggcctggagctgctgcggagcagcaacagccccaccagcgccagccagagcgctggcatgacagtgacagaccaggcctttgtgaccctggccaccaatgacatctactgccagggcgccctggtgctgggccagagcctgcggcggcaccggctgaccaggaagctggtggtgctgatcaccccccaggtgagcagcctgctgcgggtcatcctgagcaaggtgtttgatgaagtcatcgaggtgaacctgattgattctgctgactacatccacctggccttcctgaagaggcctgagctgggcctgaccctgaccaagctgcactgctggaccctgacccactacagcaaatgtgtgttcctggatgctgacaccctggtgctgagcaatgtggatgagctgtttgacagaggagagttctctgctgccccagaccccggctggccagactgcttcaacagcggcgtgtttgtgttccagcccagcctgcacacccacaagctgctgctgcagcacgccatggagcacggcagctttgatggagctgaccagggcctgctgaacagcttcttcaggaactggagcaccacagacatccacaagcacctgcccttcatctacaacctgagcagcaacaccatgtacacctacagccctgccttcaagcagtttggcagcagcgccaaggtggtgcacttcctgggctccatgaagccctggaactacaagtacaacccccagagcggctctgtgctggagcagggcagcgccagcagcagccagcaccaggccgccttcctgcacctgtggtggacagtgtaccagaacaacgtgctgcccctgtacaagtctgtgcaggccggggaggcccgggccagccctggccacaccctgtgccacagtgatgtgggcggcccctgtgccgacagcgccagcggcgtgggggagccctgtgagaacagcaccccatctgctggggtgccctgtgccaacagccccctgggcagcaaccagcctgcccagggcctgcctgagcccacccagatcgtggatgagaccctgagcctgcctgagggcagaagaagtgaggacatgattgcctgcccagagacagagaccccagctgtgatcacctgtgaccccctgagccagcccagcccccagcctgctgacttcacagaaacagagaccatcctgcagcctgccaacaaggtggagagcgtgtcctctgaggagacctttgagcccagccaggagctgcctgctgaggccctgcgggaccccagcctgcaggatgccctggaggtggacctggccgtgtctgtgtcccagatcagcattgaggagaaggtgaaggagctgagccctgaggaggagaggaggaagtgggaggagggcagaattgactacatgggcaaggatgcctttgcccgcatccaggagaagctggaccgcttcctgcagtag

SEQ ID NO: 142097 - DNA, 1506 bp, Artificial Sequence
  derived and/or modified sequence
atgagcgagaccgagttccaccacggcgcccaggccggcctggagctgcttcgatcctccaatagtcctacaagtgcctcccagagtgcaggcatgactgtcacagatcaagcctttgtcacacttgccacaaacgatatctactgccagggagccctcgtgctcggccagtccttgcgacgccaccgattgacacggaagctcgtggttctgatcaccccacaggtgtctagcttgctgcgggtaatcttgagcaaggtgttcgatgaggttattgaagtgaatctgatagacagcgcagattacatccacctcgcattcctaaagcggccagaactcggactcaccctcaccaagctgcactgctggacccttacgcactactctaaatgtgtctttctcgatgctgacacactagttctgtcaaacgtcgatgaactattcgatagaggcgaattctcagccgcacccgatccgggatggccagactgtttcaactccggcgtttttgtgttccagccctctcttcacacccacaagctactgctgcagcatgccatggagcatggatcattcgacggagccgaccagggccttctgaattctttttttagaaactggtctacaaccgatattcataaacacctcccgtttatttacaacctgagcagcaataccatgtatacatacagtcccgcatttaaacagttcgggtccagcgctaaggtcgtccactttctgggctccatgaaaccatggaactacaagtacaaccctcagtcggggagcgtacttgaacaaggttcagccagctcatctcagcaccaagcagcctttttgcacctttggtggacagtctatcagaacaacgtgctacctctgtacaaaagcgtgcaggccggagaggctcgcgcatccccaggacatacactgtgtcactctgacgttggggggccatgcgccgacagtgcgagtggcgtgggggagccttgcgagaatagtactcctagcgctggggtcccctgcgccaattcgccactcggcagcaaccagcctgcccagggattgccagagccaacacagatcgtcgacgagacactgtctcttccagagggcaggcggtctgaggatatgatcgcatgcccagaaaccgagactcccgccgttataacttgtgatccactttcccaaccatccccccagccggccgacttcactgaaaccgagactatacttcaaccagctaataaggtggagagcgtttccagtgaagagacatttgagccctctcaagagttaccagcggaggctctcagagaccctagtcttcaagatgctctcgaagttgatttagcagtgtccgtgagtcagattagcatcgaagaaaaagttaaggaactgtcaccggaagaggaaagaagaaagtgggaggagggcaggatcgactacatgggtaaagatgcctttgcccgcatccaagaaaagcttgacagatttcttcagtag

SEQ ID NO: 142098 - DNA, 1506 bp, Artificial Sequence
  derived and/or modified sequence
atgagtgaaaccgagtttcatcatggagcacaggctgggctagagctgcttagaagtagtaattcaccaacaagcgcaagccaaagtgcaggaatgaccgtaaccgaccaggccttcgtgactctggccacaaacgacatctactgtcaaggcgctctcgtgctgggccaatctttgcgccgtcataggttgacacgaaagctcgtcgtacttataacaccgcaagtgtcttctcttctgcgggtgattctatccaaggttttcgatgaggtgattgaagtgaacctaatcgactcagcagactatatacatctggccttcctgaaacgcccagaactgggcctcacactcacgaagctgcattgttggacgctcacccattactcaaagtgcgtgtttcttgatgccgacactctggttctctccaatgtcgatgagttattcgaccggggagagttctctgctgcacccgaccccggatggcccgattgcttcaacagtggcgtgttcgtgttccaaccctcactgcacacacataagctgctgctacagcatgcaatggagcatggttcgttcgacggcgctgaccagggactattgaacagtttctttcgaaattggtctacaacagatattcacaaacacctgcccttcatctataacctgtcatctaacacaatgtatacatactctcctgcattcaagcagttcggctcatccgcaaaggtggtccactttctgggcagtatgaaaccctggaattataaatataacccacaaagtggctcagtcctcgaacagggtagtgcttcaagttcccagcaccaggcagcctttctgcacctctggtggaccgtctaccagaacaatgtactgccactgtacaaatccgtgcaggcgggtgaagctcgggcaagccccggtcacaccctgtgccattccgatgtgggcggaccgtgtgctgattccgcttcaggcgtgggcgagccgtgcgagaatagcactccctccgccggagtgccgtgtgctaacagcccactgggcagtaatcagcctgctcagggccttccagaacccactcaaatcgtggatgaaactctgtctttgccagaaggccgaagaagcgaagatatgatagcctgtccagagactgagactccagccgttataacttgcgatccattgtctcagccttcacctcagcctgccgactttactgaaactgagacgattctgcagcccgcaaataaagtagagagtgtgagctctgaagagacgtttgagcctagccaggaactgcctgccgaggctctgagagatccctcgctccaggacgcactggaggtcgacctggccgtgtccgtgagtcaaatctccatagaagagaaggtaaaagaactcagccctgaagaagaaagaagaaagtgggaagaaggacgaattgattacatggggaaagacgccttcgccagaatacaagaaaaactagatagattccttcaatag

SEQ ID NO: 142099 - DNA, 1506 bp, Artificial Sequence
  derived and/or modified sequence
atgagcgagaccgagttccaccacggcgcccaggccggcctggagctgctgagaagcagcaacagccccaccagcgccagccagagcgccggcatgaccgtgaccgaccaggccttcgtgaccctggccaccaacgacatctactgccagggcgccctggtgctgggccagagcctgagaagacacagactgaccagaaagctggtggtgctgatcaccccccaggtgagcagcctgctgagagtgatcctgagcaaggtgttcgacgaggtgatcgaggtgaacctgatcgacagcgccgactacatccacctggccttcctgaagagacccgagctgggcctgaccctgaccaagctgcactgctggaccctgacccactacagcaagtgcgtgttcctggacgccgacaccctggtgctgagcaacgtggacgagctgttcgacagaggcgagttcagcgccgcccccgaccccggctggcccgactgcttcaacagcggcgtgttcgtgttccagcccagcctgcacacccacaagctgctgctgcagcacgccatggagcacggcagcttcgacggcgccgaccagggcctgctgaacagcttcttcagaaactggagcaccaccgacatccacaagcacctgcccttcatctacaacctgagcagcaacaccatgtacacctacagccccgccttcaagcagttcggcagcagcgccaaggtggtgcacttcctgggcagcatgaagccctggaactacaagtacaacccccagagcggcagcgtgctggagcagggcagcgccagcagcagccagcaccaggccgccttcctgcacctgtggtggaccgtgtaccagaacaacgtgctgcccctgtacaagagcgtgcaggccggcgaggccagagccagccccggccacaccctgtgccacagcgacgtgggcggcccctgcgccgacagcgccagcggcgtgggcgagccctgcgagaacagcacccccagcgccggcgtgccctgcgccaacagccccctgggcagcaaccagcccgcccagggcctgcccgagcccacccagatcgtggacgagaccctgagcctgcccgagggcagaagaagcgaggacatgatcgcctgccccgagaccgagacccccgccgtgatcacctgcgaccccctgagccagcccagcccccagcccgccgacttcaccgagaccgagaccatcctgcagcccgccaacaaggtggagagcgtgagcagcgaggagaccttcgagcccagccaggagctgcccgccgaggccctgagagaccccagcctgcaggacgccctggaggtggacctggccgtgagcgtgagccagatcagcatcgaggagaaggtgaaggagctgagccccgaggaggagagaagaaagtgggaggagggcagaatcgactacatgggcaaggacgccttcgccagaatccaggagaagctggacagattcctgcagtag

SEQ ID NO: 142100 - protein, 437 aa, Artificial Sequence
  derived and/or modified sequence
MQLPRWWELGDPCAWTGQGRGTRRMSPATTGTFLLTVYSIFSKVHSDRNVYPSAGVLFVHVLEREYFKGEFPPYPKPGEISNDPITFNTNLMGYPDRPGWLRYIQRTPYSDGVLYGSPTAENVGKPTIIEITAYNRRTFETARHNLIINIMSAEDFPLPYQAEFFIKNMNVEEMLASEVLGDFLGAVKNVWQPERLNAINITSALDRGGRVPLPINDLKEGVYVMVGADVPFSSCLREVENPQNQLRCSQEMEPVITCDKKFRTQFYIDWCKISLVDKTKQVSTYQEVIRGEGILPDGGEYKPPSDSLKSRDYYTDFLITLAVPSAVALVLFLILAYIMCCRREGVEKRNMQTPDIQLVHHSAIQKSTKELRDMSKNREIAWPLSTLPVFHPVTGEIIPPLHTDNYDSTNMPLMQTQQNLPHQTQIPQQQTTGKWYP

SEQ ID NO: 142101 - DNA, 1314 bp, Artificial Sequence
  derived and/or modified sequence
atgcagctcccgcggtggtgggaactgggggacccctgtgcctggactggccagggcaggggcaccagaagaatgagtcctgctacaacaggcacatttctgctgacagtttactccatcttctctaaggttcactcagatcggaacgtttacccatccgcaggcgtactgtttgtgcacgttctggagagggagtatttcaagggtgaatttcctccctacccgaagccaggcgagattagcaatgatccaattacttttaacacaaatctaatggggtacccggaccgccctggttggctgcggtacatccagagaacaccctactcggacggcgtgctgtacggctctcctaccgccgaaaacgtgggcaagcctacaataatcgagatcacggcgtacaatcgtcggacctttgagaccgcccggcataatctgattatcaatatcatgtcggctgaggatttcccattaccttatcaggctgaattctttattaagaatatgaatgtggaggagatgttagccagtgaggtgctgggtgatttcctcggcgccgtcaaaaacgtgtggcagccagaacgccttaacgccattaatatcacctcagcgctggaccggggcggtcgagttccactgcctattaatgatttgaaagagggagtgtatgtgatggtaggggccgatgtcccgttctcttcttgcctccgggaagtggagaaccctcagaaccagttgagatgcagccaggagatggaaccagtgattacctgcgacaagaaattccgaacacagttctacatagattggtgtaagatttctctggtggacaaaacgaagcaggtgagcacatatcaggaggtcatccgcggggaggggattctgcccgatggcggtgaatacaagcccccttcagactccctaaaaagtagggactattatacagactttctgattacccttgctgtacccagtgctgtggctctggtactcttcctcattttagcctacattatgtgctgcaggcgcgagggcgtagagaaacgaaacatgcagacaccagacattcagctggtgcaccactctgctatccagaagagcaccaaggaactccgggatatgtcgaaaaatcgagagatagcctggcctctgtctaccctgccggtgttccaccctgttacaggtgaaattataccccccctacacacagacaactacgactccacaaacatgccccttatgcaaacgcagcagaacttaccccatcaaactcagattcctcagcaacagacaactggcaagtggtacccttag

SEQ ID NO: 142102 - DNA, 1314 bp, Artificial Sequence
  derived and/or modified sequence
atgcagctgccccgctggtgggagctgggggacccctgtgcctggacaggccagggccggggcaccaggaggatgagccctgccaccaccggcaccttcctgctgactgtgtacagcatcttcagcaaggtgcacagcgacagaaatgtgtaccccagcgctggggtgctgtttgtgcacgtgctggagcgggagtacttcaagggggagttccccccctaccccaagccaggagagatcagcaatgaccccatcaccttcaacaccaacctgatgggctacccagaccggcccggctggctgcgctacatccagaggaccccctacagtgatggagtgctgtatggcagccccacagcagaaaatgtgggcaagcccaccatcatcgagatcacagcctacaacagaaggacctttgaaacagcccggcacaacctgatcatcaacatcatgtctgctgaggacttccccctgccctaccaggccgagttcttcatcaagaacatgaatgtggaggagatgctggccagcgaggtgctgggggacttcctgggcgctgtgaagaatgtgtggcagcctgagcggctgaatgccatcaacatcaccagcgccctggaccggggcggccgggtgcccctgcccatcaatgacctgaaggagggcgtgtatgtgatggtgggcgcagatgtgcccttcagcagctgcctgcgggaggtggagaacccccagaaccagctgcgctgcagccaggagatggagcccgtcatcacctgtgacaagaagttccgcacccagttctacatcgactggtgcaagatcagcctggtggacaagaccaagcaggtgtccacctaccaggaggtgatccggggggagggcatcctgcctgatggaggagagtacaagcccccaagtgacagcctgaagagccgggactactacacagacttcctgatcaccctggccgtgcccagcgctgtggccctggtgctcttcctgatcctggcctacatcatgtgctgccggcgggagggcgtggagaagaggaacatgcagaccccagacatccagctggtgcaccacagcgccatccagaagagcaccaaggagctgcgggacatgagcaagaaccgggagatcgcctggcccctgagcaccctgcccgtcttccaccctgtgactggagagatcatcccccccctgcacacagacaactatgacagcaccaacatgcccctgatgcagacccagcagaacctgccccaccagacccagatcccccagcagcagaccaccgggaagtggtacccctag

SEQ ID NO: 142103 - DNA, 1314 bp, Artificial Sequence
  derived and/or modified sequence
atgcagctgccccggtggtgggagctgggcgacccctgcgcctggaccggccaaggtcggggaaccagaagaatgagtcccgcaacgacaggtacctttttgttgacagtgtactccatcttttctaaagtgcactccgaccggaacgtgtatccctccgccggtgtcttgtttgtccacgtactggaaagggagtactttaagggcgagttccctccatatccaaagcctggagagatctccaatgatccgatcaccttcaataccaatcttatgggataccccgaccggcctggctggctgcgttatattcagcgcaccccttattctgatggagtgctgtatggttccccgaccgctgaaaacgtcggtaagcctacaatcatcgaaatcaccgcctataatcggcgaaccttcgaaaccgcacggcataacttgattataaatatcatgtccgccgaggacttcccactgccctaccaggcagagttttttataaaaaatatgaatgtcgaagagatgttggcctccgaggtgcttggcgactttctgggtgccgtgaagaatgtgtggcaaccggaacggctcaacgcaataaatatcacatccgcactcgaccggggtggccgcgtccctcttcccattaacgatctaaaggaaggggtgtacgtgatggtgggtgctgatgtccccttttccagttgtctcagagaggttgaaaatccgcagaatcaactccgatgtagccaagaaatggagcctgtgatcacctgcgataagaagtttcgtacccagttttacatagattggtgcaaaatttctctggtcgacaagacaaagcaggtgtcgacctatcaggaagtgatccggggtgaaggcattctacccgacggcggggaatataaaccaccttcggactccttgaagagcagagattactatactgattttttgataaccttagctgtgcccagcgctgtggctctggtgctgttcttgatacttgcctacataatgtgttgcaggagggagggagtcgaaaagaggaacatgcagactcccgacattcagctggtgcatcactccgctatccagaagtctacaaaagaattacgggatatgtctaagaatcgtgagatcgcttggcccttgtcaacactgccggttttccatcccgtcacgggcgagattatcccacctctgcatactgataactacgattctacgaatatgccgctgatgcagactcagcagaatctgccgcaccaaactcaaattccccagcaacagaccacgggcaaatggtatccttag

SEQ ID NO: 142104 - DNA, 1314 bp, Artificial Sequence
  derived and/or modified sequence
atgcaactgcctcgctggtgggaactgggtgacccttgtgcatggacggggcagggtaggggcacaagacgcatgtccccagccacgaccggaactttcttgctgactgtgtactccattttctcaaaggttcacagcgaccggaatgtgtatcctagcgctggagttttatttgtgcacgtgcttgaaagggagtacttcaagggagaatttccgccttaccctaaaccgggagagatttctaatgacccaataacctttaacaccaacctcatggggtaccccgatcggccaggctggcttcgctatatccagagaactccctactctgacggagtcctgtacggctcgcctacggctgaaaatgtcgggaaacctaccatcatcgaaattactgcatacaaccgcagaaccttcgagacagctagacacaatttgataattaacatcatgtctgccgaagattttcccttgccctatcaagcggagttcttcattaaaaacatgaatgtggaggagatgctagcatcggaggtactcggtgatttcttaggggcagtgaaaaacgtgtggcagccagagaggctgaacgcgattaatattacctccgcactcgacaggggaggaagagttcccttgcccattaacgacttgaaagagggagtgtacgtgatggtcggagcagacgtgccattttcatcgtgcttacgggaggtggagaatccacagaaccagctcaggtgtagtcaggagatggagcctgtcatcacttgcgacaaaaagttccgaacccaattttacatcgattggtgtaagattagtctggtagacaagacgaaacaagtgagtacatatcaggaagtgatccgtggtgaaggcatactcccggacggtggagagtacaaaccgccaagcgacagtctgaagtcaagagattactatacagacttcctcatcaccctggctgtcccatctgccgtggcactggtgctcttccttatactagcctacataatgtgttgcaggcgcgagggcgtggagaaacggaacatgcaaactcctgacattcagttggtgcaccatagtgctattcagaagagcactaaagaactgcgagatatgtcgaaaaacagggagatcgcctggccacttagtacgctgccagtattccaccccgtgacaggggagatcatccccccactgcacacagataattacgactcgactaacatgcctctgatgcagacccagcagaacctcccgcatcagacgcagatcccacagcagcagaccacagggaaatggtatccatag

SEQ ID NO: 142105 - DNA, 1694 bp, Artificial Sequence
  derived and/or modified sequence
cgggattaccgagggggtgcgggatgctgatgctgaactggccaagctgggagggaagaagaaagggaggggaggggagaatcgaggacggacggcctagccaggccaagaatgcaattgccccggtggtgggagctgggagacccctgtgcttggacgggacagggtcgggggacacgcaggatgagccccgcgaccactggcacattcttgctgacagtgtacagtattttctccaaggtacactccgatcggaatgtatacccatcagcaggtgtcctctttgttcatgttttggaaagagaatattttaagggggaatttccaccttacccaaaacctggcgagattagtaatgatcccataacatttaatacaaatttaatgggttacccagaccgacctggatggcttcgatatatccaaaggacaccatatagtgatggagtcctatatgggtccccaacagctgaaaatgtggggaagccaacaatcattgagataactgcctacaacaggcgcacctttgagactgcaaggcataatttgataattaatataatgtctgcagaagacttcccgttgccatatcaagcagaattcttcattaagaatatgaatgtagaagaaatgttggccagtgaggttcttggagactttcttggcgcagtgaaaaatgtgtggcagccagagcgcctgaacgccataaacatcacatcggccctagacaggggtggcagggtgccacttcccattaatgacctgaaggagggcgtttatgtcatggttggtgcagatgtcccgttttcttcttgtttacgagaagttgaaaatccacagaatcaattgagatgtagtcaagaaatggagcctgtaataacatgtgataaaaaatttcgtactcaattttacattgactggtgcaaaatttcattggttgataaaacaaagcaagtgtccacctatcaggaagtgattcgtggagaggggattttacctgatggtggagaatacaaacccccttctgattctttgaaaagcagagactattacacggatttcctaattacactggctgtgccctcggcagtggcactggtcctttttctaatacttgcttatatcatgtgctgccgacgggaaggcgtggaaaagagaaacatgcaaacaccagacatccaactggtccatcacagtgctattcagaaatctaccaaggagcttcgagacatgtccaagaatagagagatagcatggcccctgtcaacgcttcctgtgttccaccctgtgactggggaaatcatacctcctttacacacagacaactatgatagcacaaacatgccattgatgcaaacgcagcagaacttgccacatcagactcagattccccaacagcagactacaggtaaatggtatccctgaagaaagaaaactgactgaagcaatgaatttataatcagacaatatagcagttacatcacatttcttttctcttccaataatgcatgagcttttctggcatatgttatgcatgttggcagtattaagtgtataccaaataatacaacataactttcattttactaatgtatttttttgtacttaaagcatttttgacaatttgtaaaacattgatgactttatatttgttacaataaaagttgatctttaaaataaatattattaatgaa

SEQ ID NO: 142106 - DNA, 1314 bp, Artificial Sequence
  derived and/or modified sequence
atgcagctgcccagatggtgggagctgggcgacccctgcgcctggaccggccagggcagaggcaccagaagaatgagccccgccaccaccggcaccttcctgctgaccgtgtacagcatcttcagcaaggtgcacagcgacagaaacgtgtaccccagcgccggcgtgctgttcgtgcacgtgctggagagagagtacttcaagggcgagttccccccctaccccaagcccggcgagatcagcaacgaccccatcaccttcaacaccaacctgatgggctaccccgacagacccggctggctgagatacatccagagaaccccctacagcgacggcgtgctgtacggcagccccaccgccgagaacgtgggcaagcccaccatcatcgagatcaccgcctacaacagaagaaccttcgagaccgccagacacaacctgatcatcaacatcatgagcgccgaggacttccccctgccctaccaggccgagttcttcatcaagaacatgaacgtggaggagatgctggccagcgaggtgctgggcgacttcctgggcgccgtgaagaacgtgtggcagcccgagagactgaacgccatcaacatcaccagcgccctggacagaggcggcagagtgcccctgcccatcaacgacctgaaggagggcgtgtacgtgatggtgggcgccgacgtgcccttcagcagctgcctgagagaggtggagaacccccagaaccagctgagatgcagccaggagatggagcccgtgatcacctgcgacaagaagttcagaacccagttctacatcgactggtgcaagatcagcctggtggacaagaccaagcaggtgagcacctaccaggaggtgatcagaggcgagggcatcctgcccgacggcggcgagtacaagccccccagcgacagcctgaagagcagagactactacaccgacttcctgatcaccctggccgtgcccagcgccgtggccctggtgctgttcctgatcctggcctacatcatgtgctgcagaagagagggcgtggagaagagaaacatgcagacccccgacatccagctggtgcaccacagcgccatccagaagagcaccaaggagctgagagacatgagcaagaacagagagatcgcctggcccctgagcaccctgcccgtgttccaccccgtgaccggcgagatcatcccccccctgcacaccgacaactacgacagcaccaacatgcccctgatgcagacccagcagaacctgccccaccagacccagatcccccagcagcagaccaccggcaagtggtacccctag

SEQ ID NO: 142107 - protein, 1208 aa, Artificial Sequence
  derived and/or modified sequence
MDLHMMNCELLATCSALGYLEGDTYHKEPDCLESVKDLIRYLRHEDETRDVRQQLGAAQILQSDLLPILTQHHQDKPLFDAVIRLMVNLTQPALLCFGNLPKEPSFRHHFLQVLTYLQAYKEAFASEKAFGVLSETLYELLQLGWEERQEEDNLLIERILLLVRNILHVPADLDQEKKIDDDASAHDQLLWAIHLSGLDDLLLFLASSSAEEQWSLHVLEIVSLMFRDQNPEQLAGVGQGRLAQERSADFAELEVLRQREMAEKKTRALQRGNRHSRFGGSYIVQGLKSIGERDLIFHKGLHNLRNYSSDLGKQPKKVPKRRQAARELSIQRRSALNVRLFLRDFCSEFLENCYNRLMGSVKDHLLREKAQQHDETYYMWALAFFMAFNRAASFRPGLVSETLSVRTFHFIEQNLTNYYEMMLTDRKEAASWARRMHLALKAYQELLATVNEMDISPDEAVRESSRIIKNNIFYVMEYRELFLALFRKFDERCQPRSFLRDLVETTHLFLKMLERFCRSRGNLVVQNKQKKRRKKKKKVLDQAIVSGNVPSSPEEVEAVWPALAEQLQCCAQNSELSMDSVVPFDAASEVPVEEQRAEAMVRIQDCLLAGQAPQALTLLRSAREVWPEGDVFGSQDISPEEEIQLLKQILSAPLPRQQGPEERGAEEEEEEEEEEEEELQVVQVSEKEFNFLDYLKRFACSTVVRAYVLLLRSYQQNSAHTNHCIVKMLHRLAHDLKMEALLFQLSVFCLFNRLLSDPAAGAYKELVTFAKYILGKFFALAAVNQKAFVELLFWKNTAVVREMTEGYGSLDDRSSSRRAPTWSPEEEAHLRELYLANKDVEGQDVVEAILAHLNTVPRTRKQIIHHLVQMGLADSVKDFQRKGTHIVLWTGDQELELQRLFEEFRDSDDVLGHIMKNITAKRSRARIVDKLLALGLVAERRELYKKRQKKLASSILPNGAESLKDFCQEDLEEEENLPEEDSEEEEEGGSEAEQVQGSLVLSNENLGQSLHQEGFSIPLLWLQNCLIRAADDREEDGCSQAVPLVPLTEENEEAMENEQFQQLLRKLGVRPPASGQETFWRIPAKLSPTQLRRAAASLSQPEEEQKLQPELQPKVPGEQGSDEEHCKEHRAQALRALLLAHKKKAGLASPEEEDAVGKEPLKAAPKKRQLLDSDEEQEEDEGRNRAPELGAPGIQKKKRYQIEDDEDD

SEQ ID NO: 142108 - DNA, 5154 bp, Artificial Sequence
  derived and/or modified sequence
tcgcgcaggcggggaccggtccagctgagcctggtggcggaaaggctgcggccccgcgccagagggccggtggctcctccgggcttctgaggacccgcagggagcgggcctcatcatttctgtctcctgtttctccacttccttctctattggttggtccactgatgtatggacttgcacatgatgaactgtgaacttctagccacatgtagtgcccttgggtacttggagggagacacttaccataaggaaccagattgcttagagagcgtgaaggatctgatccgctatttgaggcatgaggatgagacacgagatgtgcggcagcagctgggggcagcccagatcctacagagcgaccttctgcccatcctcacccagcaccaccaggacaagcctctctttgatgctgttatcagactgatggtgaacttgacacaaccagccttgctctgttttggcaatctgcctaaggagcccagctttcggcaccattttttgcaggtgctaacttatttgcaggcctacaaagaggcctttgccagtgagaaggcttttggagtcctcagtgaaaccttgtatgagctgctgcagctgggctgggaggaacggcaggaggaagacaacttgctgattgaacggatcctactgctggtcagaaatattctccatgtcccagctgaccttgatcaggagaagaagattgatgatgacgccagtgcccatgaccagctcctctgggcgattcacctcagcggcctggatgacctgctcctctttctggccagctcgtctgctgaggagcaatggagcctacatgtgctagagattgtctcccttatgtttcgtgaccagaaccccgagcagctggcgggagtagggcagggacgcttagctcaggagcggagtgcagattttgcagaactggaggtgttgcgccagcgagagatggcagaaaagaagactcgagccctccagcgaggcaacaggcattctcgatttgggggctcctatattgtccaggggttgaaatccattggggagagggacctcatctttcacaaaggccttcacaacctacgaaactacagttcagatttgggaaagcagccgaaaaaggtgcctaaacgtcgccaggccgcccgagagctgtccattcagcgccgttctgccctcaatgtgaggctcttcctcagagacttctgctctgagttcctggagaactgttacaaccggctcatgggatcagtaaaggatcacctgcttcgggagaaagctcagcagcatgatgagacctattatatgtgggccttggctttcttcatggccttcaaccgagctgcctccttccggccaggcctggtttctgagaccctcagtgtccgtaccttccacttcattgagcagaacctcaccaactactatgagatgatgctgactgaccgcaaggaagctgcctcctgggcacgccggatgcacttggctctgaaggcctatcaggagctgctggcaacagtgaatgagatggacatatctccagatgaggctgtgagggagagcagccgcatcatcaagaacaatattttctatgtgatggagtaccgagaactattcctggcactttttcgaaagtttgatgagagatgccagccccgctctttccttcgtgacctggtggagaccacccacctcttcctcaaaatgttggagcgattctgtcggagccgtgggaacctggtggtgcagaacaaacaaaagaagagaaggaagaagaagaagaaggtcctagaccaggccattgtttctggtaatgtcccatctagcccagaagaagtggaggctgtgtggccagccctggctgagcagctacagtgctgtgcccagaattctgagctcagcatggactccgtggttccctttgatgcggcctcagaggtgccagtggaggagcagcgggcagaagctatggtacggatccaagactgtctcctggctggccaggccccacaggccctgactctcctgaggtctgctcgggaggtgtggcctgaaggagatgtgtttggctctcaagacatttctccagaggaagagatccagttgctgaaacaaatcctctctgctccacttccccggcagcagggcccagaggaacgtggggcagaggaagaagaagaggaggaggaggaggaagaggaggagttgcaagtggtccaggtgtcggagaaagaatttaattttctggactacctgaaacgctttgcatgttcaactgtcgttcgagcctatgtgctgctactaaggagctaccagcagaatagtgcccacactaaccattgcattgtgaagatgctgcaccggctggcccatgacctcaaaatggaagccctactttttcagctgtcagtcttctgcctcttcaatcgtctgcttagtgaccctgctgctggagcctacaaagagctagtgacttttgccaaatacatcctgggcaaattttttgcactggctgcagtcaaccaaaaagcctttgtggagctgttgttctggaagaacacagctgtggttcgagagatgactgagggctatggctccctggatgacaggtcttccagtcgcagagcacctacatggagccccgaagaagaggctcatcttcgggagctgtacctcgccaataaggacgtggaagggcaggatgtggtggaagccatcttggcccacctgaatactgttcctcgaacacgcaagcagatcatccaccatctggtacagatgggactggctgacagtgtcaaggacttccaaaggaaaggaacccatattgtactgtggacgggggatcaggagttggagctgcagcggctttttgaggaattccgggactcagatgatgtcctgggtcatatcatgaagaatatcacagccaaacgctcacgggcccgaatagtggataaactcttggctctggggctggtggctgagcggcgggagctgtacaagaaacggcagaaaaagttggcatcctccatcttgccaaatggagcggagtccctgaaagatttttgccaggaagatctggaagaagaggaaaacctgcctgaggaagacagcgaagaggaagaagaagggggctcagaagcagaacaagtccagggtagcttagtcctttcaaatgaaaaccttggtcaaagcctgcatcaggaaggcttttctatcccgctcctatggctccagaactgcctgatccgagcagctgatgatcgggaagaggatggctgctcccaggccgttccattggtgccactcacagaggaaaatgaggaagccatggaaaacgaacagtttcagcagctgttgcgcaagctaggggttcggccccctgcctctgggcaggaaaccttctggcgaattccagccaagctgagtcctacccagctccggagggcagcagcttctttgagtcaaccagaggaggaacagaagctgcagccagagctgcagcctaaagtccctggagagcaaggctctgatgaggagcactgtaaagagcaccgagcacaagccctgagggccctcttgctagcccacaagaagaaagcgggcctggcatccccagaggaggaagacgctgttggtaaagagccgctgaaggcagcacccaagaaacgacaattgctggacagcgacgaggaacaggaagaagatgagggcaggaacagagcaccagagttgggagctccaggaatccaaaagaagaaacgataccagattgaggatgatgaggatgactgaagagctaagaagcctaggggtagagatagacacgtttttagatggtgcattcaagtcagagttggaagggtcatacaggacccagaagctcctcttactggacagagcagtagaatcccaggctctttcacggatttaggctgagaaacttcagcagcagtattggacttctctgctgtcagtctttgtttctcccagtttttatcggtatgccccagcagctctctggagatttagttctcttcttctaggaaccatttcttttggttattggagctccttagcaaataagaggagtgagtgaaatagagaaagcaccccggaccccttttattggtctgttcctttggctttctcttggaggtgggtcgcagcaccagatggggagctttatgacatgacaggcgggagttttgtaccacttttagaagataccagatgcctctgtcctcattttgtttcctatgatcatcctctagataccagatagaggcccattcctgcatttgagatagggttggaatatagtactctagatgatgaatgtgtttgctttgtgtttggtattaaacatgtaagattagaagttctcatctcagtctgacttggcgatatgtctaagttccccagcccttcccctgctgtgctcttgaaagaagaacttaacaattttagggtaaaaagagaccaacagaccggcacagtggctcaaacctgttgtcctagcactttgggaggctgaggcgggcggatcacctgaggtcaggagtttgagaccggcctggacaatatggcgaaatcccatctccactaaaaatacaaaaattagccggccatggtggcatgcgcctgtaatcccagccactcgggtggctgaggcaggagaattgcctgaacccaggaggcagaggttgcagtgagctaaggtcacgccagtgcatatgcctgggcgacagagcaagactctgtctcaaaaaaaaagaaaaaaaaaaaagaccaacaaccttcccttttcttccgctttccctacagaagacacagaaaagcatttttgcctctagatccttttgtctagggtaaattcttagggtgacaagagtatgcggcaggaagaaggaggagccataaaggaagagaagccagcttgttggcatggggcatagaaaaggacaaaatctaggcatgaaaaggatggataaatactgcaaatattatgttcttacccattcttggaaacgtcagctttcttgcttcctgtgcttccagccgaggtagggcaaaggtgagattgagaaaatagccattcagctcaggaaggcttctaagtaaaggatggatttggaaaaaaaaaaaaaaaaa

SEQ ID NO: 142109 - DNA, 3627 bp, Artificial Sequence
  derived and/or modified sequence
atggacctgcacatgatgaactgcgagctgctggccacctgcagcgccctgggctacctggagggcgacacctaccacaaggagcccgactgcctggagagcgtgaaggacctgatcagatacctgagacacgaggacgagaccagagacgtgagacagcagctgggcgccgcccagatcctgcagagcgacctgctgcccatcctgacccagcaccaccaggacaagcccctgttcgacgccgtgatcagactgatggtgaacctgacccagcccgccctgctgtgcttcggcaacctgcccaaggagcccagcttcagacaccacttcctgcaggtgctgacctacctgcaggcctacaaggaggccttcgccagcgagaaggccttcggcgtgctgagcgagaccctgtacgagctgctgcagctgggctgggaggagagacaggaggaggacaacctgctgatcgagagaatcctgctgctggtgagaaacatcctgcacgtgcccgccgacctggaccaggagaagaagatcgacgacgacgccagcgcccacgaccagctgctgtgggccatccacctgagcggcctggacgacctgctgctgttcctggccagcagcagcgccgaggagcagtggagcctgcacgtgctggagatcgtgagcctgatgttcagagaccagaaccccgagcagctggccggcgtgggccagggcagactggcccaggagagaagcgccgacttcgccgagctggaggtgctgagacagagagagatggccgagaagaagaccagagccctgcagagaggcaacagacacagcagattcggcggcagctacatcgtgcagggcctgaagagcatcggcgagagagacctgatcttccacaagggcctgcacaacctgagaaactacagcagcgacctgggcaagcagcccaagaaggtgcccaagagaagacaggccgccagagagctgagcatccagagaagaagcgccctgaacgtgagactgttcctgagagacttctgcagcgagttcctggagaactgctacaacagactgatgggcagcgtgaaggaccacctgctgagagagaaggcccagcagcacgacgagacctactacatgtgggccctggccttcttcatggccttcaacagagccgccagcttcagacccggcctggtgagcgagaccctgagcgtgagaaccttccacttcatcgagcagaacctgaccaactactacgagatgatgctgaccgacagaaaggaggccgccagctgggccagaagaatgcacctggccctgaaggcctaccaggagctgctggccaccgtgaacgagatggacatcagccccgacgaggccgtgagagagagcagcagaatcatcaagaacaacatcttctacgtgatggagtacagagagctgttcctggccctgttcagaaagttcgacgagagatgccagcccagaagcttcctgagagacctggtggagaccacccacctgttcctgaagatgctggagagattctgcagaagcagaggcaacctggtggtgcagaacaagcagaagaagagaagaaagaagaagaagaaggtgctggaccaggccatcgtgagcggcaacgtgcccagcagccccgaggaggtggaggccgtgtggcccgccctggccgagcagctgcagtgctgcgcccagaacagcgagctgagcatggacagcgtggtgcccttcgacgccgccagcgaggtgcccgtggaggagcagagagccgaggccatggtgagaatccaggactgcctgctggccggccaggccccccaggccctgaccctgctgagaagcgccagagaggtgtggcccgagggcgacgtgttcggcagccaggacatcagccccgaggaggagatccagctgctgaagcagatcctgagcgcccccctgcccagacagcagggccccgaggagagaggcgccgaggaggaggaggaggaggaggaggaggaggaggaggagctgcaggtggtgcaggtgagcgagaaggagttcaacttcctggactacctgaagagattcgcctgcagcaccgtggtgagagcctacgtgctgctgctgagaagctaccagcagaacagcgcccacaccaaccactgcatcgtgaagatgctgcacagactggcccacgacctgaagatggaggccctgctgttccagctgagcgtgttctgcctgttcaacagactgctgagcgaccccgccgccggcgcctacaaggagctggtgaccttcgccaagtacatcctgggcaagttcttcgccctggccgccgtgaaccagaaggccttcgtggagctgctgttctggaagaacaccgccgtggtgagagagatgaccgagggctacggcagcctggacgacagaagcagcagcagaagagcccccacctggagccccgaggaggaggcccacctgagagagctgtacctggccaacaaggacgtggagggccaggacgtggtggaggccatcctggcccacctgaacaccgtgcccagaaccagaaagcagatcatccaccacctggtgcagatgggcctggccgacagcgtgaaggacttccagagaaagggcacccacatcgtgctgtggaccggcgaccaggagctggagctgcagagactgttcgaggagttcagagacagcgacgacgtgctgggccacatcatgaagaacatcaccgccaagagaagcagagccagaatcgtggacaagctgctggccctgggcctggtggccgagagaagagagctgtacaagaagagacagaagaagctggccagcagcatcctgcccaacggcgccgagagcctgaaggacttctgccaggaggacctggaggaggaggagaacctgcccgaggaggacagcgaggaggaggaggagggcggcagcgaggccgagcaggtgcagggcagcctggtgctgagcaacgagaacctgggccagagcctgcaccaggagggcttcagcatccccctgctgtggctgcagaactgcctgatcagagccgccgacgacagagaggaggacggctgcagccaggccgtgcccctggtgcccctgaccgaggagaacgaggaggccatggagaacgagcagttccagcagctgctgagaaagctgggcgtgagaccccccgccagcggccaggagaccttctggagaatccccgccaagctgagccccacccagctgagaagagccgccgccagcctgagccagcccgaggaggagcagaagctgcagcccgagctgcagcccaaggtgcccggcgagcagggcagcgacgaggagcactgcaaggagcacagagcccaggccctgagagccctgctgctggcccacaagaagaaggccggcctggccagccccgaggaggaggacgccgtgggcaaggagcccctgaaggccgcccccaagaagagacagctgctggacagcgacgaggagcaggaggaggacgagggcagaaacagagcccccgagctgggcgcccccggcatccagaagaagaagagataccagatcgaggacgacgaggacgactag

SEQ ID NO: 142110 - DNA, 3627 bp, Artificial Sequence
  derived and/or modified sequence
atggatctgcacatgatgaactgcgaactgctggccacatgttcagcgcttggttatctggagggggacacatatcacaaagaacccgactgtctggaatctgtcaaggacttgattagatacctgcggcacgaggacgagacaagggatgtgaggcagcagttgggtgctgcgcagattctccaaagtgacctgcttccaatcctgactcaacaccaccaggacaaaccgctgttcgacgctgttatacgtctgatggtcaacctgacacaacctgccctcttgtgctttgggaacctgcctaaagagccatcattccgccatcacttccttcaagttttgacatacctgcaagcttataaagaagcttttgcatccgagaaagctttcggtgtgctcagcgagaccttgtacgagctgctgcagctcgggtgggaggagaggcaagaggaagataatctgctcattgagcggatattactactcgtacggaacattttacacgtgcccgcggacctcgatcaggaaaagaagattgacgacgatgcttctgctcacgaccagctcctctgggccatccacctgtctggattagatgacctcctgctatttctcgcctcttcctccgcagaggagcaatggagtctccacgtgcttgaaatcgtgagtctgatgtttagggatcagaaccccgagcagctggctggcgtgggccaggggagacttgcgcaggagagatccgcggattttgcagagctcgaagtgttgagacagcgggaaatggcagagaagaaaacccgggcactgcagcgtgggaaccgacactcgcgattcggcggctcctacatcgttcagggtctcaaatccattggcgagagggacctgatttttcataaaggcctgcacaatttgaggaattacagttccgacctaggaaaacagccaaagaaggttccaaagagacgtcaggctgcaagagagctgtctattcagagacgaagcgccctaaatgtccgtctgtttttacgggatttctgctccgaatttcttgagaactgttataacaggctcatgggctccgtgaaagaccatctgctgagagaaaaagcccaacagcacgatgagacttattatatgtgggctcttgcttttttcatggcctttaatcgcgctgcctccttcagacccggcctggtgtcagaaacgctctcagttagaacctttcactttatagaacagaacctgacaaactattacgagatgatgcttacagatcggaaagaagccgcctcctgggcaaggcggatgcacctggcactgaaagcataccaggagttgctggcgacagtaaacgagatggatatttctcccgatgaagcggtgagagagagttcacgcatcattaaaaataacatcttttatgtaatggagtacagggaactcttcttggccctcttcagaaaatttgatgaaaggtgtcaaccccggagctttttgcgagatctcgtggaaaccacgcacctattcctcaaaatgctggagagattttgccgcagcagagggaacctagtggtgcagaataagcagaagaagcggcgcaagaaaaagaaaaaggtactggaccaggcaatagtgagcggcaacgttcctagttccccagaggaggtggaggccgtctggcctgccttagctgagcagttgcaatgttgcgcacaaaactctgagctaagcatggactcagtagtgccgttcgatgccgcctccgaagtgcccgtggaagagcaaagagcggaggccatggtgaggattcaagactgtctcctggccggccaggctccacaagccctgacactgctcaggtccgccagagaggtgtggcccgagggggatgtgtttggctcacaggacatcagtcccgaagaagaaatacagcttctgaagcagatcttgtctgccccactgcctcggcagcaaggaccagaagagcggggggccgaggaagaagaggaagaagaagaggaagaagaagaagagctccaggttgtacaagtgtccgagaaggagttcaattttctggactacctgaagcggttcgcgtgtagtaccgtggtgagagcatacgtactcttgctgagaagctaccagcagaatagcgcgcataccaaccactgcatagtaaagatgctgcatagattagctcacgacctaaaaatggaggctcttctctttcagctttcggtgttttgtctctttaaccgcctgctgtcagatccagccgctggcgcctacaaggaactggtgactttcgctaagtacattctcggcaaatttttcgcactcgcagcagtcaatcagaaggctttcgttgaactcttattttggaagaatacggcagttgtgagggaaatgaccgagggatacgggagtctggacgatagaagctccagccgacgggcacctacgtggtcccctgaagaagaagcgcacctcagggagctttacctcgccaacaaagatgtagaagggcaagacgtggtcgaggctattctggcccatttgaacactgtacctcggacaagaaaacagatcatccaccacctggtacagatgggtcttgctgactcagtcaaggacttccaacgcaaaggcacccatatcgtgctttggactggggatcaggagctggaacttcagcgattatttgaagagttccgcgactccgacgacgtgctgggccatattatgaaaaatattaccgccaagcgatcaagagcccggattgtggacaaactgctcgcgctggggctggtggccgagcggcgggaattgtacaagaagcggcagaagaaacttgcaagttcaatccttcccaatggggctgagtcgctgaaggacttctgccaggaagacctcgaggaggaagagaaccttccagaagaagacagtgaggaggaggaggaaggcggtagcgaggccgaacaggttcaggggtctctggtcctgagcaacgaaaacctcggacaatctcttcatcaggagggattcagcattcctttactgtggttgcagaactgtctcatcagggccgctgatgacagagaagaagatggatgcagccaggccgtcccccttgtacccctcaccgaagaaaacgaagaagccatggaaaacgagcagttccagcagctgctgaggaaactgggcgtgcggcctccagcctcaggccaagaaacattttggcggatcccagccaaactgtctcctactcaactgagaagagccgcagcaagcctgtctcaacctgaggaggagcagaagctacagcccgagttgcagccaaaggtccctggcgaacaggggagcgatgaggaacactgcaaggagcacagagcacaagcactgagggccctgctgttggctcataaaaagaaggccggcctggcttctcccgaagaggaagatgccgtaggcaaggaacctctaaaagctgcccctaaaaagcgacagctgctagacagcgatgaagagcaggaagaagacgagggtagaaaccgcgctcctgaactcggggcacccgggatccagaagaagaaaagataccaaatagaggacgatgaggacgattag

SEQ ID NO: 142111 - DNA, 3627 bp, Artificial Sequence
  derived and/or modified sequence
atggacctgcacatgatgaactgtgagctgctggccacctgcagcgccctgggctacctggagggggacacctaccacaaggagccagactgcctggagagcgtgaaggacctgatccgctacctgcggcatgaagatgagaccagagatgtgcggcagcagctgggcgccgcccagatcctgcagagcgacctgctgcccatcctgacccagcaccaccaggacaagcccctgtttgatgctgtgatccggctgatggtgaacctgacccagcctgccctgctgtgctttggaaacctgcccaaggagcccagcttccgccaccacttcctgcaggtgctgacctacctgcaggcctacaaggaggcctttgccagcgagaaggccttcggcgtgctgtctgagaccctgtatgagctgctgcagctgggctgggaggagcggcaggaggaggacaacctgctgattgaaagaatcctgctgctggtgaggaacatcctgcacgtgcctgctgacctggaccaggagaagaagattgatgatgatgccagcgcccatgaccagctgctgtgggccatccacctgagcggcctggatgacctgctgctcttcctggccagcagcagcgctgaggagcagtggagcctgcacgtgctggagatcgtgtccctgatgttccgggaccagaaccctgagcagctggccggcgtgggccagggccgcctggcccaggagaggtctgctgactttgctgagctggaggtgctgcggcagcgggagatggccgagaagaagacccgggccctgcagaggggcaacagacacagcagatttggaggcagctacatcgtgcagggcctgaagagcatcggggagcgggacctgatcttccacaagggcctgcacaacctgaggaactacagcagtgacctgggcaagcagcccaagaaggtgcccaagaggcggcaggccgcccgggagctgagcatccagaggagaagtgccctgaatgtgcggctcttcctgcgggacttctgcagcgagttcctggagaactgctacaaccggctgatgggctctgtgaaggaccacctgctgcgggagaaggcccagcagcatgatgagacctactacatgtgggccctggccttcttcatggccttcaacagagctgccagcttccggcccggcctggtgtctgagaccctgtctgtgaggaccttccacttcatcgagcagaacctgaccaactactatgagatgatgctgacagacaggaaggaggccgcctcctgggcccggaggatgcacctggccctgaaggcctaccaggagctgctggccaccgtgaatgagatggacatcagcccagatgaggccgtgcgggagagcagccgcatcatcaagaacaacatcttctacgtgatggagtaccgggagctgttcctggccctcttcaggaagtttgatgagcgctgccagcccaggagcttcctgcgggacctggtggagaccacccacctgttcctgaagatgctggagcgcttctgccgcagccggggcaacctggtggtgcagaacaagcagaagaagaggaggaagaagaagaagaaggtgctggaccaggccatcgtgtctggaaatgtgcccagcagccctgaggaggtggaggccgtgtggccagccctggccgagcagctgcagtgctgtgcccagaacagcgagctgtccatggacagcgtggtgccctttgatgctgccagcgaggtgcctgtggaggagcagagagctgaggccatggtgcgcatccaggactgcctgctggccggccaggccccccaggccctgaccctgctgcggagcgcccgggaggtgtggccagaaggagatgtgtttggcagccaggacatcagccctgaggaggagatccagctgctgaagcagatcctgagcgcccccctgccccggcagcagggccctgaggagagaggagctgaggaggaggaggaggaggaggaggaggaggaggaggagctgcaggtggtgcaggtgtctgagaaggagttcaacttcctggactacctgaagagatttgcctgcagcacagtggtgcgggcctacgtgctgctgctgcggagctaccagcagaacagcgcccacaccaaccactgcatcgtgaagatgctgcaccggctggcccatgacctgaagatggaggccctgctcttccagctgagcgtcttctgcctcttcaaccggctgctgagtgaccctgctgctggggcctacaaggagctggtgacctttgccaagtacatcctgggcaagttctttgccctggccgctgtgaaccagaaggcctttgtggagctgctcttctggaagaacacagctgtggtgcgggagatgacagagggctacggcagcctggatgacaggagcagcagcagaagagcccccacctggagccctgaggaggaggcccacctgcgggagctgtacctggccaacaaggatgtggagggccaggatgtggtggaggccatcctggcccacctgaacacagtgcccaggaccaggaagcagatcatccaccacctggtgcagatgggcctggccgacagcgtgaaggacttccagaggaagggcacccacatcgtgctgtggacaggagaccaggagctggagctgcagaggctgtttgaggagttccgggacagtgatgatgtgctgggccacatcatgaagaacatcacagccaagaggagccgggccagaattgtggacaagctgctggccctgggcctggtggccgagcggcgggagctgtacaagaagaggcagaagaagctggccagcagcatcctgcccaacggggctgagagcctgaaggacttctgccaggaggacctggaggaggaggagaacctgcctgaggaggacagcgaggaggaggaggagggcggcagcgaggccgagcaggtgcagggcagcctggtgctgagcaatgaaaacctgggccagagcctgcaccaggagggcttcagcatccccctgctgtggctgcagaactgcctgatccgggcagcagatgaccgggaggaggatggctgcagccaggccgtgcccctggtgcccctgacagaggagaatgaggaggccatggagaatgagcagttccagcagctgctgaggaagctgggcgtgcggcccccagccagcggccaggagaccttctggaggatcccagccaagctgagccccacccagctgcggcgggctgctgccagcctgagccagcctgaggaggagcagaagctgcagcctgagctgcagcccaaggtgcctggagagcagggcagtgatgaggagcactgcaaggagcaccgggcccaggccctgcgggccctgctgctggcccacaagaagaaggccggcctggccagccctgaggaggaggatgctgtgggcaaggagcccctgaaggccgcccccaagaagaggcagctgctggacagtgatgaggagcaggaggaggatgagggcaggaacagagcccctgagctgggcgcccctggcatccagaagaagaagcgctaccagattgaagatgatgaagatgactag

SEQ ID NO: 142112 - DNA, 3627 bp, Artificial Sequence
  derived and/or modified sequence
atggacctgcacatgatgaactgcgagctgctggccacctgcagcgcactcggttacctggaaggagatacttatcacaaagaacctgactgcctggaatctgtaaaggatctgattcgttacctgcggcatgaggatgaaaccagggacgtgcgacagcaattgggagccgcacagattctgcagtccgacctcctgcctattctgactcagcaccaccaggacaagcccctgttcgatgccgtgattcgcctgatggtgaatctgactcagccagcgctcctgtgctttggtaacctccctaaggaacccagctttcgacaccattttttgcaggtgctaacttacctgcaggcctataaagaggcattcgcgtccgaaaaagcgtttggtgtactttctgagacgctgtacgaactgctgcaactgggatgggaagagagacaggaggaggataatctgctcatcgagcgaatactgcttctcgtgcggaacatcctccatgtgcccgccgatctggaccaggagaaaaagatcgacgacgatgcaagtgctcacgaccagttactctgggccatacatctgtctggactggacgacctgcttctatttctagcatccagttccgcggaggaacagtggtccctccatgtgctggagattgtgagcctcatgtttcgagatcaaaaccctgagcagttggccggcgtcggacaggggcgactggcacaggaacgctcggccgattttgcagaactcgaggtgttacgccagagagagatggccgaaaaaaaaactcgcgccctgcagcgcggaaacaggcattcaaggtttggaggcagttacatcgtgcagggactgaaatcaattggggaacgcgatctcatcttccacaagggcctgcacaacctgcggaattacagctccgacttgggaaagcagcccaaaaaggttcccaagcggcgtcaggccgcccgcgaactgagcatacaacgcagatctgcccttaacgttcgtctctttttgcgcgacttctgttcagagttcctcgaaaactgctacaaccggttaatgggttcagtgaaagaccacctgctgcgcgaaaaggcccagcagcatgatgaaacctattacatgtgggcactagctttctttatggccttcaatcgggccgcttcatttcggccgggcctggtgtctgaaacactgtcagttcgcacctttcatttcattgaacagaacctcacgaattactatgagatgatgctgacagaccgcaaggaggcggcatcttgggcacgccggatgcacctggctctcaaagcataccaggagctgctggctacagtgaatgaaatggacatcagcccggatgaggccgtccgtgagtccagccgcatcatcaaaaataacatcttttacgtgatggaatatcgggagctcttccttgcactatttagaaagttcgacgaaaggtgccagccaaggtcattcctgcgggatctggtggagaccacgcacttatttttgaaaatgctggaacgattttgccggtcccgaggcaatctcgtcgtacagaacaaacaaaaaaaaagacggaaaaagaaaaaaaaggtgctggatcaggcaatagtgtcaggaaacgtcccatcttccccagaagaagtggaagccgtctggcccgctctcgctgaacagcttcagtgctgcgcgcagaatagtgaattatctatggattccgtcgtaccctttgacgcagcctcagaagtgcccgtcgaagagcagcgggccgaagccatggtacgcattcaagattgcttgctggcaggtcaagcgccccaagcactgaccctcctgaggtctgcgagggaagtctggcccgaaggcgatgttttcggtagtcaagacatctcacccgaagaagagatccagctgctgaaacaaatcctgtccgctccactgcccaggcagcaaggacctgaggaaagaggggctgaagaggaagaggaggaggaagaggaagaggaagaagagcttcaggtagttcaagtgtcggaaaaggagttcaatttcttggattatctgaaacgattcgcctgttctacagtagtgcgcgcctacgtgctcctccttcgatcctaccagcagaactccgctcacacaaatcactgcattgttaagatgttgcatcggttagctcacgacctgaagatggaggcactgctatttcagctgagtgtgttttgtctgttcaaccgcctcctctccgaccctgccgccggggcctacaaggagcttgtgaccttcgctaagtacattctgggcaaattctttgctttggccgcggtgaatcaaaaagctttcgtcgaactactcttttggaaaaacacagccgttgtacgggaaatgaccgaaggatatggtagcttagatgacaggtccagttcccgccgggcccctacctggagccccgaagaggaagcacatttaagagaactttacctagccaataaggatgtcgagggccaggacgtggtggaggcaatcctggcgcacctgaacacagtgcctaggaccaggaagcagataattcaccacctagtgcaaatgggtcttgccgattctgttaaagattttcagcgcaaaggtacccacatcgtgttatggacgggggatcaggaactcgaactgcagagactgtttgaagagttccgagacagtgacgatgttctcggccacattatgaaaaatataacagctaaacgaagccgcgcccggattgtcgataaattacttgcactaggtctggtggccgaaaggcgagagttgtacaagaagaggcagaaaaagttggcatcatccatactgcctaatggtgcagaatctttaaaagatttctgccaggaggatttggaagaggaagagaatttacctgaagaagactcggaagaagaagaagaaggcggctccgaggcggagcaggtacagggctcactcgtgctgtccaatgagaatctggggcaatcactccaccaagaaggattctcgattccactactctggctgcagaactgcctcattcgcgctgccgacgaccgtgaggaggacgggtgcagtcaggctgtccctcttgtgcccctgacggaagagaacgaagaagccatggaaaacgagcagtttcagcaacttctgcgcaaactcggggtcaggccacctgctagtggacaggaaactttctggcggatcccagccaagctgtcaccgacccaactgagaagggcagctgcctcactttcacagcctgaggaagagcaaaagttacagcctgaactacaacccaaggtcccaggagaacagggctcagacgaagagcactgcaaagagcaccgggctcaggctctccgggccctcctattggctcacaaaaaaaaagctgggctggccagcccagaagaggaggatgcggtgggcaaagagcctctcaaggccgcaccaaagaaaaggcagctcctcgatagcgatgaagaacaggaagaggacgagggtcgcaatcgagccccagagctcggcgcccctgggatacagaagaaaaaacgataccaaattgaagacgacgaggatgactag

SEQ ID NO: 142113 - DNA, 3627 bp, Artificial Sequence
  derived and/or modified sequence
atggatctgcacatgatgaattgcgagctgctcgccacctgctcagccctggggtatctcgagggcgacacatatcataaggagcctgactgtcttgagtcagtaaaagacctgatccggtacctgaggcacgaagatgaaacaagagacgtgagacagcaactgggtgccgcacaaattctgcagtccgacctactcccaatattaacacagcaccaccaggacaagcctctgtttgatgccgtgatccggcttatggtcaatttgacccaacccgcactgttgtgctttgggaatctaccgaaggaaccatcttttcgacaccacttcctgcaggtgctgacctacctccaggcgtacaaggaagcatttgctagtgaaaaggccttcggggttttatctgagacattatacgagttacttcagttaggttgggaggagaggcaagaggaggacaaccttctgattgaacgaattctgctacttgttcgtaatattctgcatgtgcccgctgatctggatcaggaaaaaaagatagatgacgacgcgagcgcccatgatcagctactctgggctatccacttgtccggtttggacgacctgctgttattcctagcatctagttccgcagaggaacagtggagcctacacgtgctcgagatcgtgagcctgatgtttagggatcaaaaccccgagcagttggccggagtcggtcagggcagactggctcaagaaagaagtgctgactttgcagaattggaggtactgcggcaaagggagatggccgagaagaaaaccagagccctgcagaggggaaaccgacactcccgctttggcggatcatatatcgtgcagggccttaaaagtattggcgaacgcgacctcatcttccataaaggtcttcacaaccttagaaactatagttccgatctcggcaagcagccgaaaaaggttcccaagagacggcaggccgctagggaactgtccatacaacgcagaagcgcgctgaacgttcgactgtttttacgggacttctgctccgagttcctagaaaactgttacaatagattgatggggagcgtcaaggatcatctactgcgggagaaggcccagcagcacgatgaaacttattacatgtgggctctggccttttttatggcgttcaaccgagccgcatcctttagaccgggactggtctccgagaccctctccgtaaggacattccatttcatagagcaaaatttaacgaattattatgagatgatgctcacagacaggaaagaggcggcaagctgggctcgacgcatgcacttggctttgaaagcctaccaggagctgttggcaaccgtcaatgagatggacatttcacccgatgaggctgtgagagagagtagtagaataataaagaacaacatcttctacgtgatggaatatcgagaactgttcctcgccttgtttaggaagtttgacgaaagatgtcagcctaggtccttcctgagggacctggtcgagactactcacctcttcctgaagatgcttgagcggttttgtcggtcccggggtaatctggtagtgcaaaataaacagaagaagagacggaaaaaaaaaaagaaggtgctggatcaggcaatcgtgtccggtaatgtcccatccagcccagaagaggttgaagcagtgtggccagcactcgctgagcaacttcagtgctgcgctcagaacagcgaactgagcatggattcagtggtcccgtttgacgccgcatctgaggttcccgtcgaagagcaacgggcagaggccatggtgcggatccaagactgcctcttggcaggccaagcaccccaggccttgacacttctgcgctcagctcgtgaggtttggccagagggagatgtttttggctcccaggatatttcccccgaagaggaaattcagctactgaagcaaattctttctgcccctctccccagacagcagggacccgaagagcgcggagccgaggaggaggaggaggaagaggaagaggaggaagaggaactacaggtcgtccaggttagcgaaaaggaatttaactttctcgactacttgaagcggtttgcctgcagtaccgtcgtgagagcttatgtgctgttactgcgctcttatcagcaaaatagcgcacacactaatcactgtatcgtaaagatgctgcacagactcgcacacgatctaaaaatggaggccttactgttccagctctctgtcttctgtctgtttaacagactcctgtcagacccagctgccggagcctacaaggaactggtgacatttgcaaaatatatcctcggaaaattttttgccctggcagccgtaaatcagaaagcctttgtggagctgctcttttggaaaaatacagctgtagtcagagagatgacagaagggtacggaagcctggatgacaggagctcaagccgtcgcgctcctacttggagtcctgaagaagaagctcatctgcgggagttgtatctggcaaataaagatgtggagggccaggatgtggtggaagcaattctcgcgcacttgaatactgtcccaagaacccggaagcagattatccaccaccttgtgcagatgggactagcagattccgtgaaggacttccaaagaaagggaacccacatcgtgctgtggaccggcgaccaagagttggagctgcaacgtctgttcgaggagtttagagattccgacgacgtgcttggccatatcatgaagaacatcaccgcaaaacgctcacgcgcacggatagtggacaaactcctcgccctgggtttagtggccgagaggagggaactgtacaagaagcgacagaaaaagctggcctcatccattttacctaacggcgcagagtcactgaaagatttctgccaggaggacctagaggaagaggagaatctgcctgaggaggacagcgaggaagaggaggaggggggaagcgaggcagaacaggtgcaaggttccctcgttctgagtaatgagaatttgggacagtctctgcatcaggaaggattctcaatcccattactttggctccaaaattgcttgatcagagcagctgatgacagggaagaagacggttgcagccaggcagttcccttagtacccctcacggaggagaatgaggaagcaatggaaaatgaacagttccagcaactcctgcggaagctgggggtacggcctcctgcctctggtcaagagactttctggcgcatacctgcgaagttatctcccacgcagctgagaagagccgctgcctcattgagccagcccgaggaagagcagaagctgcaaccggagctgcagcccaaggtacctggagagcaggggagtgatgaggagcattgcaaagagcacagggctcaagctttgagggccctattattggctcataaaaagaaggcaggcctggcttctccagaagaggaggatgcggtcggtaaggagccacttaaggcggctcctaagaagcggcagctgttggattctgatgaagaacaggaagaggacgaggggaggaatagagccccagagttaggagcaccaggtattcagaagaaaaaacgctatcagatagaagatgatgaggatgattag

SEQ ID NO: 142114 - DNA, 4371 bp, Artificial Sequence
  derived and/or modified sequence
ggtccagctgagcctggtggcggaaaggctgcggccccgcgccagagggccggtggctcctccgggcttctgaggacccgcagggagcgggcctcatcatttctgtctcctgtttctccacttccttctctgttggttggtccactgatgtatggacttgcacatgatgaactgtgaacttctagccacatgtagtgcccttgggtacttggagggagacacttaccataaggaaccagattgcttagagagcgtgaaggatctgatccgctatttgaggcatgaggatgagacacgagatgtgcggcagcagctgggggcagcccagatcctacagagcgaccttctgcccatcctcacccagcaccaccaggacaagcctctctttgatgctgttatcagactgatggtgaacttgacacaaccagccttgctctgttttggcaatctgcctaaggagcccagctttcggcaccattttttgcaggtgctaacttatttgcaggcctacaaagaggcctttgccagtgagaaggcttttggagtcctcagtgaaaccttgtatgagctgctgcagctgggctgggaggaacggcaggaggaagacaacttgctgattgaacggatcctactgctggtcagaaatattctccatgtcccagctgaccttgatcaggagaagaagattgatgatgacgccagtgcccatgaccagctcctctgggcgattcacctcagcggcctggatgacctgctcctctttctggccagctcgtctgctgaggagcaatggagcctacatgtgctagagattgtctcccttatgtttcgtgaccagaaccccgagcagctggcgggagtagggcagggacgcttagctcaggagcggagtgcagattttgcagaactggaggtgttgcgccagcgagagatggcagaaaagaagactcgagccctccagcgaggcaacaggcattctcgatttgggggctcctatattgtccaggggttgaaatccattggggagagggacctcatctttcacaaaggccttcacaacctacgaaactacagttcagatttgggaaagcagccgaaaaaggtgcctaaacgtcgccaggccgcccgagagctgtccattcagcgccgttctgccctcaatgtgaggctcttcctcagagacttctgctctgagttcctggagaactgttacaaccggctcatgggatcagtaaaggatcacctgcttcgggagaaagctcagcagcatgatgagacctattatatgtgggccttggctttcttcatggccttcaaccgagctgcctccttccggccaggcctggtttctgagaccctcagtgtccgtaccttccacttcattgagcagaacctcaccaactactatgagatgatgctgactgaccgcaaggaagctgcctcctgggcacgccggatgcacttggctctgaaggcctatcaggagctgctggcaacagtgaatgagatggacatatctccagatgaggctgtgagggagagcagccgcatcatcaagaacaatattttctatgtgatggagtaccgagaactattcctggcactttttcgaaagtttgatgagagatgccagccccgctctttccttcgtgacctggtggagaccacccacctcttcctcaaaatgttggagcgattctgtcggagccgtgggaacctggtggtgcagaacaaacaaaagaagagaaggaagaagaagaagaaggtcctagaccaggccattgtttctggtaatgtcccatctagcccagaagaagtggaggctgtgtggccagccctggctgagcagctacagtgctgtgcccagaattctgagctcagcatggactccgtggttccctttgatgcggcctcagaggtgccagtggaggagcagcgggcagaagctatggtacggatccaagactgtctcctggctggccaggccccacaggccctgactctcctgaggtctgctcgggaggtgtggcctgaaggagatgtgtttggctctcaagacatttctccagaggaagagatccagttgctgaaacaaatcctctctgctccacttccccggcagcagggcccagaggaacgtggggcagaggaagaagaagaggaggaggaggaggaagaggaggagttgcaagtggtccaggtgtcggagaaagaatttaattttctggactacctgaaacgctttgcatgttcaactgtcgttcgagcctatgtgctgctactaaggagctaccagcagaatagtgcccacactaaccattgcattgtgaagatgctgcaccggctggcccatgacctcaaaatggaagccctactttttcagctgtcagtcttctgcctcttcaatcgtctgcttagtgaccctgctgctggagcctacaaagagctagtgacttttgccaaatacatcctgggcaaattttttgcactggctgcagtcaaccaaaaagcctttgtggagctgttgttctggaagaacacagctgtggttcgagagatgactgagggctatggctccctggatgacaggtcttccagtcgcagagcacctacatggagccccgaagaagaggctcatcttcgggagctgtacctcgccaataaggacgtggaagggcaggatgtggtggaagccatcttggcccacctgaatactgttcctcgaacacgcaagcagatcatccaccatctggtacagatgggactggctgacagtgtcaaggacttccaaaggaaaggaacccatattgtactgtggacgggggatcaggagttggagctgcagcggctttttgaggaattccgggactcagatgatgtcctgggtcatatcatgaagaatatcacagccaaacgctcacgggcccgaatagtggataaactcttggctctggggctggtggctgagcggcgggagctgtacaagaaacggcagaaaaagttggcatcctccatcttgccaaatggagcggagtccctgaaagatttttgccaggaagatctggaagaagaggaaaacctgcctgaggaagacagcgaagaggaagaagaagggggctcagaagcagaacaagtccagggtagcttagtcctttcaaatgaaaaccttggtcaaagcctgcatcaggaaggcttttctatcccgctcctatggctccagaactgcctgatccgagcagctgatgatcgggaagaggatggctgctcccaggccgttccattggtgccactcacagaggaaaatgaggaagccatggaaaacgaacagtttcagcagctgttgcgcaagctaggggttcggccccctgcctctgggcaggaaaccttctggcgaattccagccaagctgagtcctacccagctccggagggcagcagcttctttgagtcaaccagaggaggaacagaagctgcagccagagctgcagcctaaagtccctggagagcaaggctctgatgaggagcactgtaaagagcaccgagcacaagccctgagggccctcttgctagcccacaagaagaaagcgggcctggcatccccagaggaggaagacgctgttggtaaagagccgctgaaggcagcacccaagaaacgacaattgctggacagcgacgaggaacaggaagaagatgagggcaggaacagagcaccagagttgggagctccaggaatccaaaagaagaaacgataccagattgaggatgatgaggatgactgaagagctaagaagcctaggggtagagatagacacgtttttagatggtgcattcaagtcagagttggaagggtcatacaggacccagaagctcctcttactggacagagcagtagaatcccaggctctttcacggatttaggctgagaaacttcagcagcagtattggacttctctgctgtcagtctttgtttctcccagtttttatcggtatgccccagcagctctctggagatttagttctcttcttctaggaaccatttcttttggttattggagctccttagcaaataagaggagtgagtgaaatagagaaagcaccccggaccccttttattggtctgttcctttggctttctcttggaggtgggtcgcagcaccagatggggagctttatgacatgacaggcgggagttttgtaccacttttagaagataccagatgcctctgtcctcattttgtttcctatgatcatcctctagataccagatagaggcccattcctgcatttgagatagggttggaatatagtactctagatgatgaatgtgtttgctttgtgtttggtattaaacatgtaagattagaagttctca

SEQ ID NO: 142115 - protein, 700 aa, Artificial Sequence
  derived and/or modified sequence
MATMIPPVKLKWLEHLNSSWITEDSESIATREGVAVLYSKLVSNKEVVPLPQQVLCLKGPQLPDFERESLSSDEQDHYLDALLSSQLALAKMVCSDSPFAGALRKRLLVLQRVFYALSNKYHDKGKVKQQQHSPESSSGSADVHSVSERPRSSTDALIEMGVRTGLSLLFALLRQSWMMPVSGPGLSLCNDVIHTAIEVVSSLPPLSLANESKIPPMGLDCLSQVTTFLKGVTIPNSGADTLGRRLASELLLGLAAQRGSLRYLLEWIEMALGASAVVHTMEKGKLLSSQEGMISFDCFMTILMQMRRSLISENQDSADVDPQEHSFTRTIDEEAEMEEQAERDREEGHPEPEDEEEEREHEVMTAGKIFQCFLSAREVARSRDRDRMNSGAGSGARADDPPPQSQQERRVSTDLPEGQDVYTAACNSVIHRCALLILGVSPVIDELQKRREEGQLQQPSTSASEGGGLMTRSESLTAESRLVHTSPNYRLIKSRSESDLSQPESDEEGYALSGRRNVDLDLAASHRKRGPMHSQLESLSDSWARLKHSRDWLCNSSYSFESDFDLTKSLGVHTLIENVVSFVSGDVGNAPGFKEPEESMSTSPQASIIAMEQQQLRAELRLEALHQILVLLSGMEEKGSISLAGSRLSSGFQSSTLLTSVRLQFLAGCFGLGTVGHTGGKGESGRLHHYQDGIRAARGY

SEQ ID NO: 142116 - protein, 4861 aa, Artificial Sequence
  derived and/or modified sequence
MATMIPPVKLKWLEHLNSSWITEDSESIATREGVAVLYSKLVSNKEVVPLPQQVLCLKGPQLPDFERESLSSDEQDHYLDALLSSQLALAKMVCSDSPFAGALRKRLLVLQRVFYALSNKYHDKGKVKQQQHSPESSSGSADVHSVSERPRSSTDALIEMGVRTGLSLLFALLRQSWMMPVSGPGLSLCNDVIHTAIEVVSSLPPLSLANESKIPPMGLDCLSQVTTFLKGVTIPNSGADTLGRRLASELLLGLAAQRGSLRYLLEWIEMALGASAVVHTMEKGKLLSSQEGMISFDCFMTILMQMRRSLGSSADRSQWREPTRTSDGLCSLYEAALCLFEEVCRMASDYSRTCASPDSIQTGDAPIVSETCEVYVWGSNSSHQLVEGTQEKILQPKLAPSFSDAQTIEAGQYCTFVISTDGSVRACGKGSYGRLGLGDSNNQSTLKKLTFEPHRSIKKVSSSKGSDGHTLAFTTEGEVFSWGDGDYGKLGHGNSSTQKYPKLIQGPLQGKVVVCVSAGYRHSAAVTEDGELYTWGEGDFGRLGHGDSNSRNIPTLVKDISNVGEVSCGSSHTIALSKDGRTVWSFGGGDNGKLGHGDTNRVYKPKVIEALQGMFIRKVCAGSQSSLALTSTGQVYAWGCGACLGCGSSEATALRPKLIEELAATRIVDVSIGDSHCLALSHDNEVYAWGNNSMGQCGQGNSTGPITKPKKVSGLDGIAIQQISAGTSHSLAWTALPRDRQVVAWHRPYCVDLEESTFSHLRSFLERYCDKINSEIPPLPFPSSREHHSFLKLCLKLLSNHLALALAGGVATSILGRQAGPLRNLLFRLMDSTVPDEIQEVVIETLSVGATMLLPPLRERMELLHSLLPQGPDRWESLSKGQRMQLDIILTSLQDHTHVASLLGYSSPSDAADLSSVCTGYGNLSDQPYGTQSCHPDTHLAEILMKTLLRNLGFYTDQAFGELEKNSDKFLLGTSSSENSQPAHLHELLCSLQKQLLAFCHINNISENSSSVALLHKHLQLLLPHATDIYSRSANLLKESPWNGSVGEKLRDVIYVSAAGSMLCQIVNSLLLLPVSVARPLLSYLLDLLPPLDCLNRLLPAADLLEDQELQWPLHGGPELIDPAGLPLPQPAQSWVWLVDLERTIALLIGRCLGGMLQGSPVSPEEQDTAYWMKTPLFSDGVEMDTPQLDKCMSCLLEVALSGNEEQKPFDYKLRPEIAVYVDLALGCSKEPARSLWISMQDYAVSKDWDSATLSNESLLDTVSRFVLAALLKHTNLLSQACGESRYQPGKHLSEVYRCVYKVRSRLLACKNLELIQTRSSSRDRWISENQDSADVDPQEHSFTRTIDEEAEMEEQAERDREEGHPEPEDEEEEREHEVMTAGKIFQCFLSAREVARSRDRDRMNSGAGSGARADDPPPQSQQERRVSTDLPEGQDVYTAACNSVIHRCALLILGVSPVIDELQKRREEGQLQQPSTSASEGGGLMTRSESLTAESRLVHTSPNYRLIKSRSESDLSQPESDEEGYALSGRRNVDLDLAASHRKRGPMHSQLESLSDSWARLKHSRDWLCNSSYSFESDFDLTKSLGVHTLIENVVSFVSGDVGNAPGFKEPEESMSTSPQASIIAMEQQQLRAELRLEALHQILVLLSGMEEKGSISLAGSRLSSGFQSSTLLTSVRLQFLAGCFGLGTVGHTGGKGESGRLHHYQDGIRAAKRNIQIEIQVAVHKIYQQLSATLERALQANKHHIEAQQRLLLVTVFALSVHYQPVDVSLAISTGLLNVLSQLCGTDTMLGQPLQLLPKTGVSQLSTALKVASTRLLQILAITTGTYADKLSPKVVQSLLDLLCSQLKNLLSQTGVLHMASFGEGEQEDGEEEEKKVDSSGETEKKDFRAALRKQHAAELHLGDFLVFLRRVVSSKAIQSKMASPKWTEVLLNIASQKCSSGIPLVGNLRTRLLALHVLEAVLPACESGVEDDQMAQIVERLFSLLSDCMWETPIAQAKHAIQIKEKEQEIKLQKQGELEEEDENLPIQEVSFDPEKAQCCLVENGQILTHGSGGKGYGLASTGVTSGCYQWKFYIVKENRGNEGTCVGVSRWPVHDFNHRTTSDMWLYRAYSGNLYHNGEQTLTLSSFTQGDFITCVLDMEARTISFGKNGEEPKLAFEDVDAAELYPCVMFYSSNPGEKVKICDMQMRGTPRDLLPGDPICSPVAAVLAEATIQLIRILHRTDRWTYCINKKMMERLHKIKICIKESGQKLKKSRSVQSREENEMREEKESKEEEKGKHTRHGLADLSELQLRTLCIEVWPVLAVIGGVDAGLRVGGRCVHKQTGRHATLLGVVKEGSTSAKVQWDEAEITISFPTFWSPSDTPLYNLEPCEPLPFDVARFRGLTASVLLDLTYLTGVHEDMGKQSTKRHEKKHRHESEEKGDVEQKPESESALDMRTGLTSDDVKSQSTTSSKSENEIASFSLDPTLPSVESQHQITEGKRKNHEHMSKNHDVAQSEIRAVQLSYLYLGAMKSLSALLGCSKYAELLLIPKVLAENGHNSDCASSPVVHEDVEMRAALQFLMRHMVKRAVMRSPIKRALGLADLERAQAMIYKLVVHGLLEDQFGGKIKQEIDQQAEESDPAQQAQTPVTTSPSASSTTSFMSSSLEDTTTATTPVTDTETVPASESPGVMPLSLLRQMFSSYPTTTVLPTRRAQTPPISSLPTSPSDEVGRRQSLTSPDSQSARPANRTALSDPSSRLSTSPPPPAIAVPLLEMGFSLRQIAKAMEATGARGEADAQNITVLAMWMIEHPGHEDEEEPQSGSTADSRPGAAVLGSGGKSNDPCYLQSPGDIPSADAAEMEEGFSESPDNLDHTENAASGSGPSARGRSAVTRRHKFDLAARTLLARAAGLYRSVQAHRNQSRREGISLQQDPGALYDFNLDEELEIDLDDEAMEAMFGQDLTSDNDILGMWIPEVLDWPTWHVCESEDREEVVVCELCECSVVSFNQHMKRNHPGCGRSANRQGYRSNGSYVDGWFGGECGSGNPYYLLCGTCREKYLAMKTKSKSTSSERYKGQAPDLIGKQDSVYEEDWDMLDVDEDEKLTGEEEFELLAGPLGLNDRRIVPEPVQFPDSDPLGASVAMVTATNSMEETLMQIGCHGSVEKSSSGRITLGEQAAALANPHDRVVALRRVTAAAQVLLARTMVMRALSLLSVSGSSCSLAAGLESLGLTDIRTLVRLMCLAAAGRAGLSTSPSAMASTSERSRGGHSKANKPISCLAYLSTAVGCLASNAPSAAKLLVQLCTQNLISAATGVNLTTVDDSIQRKFLPSFLRGIAEENKLVTSPNFVVTQALVALLADKGAKLRPNYDKSEVEKKGPLELANALAACCLSSRLSSQHRQWAAQQLVRTLAAHDRDNQTTLQTLADMGGDLRKCSFIKLEAHQNRVMTCVWCNKKGLLATSGNDGTIRVWNVTKKQYSLQQTCVFNRLEGDAEESLGSPSDPSFSPVSWSISGKYLAGALEKMVNIWQVNGGKGLVDIQPHWVSALAWPEEGPATAWSGESPELLLVGRMDGSLGLIEVVDVSTMHRRELEHCYRKDVSVTCIAWFSEDRPFAVGYFDGKLLLGTKEPLEKGGIVLIDAHKDTLISMKWDPTGHILMTCAKEDSVKLWGSISGCWCCLHSLCHPSIVNGIAWCRLPGKGSKLQLLMATGCQSGLVCVWRIPQDTTQTNVTSAEGWWEQESNCQDGYRKSSGAKCVYQLRGHITPVRTVAFSSDGLALVSGGLGGLMNIWSLRDGSVLQTVVIGSGAIQTTVWIPEVGVAACSNRSKDVLVVNCTAEWAAANHVLATCRTALKQQGVLGLNMAPCMRAFLERLPMMLQEQYAYEKPHVVCGDQLVHSPYMQCLASLAVGLHLDQLLCNPPVPPHHQNCLPDPASWNPNEWAWLECFSTTIKAAEALTNGAQFPESFTVPDLEPVPEDELVFLMDNSKWINGMDEQIMSWATSRPEDWHLGGKCDVYLWGAGRHGQLAEAGRNVMVPAAAPSFSQAQQVICGQNCTFVIQANGTVLACGEGSYGRLGQGNSDDLHVLTVISALQGFVVTQLVTSCGSDGHSMALTESGEVFSWGDGDYGKLGHGNSDRQRRPRQIEALQGEEVVQMSCGFKHSAVVTSDGKLFTFGNGDYGRLGLGNTSNKKLPERVTALEGYQIGQVACGLNHTLAVSADGSMVWAFGDGDYGKLGLGNSTAKSSPQKIDVLCGIGIKKVACGTQFSVALTKDGHVYTFGQDRLIGLPEGRARNHNRPQQIPVLAGVIIEDVAVGAEHTLALASNGDVYAWGSNSEGQLGLGHTNHVREPTLVTGLQGKNVRQISAGRCHSAAWTAPPVPPRAPGVSVPLQLGLPDTVPPQYGALREVSIHTVRARLRLLYHFSDLMYSSWRLLNLSPNNQNSTSHYNAGTWGIVQGQLRPLLAPRVYTLPMVRSIGKTMVQGKNYGPQITVKRISTRGRKCKPIFVQIARQVVKLNASDLRLPSRAWKVKLVGEGADDAGGVFDDTITEMCQELETGIVDLLIPSPNATAEVGYNRDRFLFNPSACLDEHLMQFKFLGILMGVAIRTKKPLDLHLAPLVWKQLCCVPLTLEDLEEVDLLYVQTLNSILHIEDSGITEESFHEMIPLDSFVGQSADGKMVPIIPGGNSIPLTFSNRKEYVERAIEYRLHEMDRQVAAVREGMSWIVPVPLLSLLTAKQLEQMVCGMPEISVEVLKKVVRYREVDEQHQLVQWFWHTLEEFSNEERVLFMRFVSGRSRLPANTADISQRFQIMKVDRPYDSLPTSQTCFFQLRLPPYSSQLVMAERLRYAINNCRSIDMDNYMLSRNVDNAEGSDTDY

SEQ ID NO: 142117 - DNA, 14586 bp, Artificial Sequence
  derived and/or modified sequence
atggccaccatgatcccccccgtgaagctgaagtggctggagcacctgaacagcagctggatcaccgaggacagcgagagcatcgccaccagagagggcgtggccgtgctgtacagcaagctggtgagcaacaaggaggtggtgcccctgccccagcaggtgctgtgcctgaagggcccccagctgcccgacttcgagagagagagcctgagcagcgacgagcaggaccactacctggacgccctgctgagcagccagctggccctggccaagatggtgtgcagcgacagccccttcgccggcgccctgagaaagagactgctggtgctgcagagagtgttctacgccctgagcaacaagtaccacgacaagggcaaggtgaagcagcagcagcacagccccgagagcagcagcggcagcgccgacgtgcacagcgtgagcgagagacccagaagcagcaccgacgccctgatcgagatgggcgtgagaaccggcctgagcctgctgttcgccctgctgagacagagctggatgatgcccgtgagcggccccggcctgagcctgtgcaacgacgtgatccacaccgccatcgaggtggtgagcagcctgccccccctgagcctggccaacgagagcaagatcccccccatgggcctggactgcctgagccaggtgaccaccttcctgaagggcgtgaccatccccaacagcggcgccgacaccctgggcagaagactggccagcgagctgctgctgggcctggccgcccagagaggcagcctgagatacctgctggagtggatcgagatggccctgggcgccagcgccgtggtgcacaccatggagaagggcaagctgctgagcagccaggagggcatgatcagcttcgactgcttcatgaccatcctgatgcagatgagaagaagcctgggcagcagcgccgacagaagccagtggagagagcccaccagaaccagcgacggcctgtgcagcctgtacgaggccgccctgtgcctgttcgaggaggtgtgcagaatggccagcgactacagcagaacctgcgccagccccgacagcatccagaccggcgacgcccccatcgtgagcgagacctgcgaggtgtacgtgtggggcagcaacagcagccaccagctggtggagggcacccaggagaagatcctgcagcccaagctggcccccagcttcagcgacgcccagaccatcgaggccggccagtactgcaccttcgtgatcagcaccgacggcagcgtgagagcctgcggcaagggcagctacggcagactgggcctgggcgacagcaacaaccagagcaccctgaagaagctgaccttcgagccccacagaagcatcaagaaggtgagcagcagcaagggcagcgacggccacaccctggccttcaccaccgagggcgaggtgttcagctggggcgacggcgactacggcaagctgggccacggcaacagcagcacccagaagtaccccaagctgatccagggccccctgcagggcaaggtggtggtgtgcgtgagcgccggctacagacacagcgccgccgtgaccgaggacggcgagctgtacacctggggcgagggcgacttcggcagactgggccacggcgacagcaacagcagaaacatccccaccctggtgaaggacatcagcaacgtgggcgaggtgagctgcggcagcagccacaccatcgccctgagcaaggacggcagaaccgtgtggagcttcggcggcggcgacaacggcaagctgggccacggcgacaccaacagagtgtacaagcccaaggtgatcgaggccctgcagggcatgttcatcagaaaggtgtgcgccggcagccagagcagcctggccctgaccagcaccggccaggtgtacgcctggggctgcggcgcctgcctgggctgcggcagcagcgaggccaccgccctgagacccaagctgatcgaggagctggccgccaccagaatcgtggacgtgagcatcggcgacagccactgcctggccctgagccacgacaacgaggtgtacgcctggggcaacaacagcatgggccagtgcggccagggcaacagcaccggccccatcaccaagcccaagaaggtgagcggcctggacggcatcgccatccagcagatcagcgccggcaccagccacagcctggcctggaccgccctgcccagagacagacaggtggtggcctggcacagaccctactgcgtggacctggaggagagcaccttcagccacctgagaagcttcctggagagatactgcgacaagatcaacagcgagatcccccccctgcccttccccagcagcagagagcaccacagcttcctgaagctgtgcctgaagctgctgagcaaccacctggccctggccctggccggcggcgtggccaccagcatcctgggcagacaggccggccccctgagaaacctgctgttcagactgatggacagcaccgtgcccgacgagatccaggaggtggtgatcgagaccctgagcgtgggcgccaccatgctgctgccccccctgagagagagaatggagctgctgcacagcctgctgccccagggccccgacagatgggagagcctgagcaagggccagagaatgcagctggacatcatcctgaccagcctgcaggaccacacccacgtggccagcctgctgggctacagcagccccagcgacgccgccgacctgagcagcgtgtgcaccggctacggcaacctgagcgaccagccctacggcacccagagctgccaccccgacacccacctggccgagatcctgatgaagaccctgctgagaaacctgggcttctacaccgaccaggccttcggcgagctggagaagaacagcgacaagttcctgctgggcaccagcagcagcgagaacagccagcccgcccacctgcacgagctgctgtgcagcctgcagaagcagctgctggccttctgccacatcaacaacatcagcgagaacagcagcagcgtggccctgctgcacaagcacctgcagctgctgctgccccacgccaccgacatctacagcagaagcgccaacctgctgaaggagagcccctggaacggcagcgtgggcgagaagctgagagacgtgatctacgtgagcgccgccggcagcatgctgtgccagatcgtgaacagcctgctgctgctgcccgtgagcgtggccagacccctgctgagctacctgctggacctgctgccccccctggactgcctgaacagactgctgcccgccgccgacctgctggaggaccaggagctgcagtggcccctgcacggcggccccgagctgatcgaccccgccggcctgcccctgccccagcccgcccagagctgggtgtggctggtggacctggagagaaccatcgccctgctgatcggcagatgcctgggcggcatgctgcagggcagccccgtgagccccgaggagcaggacaccgcctactggatgaagacccccctgttcagcgacggcgtggagatggacaccccccagctggacaagtgcatgagctgcctgctggaggtggccctgagcggcaacgaggagcagaagcccttcgactacaagctgagacccgagatcgccgtgtacgtggacctggccctgggctgcagcaaggagcccgccagaagcctgtggatcagcatgcaggactacgccgtgagcaaggactgggacagcgccaccctgagcaacgagagcctgctggacaccgtgagcagattcgtgctggccgccctgctgaagcacaccaacctgctgagccaggcctgcggcgagagcagataccagcccggcaagcacctgagcgaggtgtacagatgcgtgtacaaggtgagaagcagactgctggcctgcaagaacctggagctgatccagaccagaagcagcagcagagacagatggatcagcgagaaccaggacagcgccgacgtggacccccaggagcacagcttcaccagaaccatcgacgaggaggccgagatggaggagcaggccgagagagacagagaggagggccaccccgagcccgaggacgaggaggaggagagagagcacgaggtgatgaccgccggcaagatcttccagtgcttcctgagcgccagagaggtggccagaagcagagacagagacagaatgaacagcggcgccggcagcggcgccagagccgacgacccccccccccagagccagcaggagagaagagtgagcaccgacctgcccgagggccaggacgtgtacaccgccgcctgcaacagcgtgatccacagatgcgccctgctgatcctgggcgtgagccccgtgatcgacgagctgcagaagagaagagaggagggccagctgcagcagcccagcaccagcgccagcgagggcggcggcctgatgaccagaagcgagagcctgaccgccgagagcagactggtgcacaccagccccaactacagactgatcaagagcagaagcgagagcgacctgagccagcccgagagcgacgaggagggctacgccctgagcggcagaagaaacgtggacctggacctggccgccagccacagaaagagaggccccatgcacagccagctggagagcctgagcgacagctgggccagactgaagcacagcagagactggctgtgcaacagcagctacagcttcgagagcgacttcgacctgaccaagagcctgggcgtgcacaccctgatcgagaacgtggtgagcttcgtgagcggcgacgtgggcaacgcccccggcttcaaggagcccgaggagagcatgagcaccagcccccaggccagcatcatcgccatggagcagcagcagctgagagccgagctgagactggaggccctgcaccagatcctggtgctgctgagcggcatggaggagaagggcagcatcagcctggccggcagcagactgagcagcggcttccagagcagcaccctgctgaccagcgtgagactgcagttcctggccggctgcttcggcctgggcaccgtgggccacaccggcggcaagggcgagagcggcagactgcaccactaccaggacggcatcagagccgccaagagaaacatccagatcgagatccaggtggccgtgcacaagatctaccagcagctgagcgccaccctggagagagccctgcaggccaacaagcaccacatcgaggcccagcagagactgctgctggtgaccgtgttcgccctgagcgtgcactaccagcccgtggacgtgagcctggccatcagcaccggcctgctgaacgtgctgagccagctgtgcggcaccgacaccatgctgggccagcccctgcagctgctgcccaagaccggcgtgagccagctgagcaccgccctgaaggtggccagcaccagactgctgcagatcctggccatcaccaccggcacctacgccgacaagctgagccccaaggtggtgcagagcctgctggacctgctgtgcagccagctgaagaacctgctgagccagaccggcgtgctgcacatggccagcttcggcgagggcgagcaggaggacggcgaggaggaggagaagaaggtggacagcagcggcgagaccgagaagaaggacttcagagccgccctgagaaagcagcacgccgccgagctgcacctgggcgacttcctggtgttcctgagaagagtggtgagcagcaaggccatccagagcaagatggccagccccaagtggaccgaggtgctgctgaacatcgccagccagaagtgcagcagcggcatccccctggtgggcaacctgagaaccagactgctggccctgcacgtgctggaggccgtgctgcccgcctgcgagagcggcgtggaggacgaccagatggcccagatcgtggagagactgttcagcctgctgagcgactgcatgtgggagacccccatcgcccaggccaagcacgccatccagatcaaggagaaggagcaggagatcaagctgcagaagcagggcgagctggaggaggaggacgagaacctgcccatccaggaggtgagcttcgaccccgagaaggcccagtgctgcctggtggagaacggccagatcctgacccacggcagcggcggcaagggctacggcctggccagcaccggcgtgaccagcggctgctaccagtggaagttctacatcgtgaaggagaacagaggcaacgagggcacctgcgtgggcgtgagcagatggcccgtgcacgacttcaaccacagaaccaccagcgacatgtggctgtacagagcctacagcggcaacctgtaccacaacggcgagcagaccctgaccctgagcagcttcacccagggcgacttcatcacctgcgtgctggacatggaggccagaaccatcagcttcggcaagaacggcgaggagcccaagctggccttcgaggacgtggacgccgccgagctgtacccctgcgtgatgttctacagcagcaaccccggcgagaaggtgaagatctgcgacatgcagatgagaggcacccccagagacctgctgcccggcgaccccatctgcagccccgtggccgccgtgctggccgaggccaccatccagctgatcagaatcctgcacagaaccgacagatggacctactgcatcaacaagaagatgatggagagactgcacaagatcaagatctgcatcaaggagagcggccagaagctgaagaagagcagaagcgtgcagagcagagaggagaacgagatgagagaggagaaggagagcaaggaggaggagaagggcaagcacaccagacacggcctggccgacctgagcgagctgcagctgagaaccctgtgcatcgaggtgtggcccgtgctggccgtgatcggcggcgtggacgccggcctgagagtgggcggcagatgcgtgcacaagcagaccggcagacacgccaccctgctgggcgtggtgaaggagggcagcaccagcgccaaggtgcagtgggacgaggccgagatcaccatcagcttccccaccttctggagccccagcgacacccccctgtacaacctggagccctgcgagcccctgcccttcgacgtggccagattcagaggcctgaccgccagcgtgctgctggacctgacctacctgaccggcgtgcacgaggacatgggcaagcagagcaccaagagacacgagaagaagcacagacacgagagcgaggagaagggcgacgtggagcagaagcccgagagcgagagcgccctggacatgagaaccggcctgaccagcgacgacgtgaagagccagagcaccaccagcagcaagagcgagaacgagatcgccagcttcagcctggaccccaccctgcccagcgtggagagccagcaccagatcaccgagggcaagagaaagaaccacgagcacatgagcaagaaccacgacgtggcccagagcgagatcagagccgtgcagctgagctacctgtacctgggcgccatgaagagcctgagcgccctgctgggctgcagcaagtacgccgagctgctgctgatccccaaggtgctggccgagaacggccacaacagcgactgcgccagcagccccgtggtgcacgaggacgtggagatgagagccgccctgcagttcctgatgagacacatggtgaagagagccgtgatgagaagccccatcaagagagccctgggcctggccgacctggagagagcccaggccatgatctacaagctggtggtgcacggcctgctggaggaccagttcggcggcaagatcaagcaggagatcgaccagcaggccgaggagagcgaccccgcccagcaggcccagacccccgtgaccaccagccccagcgccagcagcaccaccagcttcatgagcagcagcctggaggacaccaccaccgccaccacccccgtgaccgacaccgagaccgtgcccgccagcgagagccccggcgtgatgcccctgagcctgctgagacagatgttcagcagctaccccaccaccaccgtgctgcccaccagaagagcccagaccccccccatcagcagcctgcccaccagccccagcgacgaggtgggcagaagacagagcctgaccagccccgacagccagagcgccagacccgccaacagaaccgccctgagcgaccccagcagcagactgagcaccagcccccccccccccgccatcgccgtgcccctgctggagatgggcttcagcctgagacagatcgccaaggccatggaggccaccggcgccagaggcgaggccgacgcccagaacatcaccgtgctggccatgtggatgatcgagcaccccggccacgaggacgaggaggagccccagagcggcagcaccgccgacagcagacccggcgccgccgtgctgggcagcggcggcaagagcaacgacccctgctacctgcagagccccggcgacatccccagcgccgacgccgccgagatggaggagggcttcagcgagagccccgacaacctggaccacaccgagaacgccgccagcggcagcggccccagcgccagaggcagaagcgccgtgaccagaagacacaagttcgacctggccgccagaaccctgctggccagagccgccggcctgtacagaagcgtgcaggcccacagaaaccagagcagaagagagggcatcagcctgcagcaggaccccggcgccctgtacgacttcaacctggacgaggagctggagatcgacctggacgacgaggccatggaggccatgttcggccaggacctgaccagcgacaacgacatcctgggcatgtggatccccgaggtgctggactggcccacctggcacgtgtgcgagagcgaggacagagaggaggtggtggtgtgcgagctgtgcgagtgcagcgtggtgagcttcaaccagcacatgaagagaaaccaccccggctgcggcagaagcgccaacagacagggctacagaagcaacggcagctacgtggacggctggttcggcggcgagtgcggcagcggcaacccctactacctgctgtgcggcacctgcagagagaagtacctggccatgaagaccaagagcaagagcaccagcagcgagagatacaagggccaggcccccgacctgatcggcaagcaggacagcgtgtacgaggaggactgggacatgctggacgtggacgaggacgagaagctgaccggcgaggaggagttcgagctgctggccggccccctgggcctgaacgacagaagaatcgtgcccgagcccgtgcagttccccgacagcgaccccctgggcgccagcgtggccatggtgaccgccaccaacagcatggaggagaccctgatgcagatcggctgccacggcagcgtggagaagagcagcagcggcagaatcaccctgggcgagcaggccgccgccctggccaacccccacgacagagtggtggccctgagaagagtgaccgccgccgcccaggtgctgctggccagaaccatggtgatgagagccctgagcctgctgagcgtgagcggcagcagctgcagcctggccgccggcctggagagcctgggcctgaccgacatcagaaccctggtgagactgatgtgcctggccgccgccggcagagccggcctgagcaccagccccagcgccatggccagcaccagcgagagaagcagaggcggccacagcaaggccaacaagcccatcagctgcctggcctacctgagcaccgccgtgggctgcctggccagcaacgcccccagcgccgccaagctgctggtgcagctgtgcacccagaacctgatcagcgccgccaccggcgtgaacctgaccaccgtggacgacagcatccagagaaagttcctgcccagcttcctgagaggcatcgccgaggagaacaagctggtgaccagccccaacttcgtggtgacccaggccctggtggccctgctggccgacaagggcgccaagctgagacccaactacgacaagagcgaggtggagaagaagggccccctggagctggccaacgccctggccgcctgctgcctgagcagcagactgagcagccagcacagacagtgggccgcccagcagctggtgagaaccctggccgcccacgacagagacaaccagaccaccctgcagaccctggccgacatgggcggcgacctgagaaagtgcagcttcatcaagctggaggcccaccagaacagagtgatgacctgcgtgtggtgcaacaagaagggcctgctggccaccagcggcaacgacggcaccatcagagtgtggaacgtgaccaagaagcagtacagcctgcagcagacctgcgtgttcaacagactggagggcgacgccgaggagagcctgggcagccccagcgaccccagcttcagccccgtgagctggagcatcagcggcaagtacctggccggcgccctggagaagatggtgaacatctggcaggtgaacggcggcaagggcctggtggacatccagccccactgggtgagcgccctggcctggcccgaggagggccccgccaccgcctggagcggcgagagccccgagctgctgctggtgggcagaatggacggcagcctgggcctgatcgaggtggtggacgtgagcaccatgcacagaagagagctggagcactgctacagaaaggacgtgagcgtgacctgcatcgcctggttcagcgaggacagacccttcgccgtgggctacttcgacggcaagctgctgctgggcaccaaggagcccctggagaagggcggcatcgtgctgatcgacgcccacaaggacaccctgatcagcatgaagtgggaccccaccggccacatcctgatgacctgcgccaaggaggacagcgtgaagctgtggggcagcatcagcggctgctggtgctgcctgcacagcctgtgccaccccagcatcgtgaacggcatcgcctggtgcagactgcccggcaagggcagcaagctgcagctgctgatggccaccggctgccagagcggcctggtgtgcgtgtggagaatcccccaggacaccacccagaccaacgtgaccagcgccgagggctggtgggagcaggagagcaactgccaggacggctacagaaagagcagcggcgccaagtgcgtgtaccagctgagaggccacatcacccccgtgagaaccgtggccttcagcagcgacggcctggccctggtgagcggcggcctgggcggcctgatgaacatctggagcctgagagacggcagcgtgctgcagaccgtggtgatcggcagcggcgccatccagaccaccgtgtggatccccgaggtgggcgtggccgcctgcagcaacagaagcaaggacgtgctggtggtgaactgcaccgccgagtgggccgccgccaaccacgtgctggccacctgcagaaccgccctgaagcagcagggcgtgctgggcctgaacatggccccctgcatgagagccttcctggagagactgcccatgatgctgcaggagcagtacgcctacgagaagccccacgtggtgtgcggcgaccagctggtgcacagcccctacatgcagtgcctggccagcctggccgtgggcctgcacctggaccagctgctgtgcaacccccccgtgcccccccaccaccagaactgcctgcccgaccccgccagctggaaccccaacgagtgggcctggctggagtgcttcagcaccaccatcaaggccgccgaggccctgaccaacggcgcccagttccccgagagcttcaccgtgcccgacctggagcccgtgcccgaggacgagctggtgttcctgatggacaacagcaagtggatcaacggcatggacgagcagatcatgagctgggccaccagcagacccgaggactggcacctgggcggcaagtgcgacgtgtacctgtggggcgccggcagacacggccagctggccgaggccggcagaaacgtgatggtgcccgccgccgcccccagcttcagccaggcccagcaggtgatctgcggccagaactgcaccttcgtgatccaggccaacggcaccgtgctggcctgcggcgagggcagctacggcagactgggccagggcaacagcgacgacctgcacgtgctgaccgtgatcagcgccctgcagggcttcgtggtgacccagctggtgaccagctgcggcagcgacggccacagcatggccctgaccgagagcggcgaggtgttcagctggggcgacggcgactacggcaagctgggccacggcaacagcgacagacagagaagacccagacagatcgaggccctgcagggcgaggaggtggtgcagatgagctgcggcttcaagcacagcgccgtggtgaccagcgacggcaagctgttcaccttcggcaacggcgactacggcagactgggcctgggcaacaccagcaacaagaagctgcccgagagagtgaccgccctggagggctaccagatcggccaggtggcctgcggcctgaaccacaccctggccgtgagcgccgacggcagcatggtgtgggccttcggcgacggcgactacggcaagctgggcctgggcaacagcaccgccaagagcagcccccagaagatcgacgtgctgtgcggcatcggcatcaagaaggtggcctgcggcacccagttcagcgtggccctgaccaaggacggccacgtgtacaccttcggccaggacagactgatcggcctgcccgagggcagagccagaaaccacaacagaccccagcagatccccgtgctggccggcgtgatcatcgaggacgtggccgtgggcgccgagcacaccctggccctggccagcaacggcgacgtgtacgcctggggcagcaacagcgagggccagctgggcctgggccacaccaaccacgtgagagagcccaccctggtgaccggcctgcagggcaagaacgtgagacagatcagcgccggcagatgccacagcgccgcctggaccgccccccccgtgccccccagagcccccggcgtgagcgtgcccctgcagctgggcctgcccgacaccgtgcccccccagtacggcgccctgagagaggtgagcatccacaccgtgagagccagactgagactgctgtaccacttcagcgacctgatgtacagcagctggagactgctgaacctgagccccaacaaccagaacagcaccagccactacaacgccggcacctggggcatcgtgcagggccagctgagacccctgctggcccccagagtgtacaccctgcccatggtgagaagcatcggcaagaccatggtgcagggcaagaactacggcccccagatcaccgtgaagagaatcagcaccagaggcagaaagtgcaagcccatcttcgtgcagatcgccagacaggtggtgaagctgaacgccagcgacctgagactgcccagcagagcctggaaggtgaagctggtgggcgagggcgccgacgacgccggcggcgtgttcgacgacaccatcaccgagatgtgccaggagctggagaccggcatcgtggacctgctgatccccagccccaacgccaccgccgaggtgggctacaacagagacagattcctgttcaaccccagcgcctgcctggacgagcacctgatgcagttcaagttcctgggcatcctgatgggcgtggccatcagaaccaagaagcccctggacctgcacctggcccccctggtgtggaagcagctgtgctgcgtgcccctgaccctggaggacctggaggaggtggacctgctgtacgtgcagaccctgaacagcatcctgcacatcgaggacagcggcatcaccgaggagagcttccacgagatgatccccctggacagcttcgtgggccagagcgccgacggcaagatggtgcccatcatccccggcggcaacagcatccccctgaccttcagcaacagaaaggagtacgtggagagagccatcgagtacagactgcacgagatggacagacaggtggccgccgtgagagagggcatgagctggatcgtgcccgtgcccctgctgagcctgctgaccgccaagcagctggagcagatggtgtgcggcatgcccgagatcagcgtggaggtgctgaagaaggtggtgagatacagagaggtggacgagcagcaccagctggtgcagtggttctggcacaccctggaggagttcagcaacgaggagagagtgctgttcatgagattcgtgagcggcagaagcagactgcccgccaacaccgccgacatcagccagagattccagatcatgaaggtggacagaccctacgacagcctgcccaccagccagacctgcttcttccagctgagactgcccccctacagcagccagctggtgatggccgagagactgagatacgccatcaacaactgcagaagcatcgacatggacaactacatgctgagcagaaacgtggacaacgccgagggcagcgacaccgactactag

SEQ ID NO: 142118 - DNA, 14586 bp, Artificial Sequence
  derived and/or modified sequence
atggctaccatgatccctcccgtcaaactgaagtggctggaacatttgaattcttcctggatcacagaagactcagagtcaatagccacaagggaaggagttgccgtcctctacagcaagctggtctccaacaaagaggtggtccccctcccacagcaggtgctgtgtctgaagggcccacagctacctgactttgagcgtgagagcctgagttcagatgagcaagaccattacctggatgcgctactgtcttcccagctcgccctggccaaaatggtgtgcagcgactcccccttcgcgggagcacttcgtaagaggctgctagtgctgcagagagttttctacgcactgagcaacaagtaccacgacaaaggaaaagttaaacagcagcagcacagtcccgagtcaagctcaggctccgccgacgttcattcggtgtcagaacgacctcggtcaagcaccgatgccctaatagaaatgggagttagaactgggttaagcctcctgttcgctctccttagacagtcctggatgatgcctgtcagcggacccggattgtctctgtgcaacgacgtcattcataccgctatagaggtcgtttcatcactaccccccctttctctggctaacgaaagcaagattccccccatgggcctagactgtctctctcaggtcaccacttttctgaaaggggtgacgattccaaattcaggggcagacaccctggggcggaggctagcatccgaattgttgcttggtcttgccgcgcaacggggctcccttcgttacttgcttgagtggatagaaatggcccttggggcatctgctgtggtccacactatggaaaaaggcaaactgctaagttcccaagaagggatgatctctttcgattgttttatgaccatccttatgcagatgcgccggtcgctcggatctagcgcagacagaagccagtggagagagccaactcgcacttccgacgggctatgtagtctctatgaagccgcgctttgtctgtttgaagaggtctgcagaatggcaagcgattacagccgcacttgtgcaagccccgacagtattcaaacgggagacgcacccattgtttcggaaacgtgcgaggtgtacgtctggggtagtaactcgagccaccaactggttgaggggacccaggagaaaattctccagcctaagttggctccttcatttagcgacgctcagacaatcgaggcaggtcagtattgtaccttcgtcatttctactgacggctctgtccgggcttgcggcaaaggatcatatggccgcttgggccttggcgatagcaacaaccaatctacactgaagaaattaacatttgagcctcatcggagcatcaaaaaagttagctcctccaagggatctgatgggcatacgctggcttttactacagagggggaggtctttagctggggcgatggagattatggcaagcttggacatggaaatagctccacacaaaagtatcctaaactgatccagggccctctgcaagggaaggttgtcgtgtgcgtatctgctggatataggcattccgccgctgtgactgaggacggtgaactgtacacttggggggaaggtgacttcggaagactaggacacggcgacagcaattccagaaacatcccgaccctcgtgaaggacatcagcaacgtaggcgaggtgtcgtgcggcagctcacacaccatagccctttctaaggacggtcgcacagtatggagtttcgggggcggggataacggcaaactcgggcacggagacactaaccgcgtgtataaacccaaggtcattgaggccctccaaggtatgtttatcaggaaggtatgtgccggatctcagagttccctggcattgacgagcactggtcaggtgtatgcatgggggtgcggagcctgtcttggatgcgggagctcggaagccaccgccctgcgccccaagctgatagaagagttggccgccactcgtatcgtcgacgtgtccatcggggactcacactgcctcgcattgtctcatgacaatgaagtttatgcctggggaaataactcgatgggccagtgtggacagggaaactccaccggacctattacaaagccaaagaaagtgtccggattggatggcattgctatccaacagatttctgctgggacctcacatagtcttgcctggaccgccctaccccgggatagacaagtagtggcttggcaccgcccatactgcgtggacctggaggagtctaccttcagccaccttagatcttttcttgaacgctactgcgacaagatcaacagcgaaatccctccacttcctttcccatcctcccgagagcatcactctttcctgaaactgtgcctgaagctacttagcaaccacctcgccctcgctctcgccggtggagttgctacttccatcctgggccgtcaggcgggaccactccgtaatctcttattccggttgatggatagtacggtcccagacgaaattcaggaggttgtgatcgagaccctgagcgttggcgccacaatgcttcttccacccctccgggagcggatggagctgctccattcgttgcttccccaaggtcccgaccggtgggagtcgctgagtaaaggacagcggatgcagctggacattatccttacaagcctgcaggaccacacacatgtggccagcttgctggggtattcaagccccagcgacgccgcagacctgagtagcgtttgtacgggttatggcaacttaagcgatcaaccctacggaacccagtcttgccaccctgacactcacctcgcggaaatccttatgaaaacactgctgcgaaacctcggattctacactgaccaagccttcggcgagctcgagaagaacagcgacaaatttctcttaggcaccagcagcagtgaaaatagccagccagcacatctgcacgagctgctgtgcagtctgcagaaacagttgctcgctttttgccacatcaacaatatcagcgagaatagctccagtgtggccctgctgcacaagcacttgcagctactcctgccccacgctaccgacatttattctagatccgccaacctgttgaaagagagcccatggaatggttccgtcggggaaaagctcagggacgtgatctacgtgtctgccgcggggtccatgctctgccagattgttaacagtctccttctgctgccagtgtctgtagctcgcccactactctcatacctgctcgatctattgccaccactcgactgtctcaaccggttgctgccagccgctgatctgctggaagaccaggagttgcaatggcccctgcacggtgggcccgagctcattgaccctgcggggctcccattgccacagcccgcgcagagctgggtatggctcgtggacctggagaggaccattgccttgctcattggtcgctgcctgggaggaatgctgcaaggctcacctgtgagccctgaagagcaggacacagcgtactggatgaagactcccctgttctcagacggggtggagatggacactccgcagctcgataaatgcatgtcttgtctgctggaggtggctctgagcgggaatgaggaacagaagccattcgattacaaattgcgcccagaaattgctgtgtatgtggacctcgccctcgggtgctccaaggaacctgccagatctctctggatttccatgcaggactacgcagtgtctaaagattgggattctgctaccttatctaacgagtccctgctggacaccgtaagccgcttcgtgctggctgccctcttaaagcacacaaatctgcttagccaagcctgtggggagagccggtaccaaccaggaaagcacctgtctgaggtgtacagatgcgtgtacaaggtacggtctcggttattagcctgcaaaaatctcgaacttattcagactcgctctagctcaagagacagatggatttcagagaatcaagattccgcagatgtcgatcctcaggaacatagcttcactcggacgatcgacgaggaggccgaaatggaggagcaggcagaacgcgatagggaggaaggacaccctgagcctgaggacgaagaggaggagcgggagcatgaggtcatgacggctggcaaaatattccaatgttttctgagtgccagggaggtggccagatctagggatcgcgaccgaatgaactccggcgccggaagcggggctcgcgcagatgacccacctccccagtcacagcaggaacgccgagtatcgactgatttgcccgaggggcaagatgtctacactgccgcttgcaacagcgtcatacatagatgtgctttactcatccttggggtatctcctgtcattgacgaattgcagaaacgacgcgaagaagggcagctacagcagccatccaccagcgcgtccgaaggaggaggactgatgacaaggtccgagtctctaactgccgagagtcggctggtgcacacatcccctaattaccggctgattaaatcgcggtcagagtcggacctatctcaaccagagtccgatgaggagggttatgctttgtcagggcgtaggaatgtggacctcgaccttgccgcatcccataggaagcgcggaccaatgcacagccaactcgaaagtctcagcgattcttgggctcgactgaaacactcccgggattggctgtgtaattccagctactccttcgaatctgatttcgatttgacaaagtctctgggcgtccatacacttattgaaaatgtggtgagcttcgtcagcggggacgtgggaaatgctccaggctttaaagagcccgaagaaagtatgagcacttctccccaggcttctatcattgctatggagcaacagcagcttcgagcggagttaagattggaggccttgcatcagattttagtcctcctgagcggcatggaagaaaaggggtctatctctctggccgggtctagattgtcctctggcttccagtctagcacactgctcaccagcgttaggttacagtttctcgcgggatgctttgggctcggcacagttgggcacaccggtggcaagggtgagagtggccgcttacatcactatcaggacggcatccgggccgccaagaggaacatacagatagagattcaggtggctgttcacaaaatttaccagcaattgagcgctaccttggaacgggccctccaagccaacaaacaccacattgaggcccagcagaggctgcttctcgttactgtgttcgccctgagtgtgcactaccagccggtcgacgtctcccttgccatatcaacaggcctgctcaatgtcctgtctcagttgtgcggaaccgacactatgctgggtcagccgctgcaactcttgcctaaaacgggcgtaagtcaattatcaactgctctgaaagtggcctctaccaggctactgcagatcttagccatcaccaccgggacttacgccgataaactgtcccctaaggtggtgcagagtctgttggacctcctgtgcagccagttgaagaacctcctctcccaaacaggagtgctgcacatggcatctttcggcgaaggcgagcaagaagacggtgaagaggaagaaaaaaaagtggacagcagcggggaaacggaaaagaaggatttcagggcggcattacgcaaacagcatgctgctgagttacatctaggtgattttctggttttcctccggcgagtggtgagctcaaaagcaattcagtccaaaatggcatcccctaagtggacagaagttttactcaatattgctagccaaaagtgtagctcagggatcccactggtcgggaatctgaggactcgccttctcgctctccacgttctagaggccgttctgcccgcctgcgaaagtggggttgaggacgatcagatggcacagatcgtggagaggctattcagtctcctgagtgattgcatgtgggagactccgattgctcaggctaagcacgcaatccaaataaaggaaaaggaacaggagattaaattgcagaagcaaggcgaattggaggaagaagacgaaaaccttccaattcaggaagtttcgttcgacccagaaaaggcccagtgctgcttggtggaaaacgggcagattcttacacatggtagtggcgggaagggttacgggcttgcctcgacaggcgtcacatctggctgctatcagtggaagttctacattgtgaaggagaatcggggaaacgagggcacgtgcgtaggggtcagtagatggccagtacacgacttcaatcatcgtactacttccgatatgtggctctatcgagcctactctggtaatctctatcacaacggcgaacagacgcttaccctgagctcctttacacagggcgactttatcacttgcgtgctagacatggaggcgaggacaatcagcttcggaaagaatggagaggaaccaaaattggcttttgaggatgtggatgctgcagagctgtatccgtgtgtgatgttttactcgtccaaccctggcgagaaagtgaagatctgcgacatgcagatgaggggcaccccaagagacctgcttcctggggatccgatttgctctccggtagccgccgtattagccgaggccactatccaactcattagaattctccatcgcaccgaccggtggacatattgcatcaacaaaaagatgatggagcgccttcataagataaagatttgtatcaaggagagcggacagaagctcaagaaatcgagaagcgtccagtctagggaagagaatgaaatgcgagaagagaaggagtccaaagaagaggagaagggaaaacacactcgccatggtttggccgacctgtccgagcttcaactgaggactttgtgcatcgaagtttggcccgtgctcgccgttatcgggggtgtggacgcaggtctccgcgtgggcggacgatgcgtacacaagcagactggcagacacgcgaccctactgggggtagtcaaagagggatctaccagcgctaaggtccagtgggatgaagccgagattaccatcagtttccccaccttttggtcaccttccgacacacccttgtacaatctagagccctgcgaacctctgcccttcgacgtggctaggtttaggggccttaccgcttctgttctgctcgacctgacatatctgaccggggtgcacgaagatatgggtaagcaatctacaaaacgtcacgagaagaagcaccgccacgagtctgaggaaaagggggatgtggaacaaaagcccgagagcgaatcggcattggacatgagaaccggtctcacttcggacgatgtgaagtcccagtctactacatcttctaaaagtgagaacgaaatcgcctcattctcccttgacccaactctcccctcagtcgagtcgcaacaccagattacggaaggaaagcgaaagaatcatgaacatatgtctaagaatcacgatgtcgcccagtctgagattcgggcagtgcagctatcatacctctatctgggcgctatgaagagtttatccgcacttctcgggtgttcaaagtacgccgaactgctgcttattccaaaagtactcgccgagaacggacataactctgattgtgctagtagccccgtcgtgcatgaagatgtagagatgcgcgctgcattgcaatttctgatgcgccacatggtcaagcgagccgtaatgcgatcgcctatcaaaagggctctgggcttggctgatctggagagagctcaggccatgatctacaaattagtggtacatgggctgcttgaggatcaattcggtggaaaaataaagcaggagattgatcagcaggccgaagagtcagaccccgctcaacaggctcaaacccctgtgaccacctccccatcagcttcctcaacgacaagctttatgagtagctccctggaagataccaccacagctactacaccggttacggacaccgaaaccgtgccagcctccgagtcccctggcgtcatgcccctgtcactacttagacagatgttttcttcctacccaactacaactgttctaccaaccaggcgggcccagacccctcctatctccagccttcccaccagtccaagtgatgaggtcggccgacgacaaagtctgacatcccccgattctcagagcgccaggccggctaacagaactgccctgagcgacccatcctctcgtctttctacaagcccccccccccccgccatcgccgttccgctgcttgagatgggcttcagcttgcggcagattgccaaagctatggaagctacaggggcaagaggcgaagcagacgctcagaacatcaccgtcctggcaatgtggatgatagagcatcccggtcatgaggacgaagaggagccccagtcagggtctacggccgacagtaggcccggagccgctgtgcttgggtctggagggaaatctaacgatccatgttacttgcagagcccaggcgatatcccgtcggctgacgctgctgagatggaggagggatttagtgaatctcctgacaacttggaccacactgaaaacgccgctagtgggagcgggcccagcgcgcggggcaggtctgcggtcacacgtcgccacaaatttgacctggccgccaggactctgctagcacgcgcggcagggttataccgcagcgtccaggctcaccggaaccagtcaaggcgggaggggatctcgttacaacaagaccccggcgcactatatgatttcaatctggacgaggagcttgagatagatcttgacgatgaggccatggaagcaatgttcggccaggatctcacatctgataatgatattctgggaatgtggattcctgaggtgttggactggcctacatggcacgtttgtgaaagtgaggaccgagaagaagtcgtggtgtgcgaactgtgcgagtgtagcgtggtgtcttttaatcagcacatgaagcgcaaccaccccggatgcggtagaagcgccaataggcagggatatcgatctaatggctcctacgtggacggttggttcggcggcgagtgtggcagcggaaatccatattacctgctctgcggcacctgcagagaaaaatacttagccatgaagactaagagcaagagcactagtagcgaaagatacaaaggtcaagccccagacttaatcgggaagcaggattcggtatatgaagaagactgggatatgttagacgtcgacgaggatgagaagctgacaggggaagaggagtttgagttgctggctggcccgttgggccttaatgaccgacgaattgtgcctgagcccgtacagtttcctgattcagatccacttggtgcctccgtggccatggtgacggctacaaattccatggaggaaacactgatgcagattgggtgtcatggctcggttgaaaagtcatcctcaggcagaattactttgggcgaacaggccgccgctttggccaatccccacgaccgagtggtggctttgcgcagggtgacggcggcagcacaagtgctcctggcgcgcactatggtgatgagggctctatccctactgagcgtgtctggatcttcttgctctttggcagctggcctggaaagcttgggtcttacagacatacgaacgctcgtgaggctgatgtgtctagctgcagctggccgagccgggctgagcacatccccttccgccatggcatctacttcagagaggtcacgagggggccattctaaggcgaacaaaccgattagctgtctggcgtacctgtctacagccgtaggatgtctggcctcgaatgcaccctcagcagccaaactgttggtccaactttgcacgcaaaacctgatctctgcagcaaccggggtgaacctcactactgtggatgactcaatccagaggaaatttttgccatcctttctgaggggcatcgccgaagaaaacaagctggttacctcgcccaatttcgtggtaacccaggctttggtcgcgctgctggcagataagggggccaagttgagacccaactacgacaagagtgaggtcgagaaaaagggccctctcgaattggcaaacgctcttgctgcctgctgcctttctagccgcctgagtagccagcatagacagtgggccgcccaacaattagtcagaacattagccgctcacgaccgggataatcagacaacattgcagactttagccgacatgggtggcgatttaaggaagtgtagcttcatcaagctggaggcccaccagaaccgggtgatgacttgtgtttggtgtaacaaaaagggcctcctggccactagtggtaacgatggaactatccgcgtgtggaacgtaactaaaaagcagtattccctgcagcagacttgcgtattcaatcgcctcgagggggacgctgaagagtctttggggtccccctccgatccaagtttctcaccggtgagctggtctatcagcggaaaatatttggctggtgctctggaaaaaatggtcaacatttggcaggtaaatggcggaaaagggcttgtagatattcagccccattgggtttccgctctcgcatggcccgaggaggggccagcaacagcctggtcaggcgaatccccggaactcctgctggttgggcgaatggacggatccctaggcctcatagaagtggtggatgtgtcgactatgcacagacgcgaactggaacattgctatcgcaaggacgtaagtgtaacatgcatagcctggttctcagaggaccggccctttgctgtggggtactttgatgggaaactcttactgggaaccaaagagcctctcgagaagggaggaattgtcttaattgatgctcacaaggacaccctgataagcatgaagtgggaccctactggccacattctcatgacgtgtgccaaggaggactcagtgaagttgtggggcagcatatctggttgctggtgttgtttgcacagcctgtgccacccctcgattgtgaacgggatagcgtggtgccgcctgcccgggaaagggtccaaactacaactcctcatggcaacagggtgccagagcgggttggtgtgcgtatggcgcattccacaagacacaacccagacaaatgtgaccagcgctgaaggctggtgggagcaggaatctaattgtcaagacggatataggaagtcgtctggtgccaaatgcgtgtatcaactcagaggtcatatcactcctgttaggactgtggccttcagctccgacggtctggctctggtgtcagggggtctgggcgggctcatgaacatttggagcttgcgcgatggcagtgtcctgcagacagttgtcatcggctcaggggctatacagaccactgtctggattccagaagttggcgtggctgcttgctctaaccgcagcaaagatgttcttgtcgtgaactgcactgctgaatgggccgcagctaaccacgtgttggccacttgccggactgcgctgaaacagcaaggagtgctgggactgaacatggctccatgtatgagggccttccttgaacggctgcccatgatgctgcaagaacagtacgcatacgagaagccacatgtggtgtgcggggaccagctcgtccatagcccctacatgcagtgcctcgcctccttggctgttggcctccaccttgaccagctgttgtgcaatccacctgtaccaccgcatcaccagaactgcctgcccgatcctgcaagttggaatcctaatgagtgggcatggctggagtgcttttcaaccaccattaaggcagctgaagccctgacaaatggtgctcagttcccggagtcatttactgtccccgacctagaaccggttccggaagacgaactggtttttttaatggataactctaagtggataaacggcatggacgagcaaattatgagttgggcgacgtctagacccgaggactggcatctcggaggcaagtgcgatgtgtacttgtggggagccgggcggcacggacaactagccgaagccggtcggaacgttatggtgcctgcggctgctccttcttttagccaggcccagcaggtcatctgtggccagaactgcaccttcgtgattcaggccaatgggactgttctggcttgcggagaaggttcctacggacgcctgggccagggaaactctgatgacttgcacgtcttgactgtgatttcagctctccagggcttcgtggtcacccagctggttacaagttgtggtagcgatggccactctatggccctgacggaatccggcgaggtctttagttggggagacggcgactatgggaagctcggccacggcaactccgatcgccagagaaggccacgtcaaatcgaggcactgcagggagaggaagtcgtgcagatgtcatgcggcttcaagcatagcgctgtggtgacgtcagatggcaagctgttcacttttggcaacggggattacggcaggcttgggctgggcaatactagcaataaaaagctgccagagagggtgaccgcactggaagggtatcagatagggcaggttgcctgcggcttgaaccacacactggccgtgtccgcagatggatccatggtgtgggctttcggggacggcgactacgggaaattgggcttagggaatagcaccgctaaaagcagcccccagaaaatcgatgtactgtgcggtattggcatcaagaaagtggcatgcgggactcaattttcagttgcattaacaaaagatggtcacgtctacaccttcggccaggacagactgattggcctcccggagggaagggccaggaatcataaccgaccacaacaaatccctgtgctggctggtgtgattatcgaggatgtcgcagtgggcgccgagcataccttagccctggcttcaaacggtgacgtctatgcatggggctccaactccgaagggcaactcggactggggcacacaaatcacgttcgtgagcccaccctagtaacgggacttcaaggcaaaaatgtccggcaaatcagcgcgggcagatgccattctgccgcctggaccgctccgcccgttccccccagggctcctggggtgtctgtgccactgcagctgggcctgccggacacagtgcccccgcagtacggcgcgctccgggaagtgtctatccatacggtgcgcgcgagactgcggctcctctatcacttcagcgatctgatgtattccagctggcgcttactgaatttatctccaaacaatcaaaattcaacgtcccattacaacgctggcacctgggggattgtccagggccagttacgccctctcctggctcctagagtgtataccctgccgatggttcgatcaattgggaagacaatggtgcagggcaagaattatgggccgcagatcaccgtgaaaagaatcagcacacggggtcggaagtgcaaaccaatctttgttcaaattgcacgccaagtggtgaagttaaatgcttcagatctaaggctccccagccgcgcttggaaagtgaagctggtaggggagggagcagatgacgctgggggcgttttcgatgatactatcactgaaatgtgccaggagctagagacaggcattgtagatctgctgatcccgagcccgaatgctacagccgaagtcggctataatcgggatcgcttcttattcaatccaagtgcttgtctggatgaacatttgatgcagtttaagtttctcggcatccttatgggggttgccattcggaccaagaagcctctggacttgcatctggcccccctcgtgtggaagcagctttgctgcgttcctttgaccttggaggacctggaagaggtcgatctgctttacgttcagactctgaattccatcctgcacatcgaggattccgggattactgaagagtcttttcacgaaatgatcccattggatagttttgtgggtcaatccgccgacggcaagatggtgcccatcatcccagggggaaattccattcccctcacattcagcaacagaaaggagtacgtggaaagggcaattgaatataggcttcatgagatggacaggcaggtggccgcagttcgcgaggggatgtcgtggatcgtcccggtgccacttctttcccttctgacggcaaaacagctggaacaaatggtgtgtggcatgcccgagatctcggtggaggttcttaagaaagtggtgagataccgcgaagttgatgagcagcaccaactcgttcagtggttttggcacacactcgaagagttcagcaatgaagagcgagtgctctttatgagatttgtgtccggtagatccagacttcctgcaaacaccgcagatatttcccaacggtttcagattatgaaggttgaccgcccctacgactctttgcctacatcccagacctgctttttccagcttcgattacctccttactcaagccagcttgtgatggcagaacgtctccgttatgcgatcaacaactgccgcagtattgatatggataactatatgctctcaaggaatgtggacaatgctgaagggtctgataccgactactag

SEQ ID NO: 142119 - DNA, 14586 bp, Artificial Sequence
  derived and/or modified sequence
atggccaccatgatcccccctgtgaagctgaagtggctggagcacctgaacagctcctggatcacagaagattctgagagcatcgccacccgggagggcgtggccgtgctgtacagcaagctggtgagcaacaaggaggtggtgcccctgccccagcaggtgctgtgcctgaagggcccccagctgcctgactttgagcgggagagcctgagcagtgatgagcaggaccactacctggatgccctgctgagcagccagctggccctggccaagatggtgtgcagcgacagcccctttgctggggccctgaggaagaggctgctggtgctgcagagggtcttctacgccctgagcaacaagtaccatgacaagggcaaggtgaagcagcagcagcacagccctgagagcagcagcggcagcgcagatgtgcacagcgtgtctgagcggcccaggagcagcacagatgccctgattgagatgggcgtgaggacaggcctgagcctgctgtttgccctgctgcggcagagctggatgatgcctgtgtctggccctggcctgagcctgtgcaatgatgtgatccacacagccatcgaggtggtgagcagcctgccccccctgagcctggccaatgaaagcaagatcccccccatgggcctggactgcctgagccaggtgaccaccttcctgaagggcgtgaccatccccaacagcggggctgacaccctgggccggcggctggccagcgagctgctgctgggcctggccgcccagaggggcagcctgcgctacctgctggagtggattgagatggccctgggcgccagcgctgtggtgcacaccatggagaagggcaagctgctgagcagccaggagggcatgatcagctttgactgcttcatgaccatcctgatgcagatgagaagaagcctgggcagcagcgctgacaggagccagtggagggagcccaccaggaccagtgatggcctgtgcagcctgtatgaagctgccctgtgcctgtttgaggaggtgtgcaggatggccagtgactacagcaggacctgtgccagcccagacagcatccagacaggagatgcccccatcgtgtctgagacctgtgaggtgtatgtgtggggcagcaacagcagccaccagctggtggagggcacccaggagaagatcctgcagcccaagctggcccccagcttcagtgatgcccagaccatcgaggccggccagtactgcaccttcgtcatcagcacagatggctctgtgcgggcctgtgggaagggcagctatggccgcctgggcctgggggacagcaacaaccagagcaccctgaagaagctgacctttgagccccacaggagcatcaagaaggtgagcagcagcaagggcagtgatggccacaccctggccttcaccacagaaggagaggtgttctcctggggagatggagactatggcaagctgggccacggcaacagcagcacccagaagtaccccaagctgatccagggccccctgcagggcaaggtggtggtgtgtgtgtctgctggctaccgccacagcgctgctgtgacagaagatggagagctgtacacctggggcgagggggactttggccgcctgggccatggagacagcaacagcaggaacatccccaccctggtgaaggacatcagcaatgtgggggaggtgtcctgtggcagcagccacaccatcgccctgagcaaggatggccgcacagtgtggagctttggaggaggagacaatggcaagctgggccacggggacaccaacagagtgtacaagcccaaggtgattgaggccctgcagggcatgttcatcaggaaggtgtgtgccggcagccagagcagcctggccctgaccagcacaggccaggtgtatgcctggggctgtggggcctgcctgggctgcggcagcagcgaggccacagccctgcggcccaagctgattgaggagctggccgccaccagaattgtggatgtgtccatcggggacagccactgcctggccctgagccatgacaatgaggtgtatgcctggggcaacaacagcatgggccagtgtggccagggcaacagcacaggccccatcaccaagcccaagaaggtgtctggcctggatggcatcgccatccagcagatctctgctggcaccagccacagcctggcctggacagccctgccccgggaccggcaggtggtggcctggcaccggccctactgtgtggacctggaggagagcaccttcagccacctgcgctccttcctggagcgctactgtgacaagatcaacagcgagatcccccccctgcccttccccagcagccgggagcaccacagcttcctgaagctgtgcctgaagctgctgagcaaccacctggccctggccctggccggcggcgtggccaccagcatcctgggccggcaggccggccccctgaggaacctgctcttccggctgatggacagcacagtgcctgatgagatccaggaggtggtgattgagaccctgtctgtgggcgccaccatgctgctgccccccctgcgggagaggatggagctgctgcacagcctgctgccccagggccctgaccgctgggagagcctgagcaagggccagaggatgcagctggacatcatcctgaccagcctgcaggaccacacccacgtggccagcctgctgggctacagcagccccagtgatgctgctgacctgagctctgtgtgcaccggctacggcaacctgagtgaccagccctacggcacccagagctgccacccagacacccacctggccgagatcctgatgaagaccctgctgaggaacctgggcttctacacagaccaggccttcggggagctggagaagaacagcgacaagttcctgctgggcaccagcagcagcgagaacagccagcctgcccacctgcacgagctgctgtgcagcctgcagaagcagctgctggccttctgccacatcaacaacatcagcgagaacagcagctctgtggccctgctgcacaagcacctgcagctgctgctgccccacgccacagacatctacagccgcagcgccaacctgctgaaggagagcccctggaatggatctgtgggggagaagctgagagatgtgatctacgtgtctgctgctggctccatgctgtgccagatcgtgaacagcctgctgctgctgcctgtgtctgtggcccggcccctgctgagctacctgctggacctgctgccccccctggactgcctgaaccggctgctgcctgctgctgacctgctggaggaccaggagctgcagtggcccctgcatggaggccctgagctgattgatcctgctggcctgcccctgccccagcctgcccagagctgggtgtggctggtggacctggagaggaccatcgccctgctgattggccgctgcctgggcggcatgctgcagggcagccctgtgtccccagaggagcaggacacagcctactggatgaagacccccctcttcagtgatggagtggagatggacaccccccagctggacaagtgcatgagctgcctgctggaggtggccctgtctggaaatgaggagcagaagccctttgactacaagctgcggcctgagattgctgtgtatgtggacctggccctgggctgcagcaaggagcccgcccggagcctgtggatctccatgcaggactatgctgtgtccaaggactgggacagcgccaccctgagcaatgaaagcctgctggacacagtgtccagatttgtgctggccgccctgctgaagcacaccaacctgctgagccaggcctgtggggagagccgctaccagcccgggaagcacctgtctgaggtgtaccgctgtgtgtacaaggtgcgcagccggctgctggcctgcaagaacctggagctgatccagaccaggagcagcagccgggaccgctggatcagcgagaaccaggacagcgcagatgtggacccccaggagcacagcttcaccaggaccattgatgaggaggccgagatggaggagcaggccgagcgggaccgggaggagggccaccctgagccagaagatgaggaggaggagcgggagcacgaggtgatgacagctgggaagatcttccagtgcttcctgagcgcccgggaggtggcccggagccgggaccgggacaggatgaacagcggggccggcagcggggcccgggcagatgatcctccaccccagagccagcaggagaggagagtgtccacagacctgcctgagggccaggatgtgtacacagctgcctgcaacagcgtcatccaccgctgtgccctgctgatcctgggcgtgtcccctgtgattgatgagctgcagaagaggcgggaggagggccagctgcagcagcccagcaccagcgccagcgagggcggcggcctgatgaccaggtctgagagcctgacagctgagagccggctggtgcacaccagccccaactaccgcctcatcaagagccgctctgagagtgacctgagccagcctgagagtgatgaggagggctacgccctgtctggaagaagaaatgtggacctggacctggccgccagccacaggaagaggggccccatgcacagccagctggagagcctgagtgacagctgggcccggctgaagcacagccgggactggctgtgcaacagcagctacagctttgaaagtgactttgacctgaccaagagcctgggcgtgcacaccctgattgaaaatgtggtgtcctttgtgtctggagatgtgggcaatgcccctggcttcaaggagcctgaggagagcatgagcaccagcccccaggccagcatcatcgccatggagcagcagcagctgcgggcagagctgcggctggaggccctgcaccagatcctggtgctgctgagcggcatggaggagaagggcagcatcagcctggccggcagccggctgagcagcggcttccagagcagcaccctgctgacctctgtgcggctgcagttcctggccggctgcttcggcctgggcaccgtgggccacactggaggaaaaggagagagcggccgcctgcaccactaccaggacggcatccgggccgccaagaggaacatccagatcgagatccaggtggccgtgcacaagatctaccagcagctgagcgccaccctggagcgggccctgcaggccaacaagcaccacatcgaggcccagcagaggctgctgctggtgacagtgtttgccctgtctgtgcactaccagcctgtggatgtgtccctggccatcagcacaggcctgctgaatgtgctgagccagctgtgtggcacagacaccatgctgggccagcccctgcagctgctgcccaagacaggagtgtcccagctgagcacagccctgaaggtggccagcacccggctgctgcagatcctggccatcaccaccggcacctacgccgacaagctgagccccaaggtggtgcagagcctgctggacctgctgtgcagccagctgaagaacctgctgagccagacaggagtgctgcacatggccagctttggagagggggagcaggaggatggagaggaggaggagaagaaggtggacagcagcggggagacagagaagaaggacttccgggccgccctgaggaagcagcacgccgctgagctgcacctgggggacttcctggtgttcctgcggcgggtggtgagcagcaaggccatccagagcaagatggccagccccaagtggacagaggtgctgctgaacatcgccagccagaagtgcagcagcggcatccccctggtgggcaacctgcggacccggctgctggccctgcacgtgctggaggccgtgctgcctgcctgtgagagcggcgtggaggatgaccagatggcccagatcgtggagcggctcttcagcctgctgagtgactgcatgtgggagacccccatcgcccaggccaagcacgccatccagatcaaggagaaggagcaggagatcaagctgcagaagcagggcgagctggaggaggaggatgagaacctgcccatccaggaggtgtcctttgatcctgagaaggcccagtgctgcctggtggagaatggccagatcctgacccacggcagcggcggcaagggctacggcctggccagcactggagtgaccagcggctgctaccagtggaagttctacatcgtgaaggaaaatagaggaaatgaaggcacctgtgtgggcgtgagccgctggcctgtgcatgacttcaaccacaggaccaccagtgacatgtggctgtaccgggcctacagcggcaacctgtaccacaatggagagcagaccctgaccctgagcagcttcacccagggcgacttcatcacctgtgtgctggacatggaggcccggaccatcagctttgggaagaatggagaggagcccaagctggcctttgaagatgtggatgctgctgagctgtacccctgtgtgatgttctacagcagcaaccctggagagaaggtgaagatctgtgacatgcagatgaggggcaccccccgggacctgctgcccggggaccccatctgcagccctgtggccgctgtgctggccgaggccaccatccagctgatccgcatcctgcacaggacagaccgctggacctactgcatcaacaagaagatgatggagcggctgcacaagatcaagatctgcatcaaggagagcggccagaagctgaagaagagccgctctgtgcagagccgggaggagaatgagatgagggaggagaaggagagcaaggaggaggagaagggcaagcacaccaggcatggcctggccgacctgtctgagctgcagctgcggaccctgtgcatcgaggtgtggcctgtgctggccgtcatcggcggcgtggatgctggcctgcgggtgggcggccgctgtgtgcacaagcagacaggaagacatgccaccctgctgggcgtggtgaaggagggcagcaccagcgccaaggtgcagtgggatgaggccgagatcaccatctccttccccaccttctggagccccagcgacacccccctgtacaacctggagccctgtgagcccctgccctttgatgtggcccgcttccggggcctgacagcctctgtgctgctggacctgacctacctgactggagtgcatgaggacatgggcaagcagagcaccaagagacatgagaagaagcacagacatgagagcgaggagaagggagatgtggagcagaagccagagagcgagagcgccctggacatgaggacaggcctgaccagtgatgatgtgaagagccagagcaccaccagcagcaagtcagaaaatgaaattgccagcttcagcctggaccccaccctgcccagcgtggagagccagcaccagatcacagagggcaagaggaagaaccacgagcacatgagcaagaaccatgatgtggcccagagcgagatccgggctgtgcagctgagctacctgtacctgggcgccatgaagagcctgagcgccctgctgggctgcagcaaatatgcagagctgctgctgatccccaaggtgctggccgagaatggccacaacagcgactgtgccagcagccctgtggtgcatgaagatgtggagatgagagctgccctgcagttcctgatgaggcacatggtgaagagagctgtgatgaggagccccatcaagagggccctgggcctggccgacctggagcgggcccaggccatgatctacaagctggtggtgcacggcctgctggaggaccagtttggaggcaagatcaagcaggagattgaccagcaggccgaggagagtgaccctgcccagcaggcccagacccctgtgaccaccagccccagcgccagcagcaccaccagcttcatgagcagcagcctggaggacaccaccacagccaccacccctgtgacagacacagagaccgtgcctgccagcgagagccctggggtgatgcccctgagcctgctgcggcagatgttcagcagctaccccaccaccaccgtgctgcccacccggcgggcccagaccccacccatcagcagcctgcccaccagccccagtgatgaggtgggccggcggcagagcctgaccagcccagacagccagagcgcccggcctgccaacagaacagccctgagtgaccccagcagccggctgagcaccagccccccacctccagccatcgctgtgcccctgctggagatgggcttcagcctgcggcagatcgccaaggccatggaggccaccggggcccggggggaggctgatgcccagaacatcaccgtgctggccatgtggatgattgagcaccctggccatgaagatgaggaggagccccagagcggcagcacagctgacagcaggcctggagctgctgtgctgggcagcggcggcaagagcaatgacccctgctacctgcagagccctggggacatccccagcgcagatgctgctgagatggaggagggcttcagcgagagcccagacaacctggaccacacagaaaatgctgccagcggcagcggccccagcgcccggggccgctctgctgtgacccggcggcacaagtttgacctggccgcccggaccctgctggcccgggccgccggcctgtacagatctgtgcaggcccacaggaaccagagccggcgggagggcatcagcctgcagcaggaccccggggccctgtatgacttcaacctggatgaggagctggagattgacctggatgatgaggccatggaggccatgtttggccaggacctgaccagtgacaatgacatcctgggcatgtggatccctgaggtgctggactggcccacctggcacgtgtgtgagagtgaagatcgggaggaggtggtggtgtgtgagctgtgtgaatgttctgtggtgtccttcaaccagcacatgaagaggaaccaccctggctgcggccgcagcgccaaccggcagggctaccgcagcaatggcagctatgtggatggctggtttggaggagaatgtggcagcggcaacccctactacctgctgtgtggcacctgccgggagaagtacctggccatgaagaccaagagcaagagcaccagcagcgagcgctacaagggccaggccccagacctgattggcaagcaggacagcgtgtatgaggaggactgggacatgctggatgtggatgaagatgagaagctgactggagaggaggagtttgagctgctggccggccccctgggcctgaatgaccggcgcatcgtgcctgagcctgtgcagttcccagacagcgaccccctgggcgcctctgtggccatggtgacagccaccaacagcatggaggagaccctgatgcagatcggctgccacggctctgtggagaagagcagcagcggccgcatcaccctgggggagcaggccgccgccctggccaacccccatgacagagtggtggccctgcggcgggtgacagctgctgcccaggtgctgctggcccggaccatggtgatgagggccctgagcctgctgtctgtgtctggcagcagctgcagcctggccgccggcctggagagcctgggcctgacagacatccgcaccctggtgcggctgatgtgcctggccgccgccggccgggccggcctgagcaccagccccagcgccatggccagcaccagcgagaggagcagaggaggccacagcaaggccaacaagcccatcagctgcctggcctacctgagcacagctgtgggctgcctggccagcaatgcccccagcgctgccaagctgctggtgcagctgtgcacccagaacctgatctctgctgccactggagtgaacctgaccaccgtggatgacagcatccagaggaagttcctgcccagcttcctgcggggcattgctgaggagaacaagctggtgaccagccccaactttgtggtgacccaggccctggtggccctgctggccgacaagggggccaagctgcggcccaactatgacaagtctgaggtggagaagaagggccccctggagctggccaatgccctggccgcctgctgcctgagcagccggctgagcagccagcaccggcagtgggccgcccagcagctggtgaggaccctggccgcccatgaccgggacaaccagaccaccctgcagaccctggccgacatgggcggggacctgaggaagtgcagcttcatcaagctggaggcccaccagaacagagtgatgacctgtgtgtggtgcaacaagaagggcctgctggccaccagcggaaatgatggcaccatccgggtgtggaatgtgaccaagaagcagtacagcctgcagcagacctgtgtgttcaaccggctggagggagatgctgaggagagcctgggcagccccagcgaccccagcttcagccctgtgtcctggagcatcagcggcaagtacctggccggggccctggagaagatggtgaacatctggcaggtgaatggaggcaagggcctggtggacatccagccccactgggtgtctgccctggcctggccagaggagggccctgccacagcctggagcggggagagccctgagctgctgctggtgggccgcatggatggcagcctgggcctcatcgaggtggtggatgtgtccaccatgcaccggcgggagctggagcactgctacaggaaggatgtgtctgtgacctgcatcgcctggttctctgaagatcggccctttgctgtgggctactttgatggcaagctgctgctgggcaccaaggagcccctggagaagggcggcatcgtgctgattgatgcccacaaggacaccctcatctccatgaagtgggaccccaccggccacatcctgatgacctgtgccaaggaggacagcgtgaagctgtggggcagcatcagcggctgctggtgctgcctgcacagcctgtgccaccccagcatcgtgaatggaattgcctggtgccgcctgcccgggaagggcagcaagctgcagctgctgatggccaccggctgccagagcggcctggtgtgtgtgtggaggatcccccaggacaccacccagaccaacgtgaccagcgctgagggctggtgggagcaggagagcaactgccaggacggctacaggaagagcagcggggccaagtgtgtgtaccagctgcggggccacatcacccctgtgaggacagtggccttcagcagtgatggcctggccctggtgtctgggggcctgggcggcctgatgaacatctggagcctgagagatggctctgtgctgcagacagtggtgattggcagcggggccatccagaccaccgtgtggatccctgaggtgggcgtggccgcctgcagcaacagaagcaaggatgtgctggtggtgaactgcacagctgagtgggccgccgccaaccacgtgctggccacctgcaggacagccctgaagcagcagggcgtgctgggcctgaacatggccccctgcatgagggccttcctggagcggctgcccatgatgctgcaggagcagtatgcctatgagaagccccacgtggtgtgtggggaccagctggtgcacagcccctacatgcagtgcctggccagcctggccgtgggcctgcacctggaccagctgctgtgcaacccccctgtgcccccccaccaccagaactgcctgcctgaccctgcctcctggaaccccaatgagtgggcctggctggagtgcttcagcaccaccatcaaggctgctgaggccctgaccaacggggcccagtttcctgagagcttcaccgtgcctgacctggagcctgtgcctgaagatgagctggtgttcctgatggacaacagcaagtggatcaatggcatggatgagcagatcatgtcctgggccaccagcaggcctgaggactggcacctgggcggcaaatgtgatgtgtacctgtggggcgccggcagacatggccagctggccgaggccggcagaaatgtgatggtgcctgctgctgcccccagcttcagccaggcccagcaggtgatctgtggccagaactgcaccttcgtcatccaggccaatggaacagtgctggcctgtggggagggcagctatggccgcctgggccagggcaacagtgatgacctgcacgtgctgaccgtcatcagcgccctgcagggctttgtggtgacccagctggtgaccagctgtggcagtgatggccacagcatggccctgacagagagcggggaggtgttctcctggggagatggagactatggcaagctgggccacggcaacagcgaccggcagaggcggccccggcagatcgaggccctgcagggcgaggaggtggtgcagatgagctgtggcttcaagcacagcgctgtggtgaccagtgatggcaagctgttcacctttggaaatggagactatggccgcctgggcctgggcaacaccagcaacaagaagctgcctgagcgggtgacagccctggagggctaccagatcggccaggtggcctgtggcctgaaccacaccctggccgtgtctgcagatggctccatggtgtgggcctttggagatggagactatggcaagctgggcctgggcaacagcacagccaagagcagcccccagaagattgatgtgctgtgtggcatcggcatcaagaaggtggcctgtggcacccagttctctgtggccctgaccaaggatggccacgtgtacaccttcggccaggaccggctgattggcctgcctgagggccgggccaggaaccacaaccggccccagcagatccctgtgctggccggggtcatcattgaagatgtggccgtgggcgctgagcacaccctggccctggccagcaatggagatgtgtatgcctggggcagcaacagcgagggccagctgggcctgggccacaccaaccacgtgcgggagcccaccctggtgacaggcctgcagggcaagaatgtgcggcagatctctgctggccgctgccacagcgctgcctggacagcccctcctgtgcccccccgggcccctggggtgtctgtgcccctgcagctgggcctgcctgacacagtgcccccccagtacggggccctgcgggaggtgtccatccacacagtgcgggcccggctgcggctgctgtaccacttcagtgacctgatgtacagctcctggaggctgctgaacctgagccccaacaaccagaacagcaccagccactacaatgccggcacctggggcatcgtgcagggccagctgcggcccctgctggccccccgggtgtacaccctgcccatggtgcgcagcatcggcaagaccatggtgcagggcaagaactacggcccccagatcaccgtgaagaggatcagcacccggggcaggaagtgcaagcccatctttgtgcagatcgcccggcaggtggtgaagctgaatgccagtgacctgcggctgcccagccgggcctggaaggtgaagctggtgggggagggcgcagatgatgctgggggcgtgtttgatgacaccatcacagagatgtgccaggagctggagactggaattgtggacctgctgatccccagccccaatgccacagctgaggtgggctacaacagagaccgcttcctgttcaaccccagcgcctgcctggatgagcacctgatgcagttcaagttcctgggcatcctgatgggcgtggccatccgcaccaagaagcccctggacctgcacctggcccccctggtgtggaagcagctgtgctgcgtgcccctgaccctggaggacctggaggaggtggacctgctgtatgtgcagaccctgaacagcatcctgcacatcgaggacagcggcatcacagaggagagcttccacgagatgatccccctggacagctttgtgggccagagcgcagatggcaagatggtgcccatcatccctgggggcaacagcatccccctgaccttcagcaacaggaaggagtatgtggagcgggccatcgagtaccgcctgcacgagatggaccggcaggtggccgctgtgcgggagggcatgtcctggatcgtgcctgtgcccctgctgagcctgctgacagccaagcagctggagcagatggtgtgtggcatgcctgagatctctgtggaggtgctgaagaaggtggtgcgctaccgggaggtggatgagcagcaccagctggtgcagtggttctggcacaccctggaggagttcagcaatgaggagcgggtgctcttcatgagatttgtgtctggccgcagccggctgcctgccaacacagctgacatcagccagcgcttccagatcatgaaggtggaccggccctatgacagcctgcccaccagccagacctgcttcttccagctgcggctgcccccctacagcagccagctggtgatggccgagcggctgcgctatgccatcaacaactgccgcagcattgacatggacaactacatgctgagcagaaatgtggacaatgctgagggcagtgacacagactactag

SEQ ID NO: 142120 - DNA, 14586 bp, Artificial Sequence
  derived and/or modified sequence
atggccaccatgatcccccccgtgaagctgaagtggctggagcaccttaattccagctggattaccgaggactcagagagtatcgccactagagagggagtggccgtcctgtattcaaagctggtgtccaataaggaagtggtaccccttcctcagcaggtgctgtgcctcaaaggcccccagctcccagactttgagcgggagtccctgagctcagacgagcaggatcactatctggacgcactgctaagttcccagctggccctggctaaaatggtgtgttctgacagccccttcgctggggccctgagaaagcgtctgctcgtgcttcagagggtgttctatgctctcagcaataagtaccatgacaaaggaaaggttaagcagcagcagcatagcccagagtcctcatcagggagtgccgatgtgcattctgtctccgaacgaccgaggtccagcacggacgccctcattgagatgggcgttcgaaccgggttgtcactgctgttcgcactgctgaggcagtcctggatgatgcccgtctctggaccaggcttaagtctctgcaatgatgttatccacaccgccatcgaagttgtgtccagtctcccacccctgagccttgctaacgagtcaaaaatacccccgatgggtctcgactgcctctctcaggtgaccactttcctgaagggcgtcacaatccctaattctggagcagacactctcggtcggcgactagcgagtgaattgttgctgggccttgctgctcagcgcgggtcactgagatacctgctcgaatggattgagatggctctcggtgcctcggcagtagtgcatacaatggagaaggggaagcttctgtctagccaggaaggaatgatttccttcgactgcttcatgacaattctgatgcaaatgagacgctctctgggatcgtccgccgatcggtcacagtggagggagcccacgcgcacttctgacggcctgtgttcactttatgaagccgcactgtgcctgtttgaggaagtatgtaggatggcgtccgattattctagaacctgtgcatctcccgattccattcaaaccggggacgcgccgatcgttagcgaaacatgtgaggtctacgtgtggggctccaactcctcccatcagctggttgaaggcacacaggagaaaattctgcagcctaaactcgctccatcgtttagtgatgcccaaacaatagaggccggtcaatactgcaccttcgtaatctcaacagacggaagcgtacgggcctgcggaaaagggtcgtacgggcggctcgggctcggggatagtaataatcaatctaccctcaagaagttaacctttgagccacaccgtagcattaagaaggtgagttcctcaaaagggtccgacgggcacaccttagcttttaccacagagggcgaagttttcagctggggcgatggcgattatgggaaactggggcatggcaactctagcacccagaagtatcctaaactgatacaagggcctctgcagggaaaagtcgttgtctgcgttagcgccggctaccgccattcagctgccgtaactgaagacggcgagctgtacacatggggagagggggactttggcaggctgggccacggtgacagtaactcgcgaaacatccccactctggttaaggatatctccaacgtgggagaagtttcctgcgggtccagccacaccatcgccctgtcaaaggatgggcgtacagtgtggtccttcggtggcggggataatggcaagctcggccacggcgatactaacagggtatataagcctaaggtgatcgaagccctccagggcatgttcattcggaaggtgtgcgctggttcccagagttccctggccctcacatctacgggacaagtgtatgcatggggctgcggcgcatgtctggggtgtgggtcctcagaggctactgccctcagacccaagctgattgaagaactggcggcgacccgaattgtggatgtgtccatcggcgattcacattgcctggctttgtcccacgataatgaagtctacgcctggggaaataacagcatggggcagtgcggccagggcaattctacaggccctattacgaagcctaagaaggtgtccggcctcgacggcattgctatccagcagatctcagccggcacctcacattctctggcgtggacagccctcccccgcgaccggcaggtggtggcatggcaccgaccctactgtgtcgatctcgaagagtcgaccttctctcatcttagaagcttcctcgagaggtattgcgataagattaatagcgaaattccaccactgcctttcccttcttcacgagaacaccatagctttctcaagctatgcctaaagctactatctaaccacctagctctggcgttagccggaggcgtggctacctctattctgggtcgccaggctggtccactgcgcaatctgctgtttcggctgatggactctactgtacccgatgagatccaggaggtcgtgatagaaacattatccgttggggctacaatgctcttaccccctctgcgtgagcgaatggagcttcttcattccctcctgccgcagggacctgaccggtgggaatctctaagcaagggccaacgtatgcagctggacatcattctaaccagcttacaagaccatacacacgtggcctcacttctcgggtacagttctcctagcgacgctgctgatctctcgtcagtttgtaccgggtatggaaacctatcggaccagccgtatggcacccagtcatgccatccagacacacatctagcagaaattctgatgaaaactctgcttagaaatctcggattctacacggaccaagcgtttggcgagttagagaaaaacagcgataaatttctcctgggcacgtccagctctgaaaattcccagcctgctcatcttcacgagctcctgtgctctctgcaaaaacagttgttggcattttgccatatcaataacatttcagagaactcttcgtcggtggccctgctacacaaacacctccagttgcttctgccacacgccaccgacatctattccagatccgccaacttgctcaaagaatctccttggaacggcagtgtgggagagaaattacgtgacgtgatctacgtttccgccgctggatctatgctgtgccaaatagtaaattctctgctgctgctaccagtgtctgtcgcacggcctctgttgtcttacctactcgatttattgcccccattggactgcctgaaccggcttctgccggccgctgatctgctcgaggaccaggaactacagtggcccttgcatggaggcccagagctgattgaccctgcaggtctgccgttgcctcagcccgcgcaatcttgggtatggctggtcgatctggaacgtacaattgcattgcttatcgggcgatgtctgggaggtatgctgcaaggctctcccgtgtccccagaagagcaagatacagcctattggatgaaaacacctctgttttccgacggtgtggagatggacacaccgcagcttgacaaatgcatgtcctgtctgctcgaggttgcactgtccgggaacgaggaacagaaaccctttgactataagctgaggcctgaaatcgccgtgtacgtggacctggcactgggttgcagcaaggagcccgccagatcactatggatcagcatgcaggactacgccgtgagcaaagactgggactcagcaaccctgtccaatgaatccctacttgatacagtgtccaggttcgtgcttgcggcgctgctgaagcacacgaatctcctgtcgcaggcatgtggggaatcccggtaccaaccaggaaagcatctttccgaggtttacaggtgtgtgtacaaggtgagatcaaggcttttggcctgtaaaaatttagagctaatccagacaagatcctcctcccgggaccgctggataagcgagaaccaggactccgcagatgtggaccctcaggaacatagctttacacggacgatagatgaagaggctgaaatggaggagcaggctgagagggacagggaggaaggccatcccgaacccgaggatgaagaggaggaaagagagcacgaggtgatgactgcaggaaaaatctttcaatgcttcttgtctgcccgggaggtcgccaggagccgagaccgcgataggatgaactcgggagctggaagcggtgcaagggcagacgatcctccccctcagtctcagcaggagcggagggtgagtaccgatctgccagaggggcaagacgtctacacagcagcttgtaattccgtaatccacagatgtgcccttctaattctgggggtcagtccagtaatcgacgagctgcagaagcgccgcgaggaaggccagctacaacagcccagcaccagcgcctccgagggagggggactcatgacccggtccgagagcctgaccgctgagtcaaggttagttcacactagtcccaattaccgactcattaagagtcgctcagagtcagatcttagtcaacccgaatctgacgaggagggctacgctctttccggtcgccggaacgttgatctggacctggcagcatctcaccgcaagcggggtcctatgcattcacagctggagagcctttctgatagttgggctcggctgaagcacagcagggattggctctgtaactcctcctattcatttgagagcgactttgacctcacaaaatcgcttggggtgcacacccttattgaaaacgtagtatccttcgtttccggggatgtcgggaacgcaccaggatttaaggaaccagaagaatcaatgagcacttcaccgcaagcatcaattattgccatggaacagcaacagctgagggcagagctgcggctagaagccctgcatcagattctggtgttgctcagcggcatggaagagaagggctccataagtttagccggcagcaggctgagctctggttttcagagtagtacacttctcacgtcggttaggttgcagttcctggcaggatgctttggactaggaactgtgggccacactggcgggaaaggagaatcaggtagattacatcattaccaggatggaattagagcggccaagaggaacattcagatcgaaatccaagtagctgtgcacaagatctaccagcagctgtcagccaccctcgagagagcacttcaggccaacaagcatcacattgaagcacaacagaggctcctactcgtgacagtgtttgccttatccgttcactatcagcctgtcgacgtgagtctcgccatttctactggacttttgaacgttctatctcagctttgcggaaccgataccatgctcggccagccgttgcaattgctgcctaaaactggtgtcagccagctgtccacggcgctgaaagtggcttcaacaagactgttacagattctcgcaatcacaaccggaacatatgcagacaagctgtcccctaaggtagtgcagtctctcctggacctcttatgttctcaactgaagaatttgctatcgcaaaccggggtcctgcacatggcctcctttggagagggcgagcaggaggatggagaagaggaggagaagaaggttgactccagcggggagacagagaagaaggacttcagggcagccctcagaaagcagcacgcggctgaactacacctgggcgactttttggtctttcttaggagagtggtctcatcaaaggccattcagtctaaaatggccagtcctaagtggacagaagtgctgcttaacatcgcatcccagaagtgctcatctgggatcccactggttggtaatctcagaacaagattactcgcactgcacgtacttgaggccgtgctccctgcatgcgagtctggggtggaagacgatcagatggcccagatagttgaaaggctgttttcactgttgtccgactgcatgtgggagacacccattgctcaggccaaacatgctattcagatcaaggaaaaagaacaggagattaaactccaaaagcagggcgaactggaagaagaggatgagaatctgcccatccaggaggtgtcttttgatccagagaaggcacagtgctgcctggtggaaaatggacagatcttgacacacggctccgggggcaagggctatggactggcctctaccggagtgacaagcggctgttatcagtggaaattttatattgtgaaagaaaaccgcgggaatgaaggcacctgcgtcggggtatctcgttggccagtccacgattttaaccatcgcaccacctctgatatgtggctgtatagggcttattccgggaatctctatcacaacggagagcagacactgaccctctcttcgttcactcagggagatttcattacatgtgtgctggacatggaagccagaacaatcagttttggcaaaaatggggaagaaccaaaactggcatttgaagatgtggatgcggccgagctctacccttgtgtgatgttttacagctctaatcctggtgagaaagtgaagatatgtgatatgcagatgcgaggcacaccacgagacctgctgcccggagaccccatttgctccccagtcgccgctgtgctggccgaagccaccatccagctgattagaattctccaccgcaccgaccgctggacttactgtattaataaaaagatgatggaaaggttacataaaatcaagatctgcattaaagaatctggacaaaagctgaagaagagtagaagcgtacagtccagagaggagaacgaaatgagggaagagaaagaaagtaaggaggaggagaaaggtaaacatacacggcatggtctcgcggacttgtccgagctgcagctgcgcactctatgcatcgaggtatggccagtgcttgctgtaatcggaggtgtcgacgctggcctgcgcgtcggtggtagatgcgtgcacaaacagacaggacggcacgctaccctcctgggagttgtcaaagaggggtctacaagcgccaaagtccagtgggatgaagcagagatcactattagctttcctacattttggtcaccctccgataccccgttgtataacctggaaccctgcgagccattgccattcgatgttgcacgcttcagaggtttgactgcttccgtcctgcttgacctgacataccttaccggcgtgcacgaggacatgggaaaacaatccaccaagcggcacgagaagaaacatcggcacgaatccgaagaaaagggggacgttgagcagaagccggaatccgagagcgcgcttgacatgcgcactggcctgaccagtgatgacgtcaagtcccaatccaccacatcaagcaaatctgaaaatgaaatcgcaagtttctcactagatccgactctgccaagtgtggaatcccagcaccagattactgaagggaagcgaaagaaccacgagcacatgtctaaaaatcacgacgtggctcaatctgaaatccgcgcagtgcaattaagctatctctatctaggcgcgatgaaaagcctgagcgcactgctgggctgctccaaatacgccgaactcctccttatcccaaaggttctcgctgaaaatgggcacaacagcgactgtgcctcttctccagtggtgcacgaagacgtcgagatgcgtgctgcactgcagtttttaatgcgtcacatggtgaagagagcagtgatgaggtcaccaatcaagagggctctcgggctggcagacttggagagggcccaagccatgatctataagctggtggtccacggtctcctcgaggaccagtttggtgggaaaatcaaacaggaaatcgaccagcaggcggaagaatcagaccccgcccagcaagcccagacacccgttactacttccccatcagcttcttccaccaccagcttcatgtcttccagcctggaggataccaccactgctacgaccccagtaacggatacggagacggtgcccgcgtccgagtcccctggggtgatgccgctctccttactccgccagatgttcagctcctaccccaccaccaccgtcctcccgaccagacgggcccagaccccaccaatcagctcccttccgacatccccctctgatgaggtgggacggcggcaatctcttaccagtcccgatagccagtctgccaggccggcaaacaggaccgccctttctgatccctcttccagactgtctacctccccaccccccccagccatcgcggtgcccctgttagaaatgggttttagtttgagacaaatcgcgaaagccatggaggccactggtgccaggggcgaagcggacgcccaaaacatcacagtcctggccatgtggatgatagaacatccggggcacgaagatgaggaggaaccacagtctggatccacagccgattcacgacctggcgcagcagtgctaggtagtggcggaaagtccaatgatccctgctacctgcaaagccctggcgatatccctagcgcagatgcggctgagatggaagaaggattctcagaaagccccgataacttggaccacaccgaaaacgccgcttccggttcaggcccctctgcacgcggtagaagcgctgtcacacggaggcacaagttcgacttggcggcccgcactctcctggctagggccgccgggttatacaggtctgttcaggctcatcggaaccagtcaaggcgcgaggggatttcattacagcaggacccaggagccctgtatgatttcaacctggatgaagagcttgagattgatcttgatgacgaagccatggaggctatgttcgggcaggacttaactagcgacaatgatattttgggaatgtggattcctgaagtccttgactggcctacctggcacgtctgcgagagtgaggacagggaggaagttgtggtatgcgaactgtgcgaatgtagcgtggtcagctttaaccagcacatgaaacgcaaccatcctggatgtggacgttctgccaatagacagggttaccgcagtaatgggtcatatgtggacggatggtttggcggagaatgtgggtcagggaacccctactacctgctgtgcggcacatgtagggaaaagtacctagccatgaagacgaaatccaagagcacatcctccgagcgttataaaggccaggccccagatctgattggcaaacaggacagcgtttatgaggaggattgggatatgctggatgtcgatgaagacgaaaagttaaccggtgaggaggagttcgagctgctggcagggccactcggcctcaatgacagaagaatagtaccagagccagttcagttcccagactctgatcccttaggcgcgagcgtcgccatggtgaccgcaacaaactctatggaagaaacgctcatgcagatcggctgccatggaagtgtcgagaagagcagcagcggcaggattactctgggagaacaggccgccgccctggctaatcctcacgatcgggtcgtagcactcagaagagtgaccgctgctgcccaagtgctcctagctcgcactatggtcatgcgggccctgtccctgctatctgtgtcagggagctcatgctccttagctgcaggactcgaaagcttaggacttactgatatcaggacccttgtacgactgatgtgccttgccgccgccggccgtgccggcttaagtactagcccaagtgcaatggccagtacctcagaacggtcccggggcggccacagcaaggccaataagccaatctcctgcctggcctacttgagtaccgcggtgggctgtctggcgtctaatgcacctagtgccgcaaagctgcttgtgcagctatgcactcagaatttgattagtgccgccacaggggtgaatctgactactgtggatgattccatccagaggaaattcctcccaagcttccttagaggcattgccgaagagaataagttggtgacttcccccaattttgttgtgacacaggctctggtcgcactgctggccgataaaggcgctaagttgcggcccaactatgataagtctgaggtcgaaaaaaagggcccactagaacttgcaaatgcactcgcagcgtgttgcctgtctagccggctgtcttctcaacatcggcagtgggccgctcagcagttggtgcggaccctcgccgcacacgatcgcgataatcagacgaccctccagaccctagccgacatgggcggtgacctgcgaaagtgctctttcatcaagctggaagcgcaccagaaccgagtgatgacatgtgtgtggtgtaataagaagggtctgctagccaccagcggcaacgacggcacgattcgggtttggaacgttactaaaaagcaatacagcctgcagcagacatgtgtcttcaaccgcctcgaaggcgatgctgaagaatccctggggtcgccctccgacccgtcatttagccctgtttcgtggagcatcagcgggaaatacctggcaggagccttggagaagatggtaaacatttggcaagtgaacggaggcaaaggcttggttgacatccagccccactgggtgtccgcattggcatggcctgaagagggtcctgccacagcgtggtccggtgaaagccccgaactccttctcgtgggccgtatggatgggtccttgggactgattgaagtggtggatgtgagcaccatgcaccgcagagagttggaacactgttatcgaaaggatgtgagtgttacttgcattgcctggttctcagaagatcggcccttcgcggtcggctatttcgacggcaaacttctgttgggcaccaaggaaccacttgaaaaaggcggcatagtactcatcgacgcccacaaggacaccttgatctcgatgaagtgggacccaaccggccacatccttatgacttgcgcaaaggaagactccgtgaaactttggggatccatctccggctgctggtgctgcctgcacagcctgtgtcatccctcgattgtaaatggcatagcctggtgccgactacctggtaagggaagtaaactgcagttactgatggccaccggatgccagtccggcctggtatgtgtttggcgaataccacaggacaccacacagacgaatgtgaccagtgcagagggatggtgggagcaggaaagtaattgtcaagatggctaccggaaatccagtggagcaaaatgtgtgtaccaattacgcggccatattactcccgtaagaactgtggctttttcaagtgacggacttgccctcgtctccggcgggttgggaggtctgatgaacatttggtcgttgagagatggatcggtgttacagaccgtggtgattggcagcggcgctatccaaacaaccgtctggattccagaggtgggagtggcagcatgctctaatcggtccaaggatgtgctggtggttaattgcaccgccgagtgggccgcagcaaatcacgtgctggcgacatgccggaccgccttgaaacaacaaggagtgctgggtctaaatatggcgccttgcatgcgggcttttcttgaacggctgcctatgatgcttcaggagcagtacgcctatgagaagccacatgtggtctgtggcgaccaattggtgcactccccttatatgcagtgtctggctagcctcgccgtaggccttcacctcgaccagctcttatgcaatccacctgtgccacctcaccatcagaattgcctcccagaccctgccagctggaaccccaatgagtgggcatggttggaatgtttttcaacaacaatcaaggccgctgaagcactaactaatggagctcagtttccagagtcatttacagtacccgaccttgagcccgttcctgaagacgaactggtgttccttatggataactccaaatggatcaatgggatggacgaacaaatcatgagctgggcaactagccggccagaggactggcacttgggcggaaagtgcgacgtgtatctctggggtgccggccggcatgggcaattggcagaagccggacgcaatgttatggtccctgcagccgctccatcgtttagccaagcccagcaggtgatctgcgggcagaattgcacgttcgtgatccaggcaaatgggaccgtgttagcttgtggcgaggggtcctatggacgtctcgggcagggtaacagcgacgacctgcacgttctgaccgttatcagcgctttacagggttttgttgtcactcagctggtgacctcttgtggatctgatggacattccatggccttaaccgagagcggtgaagtgttttcttggggcgatggtgactatggcaaacttggccacggaaacagcgaccgacaacgcaggccacggcagatcgaagcgttgcagggcgaagaagtcgtccaaatgagctgtgggttcaaacattcggcggtggtcacgagtgacggtaagctgttcaccttcgggaatggggattacggccggctggggctcgggaatactagcaataagaaactacccgagagggtgaccgcactcgaaggataccagataggccaggtggcctgcggacttaaccatactctggcagtgtcagccgacggtagcatggtgtgggccttcggcgacggcgattacggcaaactcggcttggggaactcgacagccaagagcagtccacagaagattgacgttctctgcggtataggaataaagaaagtagcctgcggcacccaattttccgtcgcactcactaaagacggccatgtctatacattcggtcaggaccgactgattggcctgcctgaaggccgcgccagaaatcacaacagaccacagcaaatcccagtgttggcgggcgtgatcattgaagacgtcgctgttggggcagagcacactttagctctagcctccaatggcgatgtgtatgcctgggggagcaactcagagggacagttggggctcggtcacactaatcatgtgcgcgagcctaccttggtgaccggcttgcaaggcaagaatgtccgacagattagcgccggacggtgtcattcggcggcatggacagcccctccagttccccctcgtgcccctggagtcagtgtgcctttacagctgggcctgccagatacagtgcctccccagtacggcgccctaagagaagtaagcatccatacagtgagggcgcgccttcgactgctgtaccacttctctgatcttatgtattcatcttggagattactcaatctttccccaaacaatcagaacagcacatcgcactataatgccggtacctggggaattgtgcagggacagctcaggcccctgcttgccccccgagtgtacaccttgccaatggtgagatccatagggaagacaatggttcagggcaagaactatggcccacagattactgtgaagagaatcagtacaagagggagaaagtgcaagccaatttttgtccagattgccagacaggtagtcaagcttaacgctagtgacctgagacttccgtccagagcttggaaagtcaagctcgtcggggagggcgctgatgacgcgggaggcgtgtttgacgatactattactgaaatgtgtcaggagctggagacagggattgtggaccttcttatcccctccccgaatgcgacagctgaagtgggttataatagggaccgttttttattcaatccaagcgcatgcctggacgagcatctgatgcagtttaaattcttggggatcttgatgggagtggcgatccgcaccaagaagccactggacctccacctggcccctctggtgtggaagcagctctgctgcgtccctctgacccttgaggaccttgaagaggtggatttactgtacgtgcagacattgaactcaatccttcatatcgaggattctgggattacggaagaaagctttcatgaaatgattccgctggattctttcgtcggccaaagtgcagatgggaagatggtgcccattatccctggtggcaatagtatccccctgaccttctcaaaccgtaaggaatatgttgagcgcgccattgaatataggctgcacgagatggatcggcaagtggctgccgtgcgagaaggaatgagctggattgtgccagtgcccctgctcagcctgcttaccgccaagcagttggagcagatggtctgcgggatgccagagatttccgtggaggtcctgaagaaggtggtcaggtaccgggaggtggatgaacagcatcaactggtgcaatggttctggcatacactagaggagttcagcaatgaggagagggtcctgtttatgaggttcgtaagtgggcgaagcagactgccagcgaacaccgccgatatctcccagagatttcagatcatgaaagtggatcggccttacgattcccttcccactagtcagacctgtttctttcagctgaggctgcctccatactcttcgcaacttgtcatggctgaacgcctcagatacgccatcaacaactgtcgcagtatcgacatggataactacatgctgtctcgcaatgtagacaacgccgagggaagtgacaccgactattag

SEQ ID NO: 142121 - DNA, 14586 bp, Artificial Sequence
  derived and/or modified sequence
atggctacgatgatccctcctgttaagctcaaatggctggaacacttgaattccagctggatcacggaagactccgagagcatcgctacaagggagggggtcgctgtcctgtatagtaagctggttagcaacaaggaggtggtgcctttaccccagcaggttttatgcctgaaggggccacagctccctgacttcgaacgagaaagtctctctagtgacgagcaggatcactaccttgacgcactgttgtcaagtcaactggcactggctaagatggtctgctcggacagtcccttcgcaggtgctctccgcaagcgtcttctagtgcttcagcgcgttttctacgctttgtctaataaataccacgataaaggaaaagtgaagcaacagcaacactcccctgagtcatcaagcgggtctgctgacgtgcatagtgtgtccgagagacctcggagcagcaccgatgccctaattgaaatgggcgtgaggaccggcctgtctcttctgtttgcgctcttgcgtcagtcctggatgatgcccgtgtctggtccaggtttgtccctgtgcaatgacgtcattcacaccgctatcgaggtcgtgagtagcctgcccccactgtccctggctaacgagtccaagatcccaccgatggggctcgattgcttgagccaagtcacaacctttctgaagggtgtgacaatccctaattccggagctgatacactggggaggcggctggcaagcgagctcctcctggggctggccgctcaaagaggctccctgagatatttgcttgaatggatcgagatggctctgggggcaagcgccgtcgtgcataccatggagaagggcaaactcctgtcgtctcaggaaggcatgatatcctttgactgcttcatgaccattcttatgcagatgagacgctccttgggctctagcgcagacagaagtcagtggagagaaccaaccagaactagtgacggcctgtgtagtctgtacgaggcagccctgtgtctatttgaggaggtgtgtaggatggcctccgactattctagaacatgtgccagtcctgacagcatacaaactggcgatgcccctattgttagcgagacgtgtgaagtgtatgtttggggctcaaattcgtctcatcagctggtggagggaactcaagagaaaatcctgcagccaaaactcgcaccatctttctcagatgcgcagaccatagaggccggtcagtactgcaccttcgtgattagtaccgacggctccgtgcgcgcttgtggaaagggaagttatggacggcttggtctcggcgacagcaataaccaaagcaccctcaagaagcttacttttgaaccccaccgtagtataaaaaaagtgtcttcctctaagggtagcgacggccacaccttagccttcaccacagaaggtgaggttttctcatggggagatggggattatggcaaactgggacatggaaattcctccactcagaagtaccccaagctcatccaaggcccactgcaagggaaagtcgtggtctgtgtgtctgcgggatacagacatagcgcggcagtgaccgaggatggcgagctttacacctggggcgagggagactttggccgtctagggcacggcgactcaaacagtaggaacatccctaccctcgtgaaggacatcagcaacgtcggggaggtcagctgcggctcctctcatactattgccctgagtaaagacggaagaaccgtctggtcttttggaggcggtgacaatggcaagctgggccacggcgataccaaccgcgtgtacaaacctaaggtgattgaggccctacagggcatgtttattcggaaggtctgtgctgggtcccagtcatcccttgccctgactagcaccgggcaggtgtatgcctggggctgcggcgcttgcctgggatgtggctcttctgaagccacagccctccgaccaaaactaatcgaggagctagcagctacaaggattgtagatgttagtatcggtgacagccactgcctggccctctcccatgacaacgaggtctacgcttgggggaacaactccatgggacagtgtggccagggtaactccacgggtcctattaccaagccaaaaaaggtgagcggccttgacggaatcgctatacagcagatctctgccggtaccagccattcactcgcatggacagctctacccagagaccgacaggttgtggcttggcatcgaccttactgtgtggatcttgaagagagtacattctcgcacctccgttcttttttggagcgatattgcgataaaatcaatagtgagattccgccattgcccttccccagctcacgagagcaccactcctttctgaagctgtgcctcaagctgctgtctaatcacctggctctcgccctagccggaggtgtggctacctctatcttggggagacaggccggaccactacgcaatctgttgtttcgcctaatggactctactgttccagacgaaatccaagaggtggttattgagacattaagcgtcggtgcaactatgctgctgccccctctgcgggagaggatggagctgctccacagcctcttgccacagggaccggatcggtgggagtcactgtccaagggacagaggatgcagctcgacataatccttaccagtctacaggatcacacacacgtcgcgtcactactgggctattcctcacccagcgatgccgctgacctttcttcggtgtgcacaggctacggcaatttatccgatcaaccatatgggacccagagttgccatcctgatacccacctcgcggaaatcttaatgaagaccctcctgaggaacctgggtttttacactgatcaggctttcggagagcttgagaaaaacagcgataaatttttgctgggaacatcctcttccgagaatagccagccggcacacctccacgaactcctgtgttcattgcagaagcagttactggctttctgtcacattaacaacatcagtgagaactccagttctgttgccctccttcacaagcacttacagctgcttctcccccacgccactgatatatacagtagatcagcaaatttgctgaaggaaagtccatggaacgggagtgtgggcgaaaaacttagggatgtcatctacgtaagcgcagctggttctatgttatgtcagatcgtaaactccctactgctactgccagtttccgtggcacgacccttgcttagttacttgctcgatctccttcccccactggattgcttgaaccggctgctaccagcagctgacctgctcgaagaccaagaactccagtggcctttgcatggaggtccggagcttatcgaccctgccggtctgccgctgccccagcccgcacagagttgggtgtggctggtggacctcgaacgaacaatcgctctcctcattggaaggtgcctgggagggatgctccagggctcacctgtgtcgccagaggagcaagacacggcctattggatgaagacccccttgtttagcgacggtgtcgaaatggatacccctcagctagacaagtgcatgtcttgtctgctggaggtggccctcagcggtaatgaggagcagaagccttttgattacaaactcagaccggagatcgccgtgtatgtggatctggcactgggatgttccaaagagcctgctcggagcctgtggattagcatgcaggactatgcagtttccaaggactgggattcagcaacgctatctaacgaatcactactggacacagtgagcagattcgtactcgccgcactacttaagcatacaaatctgctgtcccaagcatgcggtgagtcacgttaccagccaggcaagcatctgagcgaggtctataggtgcgtgtataaagtgagatcacgactactggcatgcaaaaatcttgagctgatccagacccggagctccagtcgcgacagatggatatctgaaaatcaagactccgccgatgtggacccgcaggagcactcatttactcgtacaatcgatgaagaagccgagatggaggagcaagcggagagggacagggaagaaggacatccagaacccgaagacgaagaagaagagagagaacacgaagtcatgaccgctggaaagatctttcagtgctttctgagtgctagagaggtagcgagatccagagatcgggatagaatgaacagtggcgctggcagcggcgcaagggcagatgatccaccgcctcagtcgcagcaagagcggcgagtgtcaacagaccttcccgaagggcaagatgtgtacaccgcagcgtgtaactcagtgatccaccgctgtgcattgttaatcctgggagtttctcctgtgatagatgaactccagaagaggagggaggagggccaactgcagcagccttctacatcagcttcagaaggtggcggtttaatgacccgcagcgagtccctgaccgcggagagccgactggttcacacttcccccaattatcggctgatcaagtctcgaagtgagtctgacctcagccaacccgaaagtgacgaagaagggtacgcgctgtccggcagacgtaatgtagatcttgacctggcagccagtcaccgtaaacgtgggccaatgcattctcagctagagtccctgagtgattcttgggcccgactgaagcacagccgcgactggctttgtaatagtagctatagctttgaatcagactttgaccttactaagtctcttggagtccacaccttgatagagaacgttgtgtctttcgtgagtggcgacgtagggaacgcacccggtttcaaggagccagaggagagcatgagtacttccccacaggcttctatcatcgccatggaacagcagcagcttagagccgaacttcggttggaggcactgcatcagatcttagtcctcctctctggcatggaggagaagggcagcatcagcctagcagggtctcgactgagctcagggtttcagtcaagcacactgctcaccagcgttaggttgcaatttctggccggttgctttgggctgggaaccgtcggccacaccggcggtaagggggagagcggacggctgcaccattaccaggacggaattcgggctgcaaaacgcaatatccagatcgagatacaggtggcggttcataaaatataccagcagctatctgcaaccctcgagagagccctacaggccaacaaacatcacattgaagctcaacagagacttttgttggtgaccgtcttcgccctctcagtacactaccagccagtagatgtgtcgctcgccatttcaactggcctcctcaacgtgctgtcacagttgtgtggtaccgatacaatgttagggcagccgctgcagctgttacccaagacaggagtgtcgcagctttctacagccctgaaggtggcctccaccaggctactgcagattctcgctatcaccacaggcacgtacgccgacaaactctcaccgaaggttgtgcaaagtttgctggacctactgtgctctcagcttaagaaccttctaagtcagacaggcgtccttcacatggcctccttcggtgagggcgagcaggaggacggcgaagaagaggaaaaaaaggtggattcctcaggcgagactgagaaaaaagatttccgagctgcgctccgcaaacagcatgccgctgaactgcacttgggtgacttcctggtgtttctccgccgtgtggtgtctagcaaggcaattcagtcaaagatggcttcccccaaatggacagaagtactgctgaatattgcctcccagaaatgctccagtggcattcccttggtcggcaatctgagaacccgacttcttgctctacatgtgctggaggccgtgttaccagcttgcgagtcaggcgtggaagatgaccagatggcccaaatcgtggaaaggcttttctccttactgtccgactgtatgtgggaaacaccaatagcccaggcgaagcacgcaatacagataaaggagaaggagcaggagatcaaactgcagaaacagggcgagctggaggaggaagacgaaaacctgcctatccaggaagtttcctttgacccggaaaaggcccaatgctgcctcgtggagaacggacagatcctgacccacggcagtgggggaaaaggatatggactggcctctactggcgtaacatcgggatgctatcagtggaagttctacattgtgaaagaaaatcgtggaaacgagggcacctgcgtgggggtgagcaggtggcccgtgcatgatttcaaccatcgtacaaccagtgatatgtggttgtatcgcgcatactccggtaatctctatcataacggagaacaaactttaaccttatcttctttcacacagggagactttatcacctgcgtcctcgatatggaagcaagaactatctcattcggcaagaacggtgaggagcccaaactcgccttcgaggacgtcgatgctgctgaactttacccttgtgtgatgttctacagtagcaacccaggcgagaaggtcaaaatctgcgacatgcagatgcgcggaaccccccgtgaccttctcccgggagatccaatttgcagcccggtggccgcagtgcttgccgaagcgactattcagctgatccggatcctccacagaacggaccggtggacttactgcatcaacaaaaagatgatggaaaggctgcataaaatcaaaatctgcataaaggagtctgggcaaaagctgaagaagtcaaggagcgtgcaaagtcgtgaagaaaacgagatgcgagaagagaaggagtctaaggaggaggagaaaggcaaacacacccggcatggactggccgatttgtccgagctgcagttaaggacactatgcatcgaagtatggcccgttctcgcagttatcggaggcgttgacgccggtctcagagtgggtggcaggtgtgtacacaagcaaacaggccgtcatgccactctgctaggagtagttaaggagggcagcacatccgcgaaagtacagtgggatgaggccgagatcacgattagttttcctaccttctggtcaccgagcgatacccctctgtacaatctggagccctgtgaaccactgccatttgatgtggcacgcttcaggggtctaaccgcttctgtgcttctggatctgacctaccttactggcgttcatgaggatatggggaaacagtcgaccaaaagacacgaaaagaaacaccgtcacgagagcgaggagaaaggcgacgtcgaacagaagcccgaatccgagagcgctttagacatgcggactggacttactagcgacgacgtcaagtctcaatctactacctcctcaaagtccgagaatgaaatagcctcctttagcttggatccaactttgccgagcgttgagtcccagcatcagatcacagaagggaagcgcaaaaatcacgaacatatgtctaagaatcacgatgtggcacagagtgaaattagggccgtgcagttgtcctatctctacctgggagcaatgaagtctctgtccgccttgctggggtgttctaaatatgcggaactcctgctgattcctaaagtgctagcagagaatgggcataactctgactgtgcttcatcccccgtggttcatgaagatgtggagatgcgggctgctctgcagtttttgatgagacacatggttaaacgcgctgtgatgcggagcccaataaagcgcgcattaggcctggccgatttggagagagctcaggcaatgatctataagctcgtcgtgcacggactactcgaggatcaatttgggggaaaaatcaaacaagagatcgatcagcaagcagaggaaagcgatcccgcacaacaagcacagacccctgtgacaacctcgcctagtgctagcagcaccacatcatttatgagtagttccctggaggacaccactactgctacaacacctgttaccgatactgagaccgttcccgctagtgaatcccccggagtgatgcctctgagtctcttaagacagatgttcagcagctatcccactactaccgtgttaccaacccgccgtgctcaaacaccgccaatcagctcactcccgaccagcccatctgacgaagtaggcaggcggcagtccctgacatcacctgatagtcagtctgcaaggccagcaaaccgcacggccctaagcgatccctctagcagactgtccacgagccctcctcctccagccattgcagtgcccttactcgaaatggggttttcattgcggcagatcgccaaagctatggaagccacaggagctaggggagaggccgacgcccagaacattacagtcctggccatgtggatgattgagcacccaggccacgaggacgaggaagagccccagtctgggagtaccgctgattcccggccaggcgcagcagtgttgggatcagggggaaagagcaatgacccgtgctatctgcagtcccctggcgacatcccatcggctgatgctgctgaaatggaggaggggttttctgaaagccccgacaacctggaccatacagagaacgctgccagcgggagcggcccaagcgccaggggcaggtccgcagtgacacggagacataagtttgatctggcagcacgtactctccttgcaagggccgctggcctgtatagatctgtgcaggctcatcggaaccagtctaggcgcgagggtatcagcctgcagcaggatccaggggcactgtacgactttaacttggatgaggagttagaaattgacctggatgatgaggctatggaagccatgttcggccaagatttaacatctgataacgacatcctcgggatgtggattccagaggttctcgactggccaacatggcatgtgtgcgagtcagaggaccgcgaagaggtggttgtctgtgagctgtgcgagtgttcggtggtgagttttaaccagcatatgaagagaaatcatccaggctgtggaaggtcggcaaataggcagggatatcggtctaatggctcttatgtggatggatggtttggcggtgagtgcgggtctggcaacccctattatttactgtgcggtacatgcagggagaagtacctggcgatgaagacgaagtccaagagtacttcctcagaacgatataaaggccaggcgcctgatttgattggcaagcaggatagtgtgtatgaagaggattgggacatgctagatgttgacgaagatgagaaactgacaggagaggaggaatttgagctgttggctggacccctggggttaaacgaccggaggatcgtccctgagcccgtgcagttcccggacagtgacccgttgggggctagcgtcgccatggttactgccacaaactctatggaagaaacactgatgcagattggctgccacggctctgtggagaaaagtagttcagggcgaattacccttggtgagcaggctgctgcactggcaaatccgcacgacagagtagtggcactgcggagggtaacagcagctgctcaagtgctcctcgctcggaccatggttatgcgggcactgagccttctttcagtctccgggtctagctgctcgctcgcagccggtctggagtctctcggcttaacagacataagaaccctggtgcgcttgatgtgtcttgcagctgctggtagggccggattgagtacgtctccatcagcaatggccagtacatctgagagatcccggggaggtcatagcaaagctaacaagccaatcagctgcctcgcatatttgtccactgcagtgggatgtctggcctcaaatgcgccatccgctgcgaagcttttagtgcagctgtgcacgcaaaatctaatatctgccgctacaggcgtgaatctgaccacagtcgatgattctatacagaggaagttcctgccatcttttttgaggggcatcgcagaggagaataagttagtaacaagcccaaacttcgtggttacccaggccctggtagccttgctggcggacaagggtgctaaactccgaccaaattacgacaagtctgaggtcgagaaaaaggggcctctggaactggctaatgcgctggcagcttgttgcctgtcgtctagattaagttcccagcacaggcagtgggctgctcagcagctcgtaagaacactggccgcacatgatagagataatcagactaccctgcagaccctcgcagacatgggcggtgacctgcggaaatgctcttttattaagctcgaggcacaccagaacagggtgatgacctgcgtatggtgcaataagaaagggcttctggctacaagcggtaacgacggtacaatcagagtgtggaacgttaccaagaaacagtactccctgcagcaaacctgcgtctttaaccggctggaaggagatgccgaagagagccttggatcgcctagtgacccatccttcagtccggtgtcctggtctatcagcgggaaatatttggctggagccctggaaaaaatggtaaatatctggcaggtaaacgggggtaagggactggtggatattcagccacattgggtttcagcactggcgtggccagaggaaggtcccgcaactgcgtggagtggcgagtcccctgaattactgctcgtgggccgaatggacggttctctgggccttattgaagtggtggatgtgtccacgatgcaccgcagggagttagaacactgctatcggaaggacgttagcgtgacctgcatcgcttggttctctgaagatcgaccttttgctgtcggttacttcgatggtaagctcttactgggcacaaaagagccactggagaaagggggaatcgtgctcattgatgcgcataaagacaccctgatctcaatgaaatgggacccgacaggccacattctgatgacctgcgcaaaggaagacagtgtcaaactttgggggtccatctccggctgctggtgttgtctacactcgctgtgccatcccagcattgtcaatgggatagcctggtgccgcctgcccggaaagggctctaaactgcagttgctgatggcaaccgggtgtcagtccgggctggtatgtgtttggcgaatccctcaggataccactcagacaaacgtcacctccgccgagggctggtgggagcaggagtccaattgtcaggacggatacagaaagtcaagcggggcaaaatgtgtgtatcagctgcgcggtcatatcacaccagtcagaaccgtagctttcagtagcgacggcttggctctggtttctgggggattaggaggtttgatgaatatatggtctttgcgcgatgggtccgtcctgcagacagttgtgatcggcagcggcgcaattcaaacaacagtttggatacctgaagtgggtgtggcagcgtgctctaaccgatcaaaagatgtgctggtggtgaattgcaccgcagagtgggccgctgctaaccacgttctggccacctgccgaacagccctgaagcagcaaggggtcctggggctcaacatggccccttgtatgagagcttttttggagcgactcccgatgatgttgcaggaacagtacgcatacgagaaaccccatgtggtatgcggtgatcaattagtgcacagtccctatatgcagtgccttgcctctctcgccgtagggctgcacctggaccagttgttatgcaacccccctgtgccccctcaccaccaaaactgcctgcccgatcccgctagttggaaccctaatgaatgggcttggttggagtgtttctcaactactattaaagcggctgaagcgctcactaacggggcacagttcccagagtctttcactgttcctgaccttgagcccgtgcccgaagacgaactggtatttctcatggacaattccaagtggattaacggaatggacgagcagattatgagctgggccactagccggcctgaagattggcacctggggggtaagtgcgacgtgtacttgtggggtgccggaagacacggccagctcgccgaagctgggagaaatgttatggtgcccgctgcagccccaagtttttctcaggcacagcaggtgatctgtgggcagaattgcacctttgtgatccaggctaacggaacagttttagcctgcggggaaggctcttacggccgactgggacaaggcaactctgacgacctccacgtgttgaccgttatatccgccctccaagggtttgtagttacgcagctggtgacatcctgtgggtcagacggacacagcatggcgctgacggaaagcggcgaagtgttctcctggggagatggagattacggcaagctaggccatggcaacagcgatcggcagaggcgcccacgccagattgaggccctgcagggagaagaggtagtgcagatgtcttgtggtttcaaacatagcgccgtggtcaccagtgacgggaaattgtttacttttggcaacggtgattacggcagactgggcctgggaaacactagcaacaagaagctgccggagcgcgtcactgctctagaaggctaccagatagggcaggtcgcctgcggcctgaatcatacactggccgtgtctgcagacgggtcaatggtgtgggccttcggagatggcgactacggaaaacttggcctggggaactcaactgccaagagttcccctcaaaagatcgacgtcctgtgcggaataggcattaaaaaagtcgcttgtggaactcaattctccgtggccctgaccaaagatggacatgtgtatacctttgggcaggaccgcctcatcggtctgccggaaggtcgggctcgtaaccacaacagaccccagcaaattcctgtgctggctggggttattattgaggatgtggctgttggagctgaacacacacttgccctcgcgtctaacggagacgtgtacgcctggggcagcaatagcgagggtcagctcggtttaggtcacacaaatcatgtccgagagcccactctcgttacgggcctgcaaggcaagaatgtgaggcagatttccgctggcaggtgccacagtgcggcttggaccgcccctcccgttccacccagagccccaggagttagcgtaccgctgcagttagggttaccagatactgtgcctcctcaatacggtgccctgagggaggtgtcaatccatacagtgcgggctcgcttaagactgctctaccatttcagcgacctcatgtactcgagttggcgtctgctgaacctgtccccaaacaatcagaatagtacgtctcattacaatgctgggacctggggtatcgtccagggccagctccgcccattacttgccccacgtgtttataccctgcctatggtgcgttccatcggaaagactatggtgcagggaaagaactatgggcctcaaatcaccgtaaaaaggatatccactcggggtcgcaagtgtaagcctattttcgtgcagattgctaggcaggttgtgaaattaaatgcttcggacctcagactgccttctagggcttggaaggttaagcttgtcggcgagggggctgacgatgccggaggagtgtttgacgacacaattactgaaatgtgtcaggaactggagaccggtatagtggatttgctgatccctagtcccaatgccaccgctgaggtcggttacaatcgcgaccgctttctattcaatccaagtgcatgtctcgatgaacacctcatgcaattcaaatttctcgggatcttaatgggcgtggccatccgcacaaagaagccattagatctgcaccttgcaccactcgtgtggaagcagctatgttgtgtgccactcaccctcgaagatctggaagaggtggacctgctctacgttcagacactgaactctattttacacatcgaagattctgggattactgaggagtcctttcacgagatgattccgttggatagttttgtggggcaatctgcggacggcaaaatggtgccgataatacccggtgggaactccatccctctaacttttagcaataggaaggagtatgtagagcgggcaattgaataccgcctgcatgagatggatcgacaggtagccgcagtgcgggaagggatgagttggatcgtgcctgtgccattgctgtcactgctgacagctaagcagctggagcaaatggtctgcggaatgccggagattagtgtggaggtactgaagaaagtggtgagatatagagaggtcgacgaacagcaccagctggtgcaatggttctggcacacgctggaggaattttctaacgaggaaagggtgctgttcatgaggttcgtgagcggcagatcccgcctccccgcaaataccgccgatatctcgcagcgattccagatcatgaaggtggaccggccatatgactcccttccaacaagccaaacttgctttttccagctgagactacctccatactctagccagcttgtgatggcagaaagactccgatatgcgatcaataattgcaggagcatcgacatggacaactacatgttgtcgagaaacgttgataatgccgagggctccgacaccgactactat

SEQ ID NO: 142122 - DNA, 15137 bp, Artificial Sequence
  derived and/or modified sequence
cctctgcggagccgggctcgggtcgccggagccgcgccccaccccgccagctccagagccacgactaatggctgaaggataaatcaacatggcaactatgattccaccagtgaagctgaaatggcttgaacacttgaacagctcctggattacagaggacagtgaatctattgctacaagagagggagttgctgttctgtattctaaactggttagcaataaggaagtagtacctttgccccaacaagttttatgcctcaaaggaccacagttgccagactttgaacgtgagtctctttcaagtgatgagcaggaccactatttggatgcccttcttagcagccagctagcattggcaaagatggtatgttcagattccccatttgccggggcacttagaaaacgactgcttgtactccagcgtgtcttttatgcactttctaataaataccatgacaaaggcaaggtgaagcagcagcagcattctccggagagcagttctggttcagcagatgtccattctgttagtgaacgcccccggtcaagcactgatgcacttatagaaatgggtgttcgaactggtctaagtttattatttgcgcttctaagacaaagttggatgatgcctgtgtcaggacctggtctcagtctttgcaacgatgtcattcatactgcaattgaagttgtgagctctttgccaccattatcattagcaaatgaaagcaagattcctcctatgggcttggactgcttatcgcaagtaacaacatttcttaaaggagtcactattcctaattctggggcagacactttaggtcgtagattagcttctgagttgctgcttggtttggcagctcaacgaggctcattgcgatatcttcttgaatggatagaaatggctttgggggcttcggcagttgtacacaccatggagaaaggcaaactactctcaagccaggaaggaatgatcagctttgactgctttatgaccatattaatgcagatgaggcgttctttgggttcatctgctgatcggagtcagtggagagaaccaaccagaacatcggatggcttgtgctccctttacgaggcagcattatgtctctttgaagaggtttgcagaatggcttctgattattcgagaacatgtgctagcccagatagcattcagactggtgatgctcccattgtctccgaaacctgtgaggtttatgtttgggggagcaatagcagccatcagttggtagaaggtacacaggagaaaatactgcaacccaaactggctcctagtttctctgatgcacagaccattgaagctggacagtactgcacttttgtcatttctacggatggctctgttagagcttgcgggaaaggcagctatgggagactgggccttggagactccaataatcagtcaactttaaaaaagttaacattcgagcctcacagatccattaaaaaggtttcatcttctaaaggatctgatggtcacactttagcctttacgacagaaggagaagtcttcagttggggagatggtgattatgggaaactggggcatggaaatagttcaacacagaaatatcccaagcttattcagggacctctacaaggaaaggtagttgtttgtgtgtcagctggatacagacatagtgctgctgtcacagaggatggggaattatacacatggggtgaaggagactttggaagattaggtcatggtgacagcaatagtcgtaacattccaacattagtaaaagacatcagcaatgtaggagaggtttcttgtggcagttcacatactattgctctgtctaaagatgggagaactgtatggtcttttggaggaggagacaatggtaaacttggtcatggtgataccaacagagtgtataaacctaaagttattgaagctttacaaggaatgttcattcgcaaagtttgtgctgggagccagtcttcacttgctttgacatcaacagggcaggtctatgcttggggctgtggagcttgtctaggttgtggttcttcagaagctactgctttgagacccaagcttattgaagaactggctgccacaagaatagttgatgtttctattggagacagtcattgtttggctctttctcatgataatgaagtttatgcctggggcaataactcaatggggcaatgtggtcagggaaattccacaggtcctattactaaaccaaagaaagtgagtggcttagatggcatagctattcagcagatttcggctggaacatcacatagtctggcatggactgctcttcctagggacagacaagttgttgcatggcaccgaccttattgtgtagatcttgaagagagtaccttctcacacctgcgttcttttcttgagagatactgtgataaaataaacagtgagattcccccactccctttcccttcatcaagagaacaccacagttttctcaagctgtgcctgaagctactttcaaatcaccttgctcttgcacttgcgggaggggtagctaccagcattctcgggaggcaggcaggtccacttcgaaatttgctcttcagactgatggactcaactgtcccagatgaaatccaagaggtggtaattgaaactttatcagtgggagcaaccatgctgttacctccattacgagaacggatggaattacttcattctcttttacctcaaggacctgatagatgggaaagcttatctaaaggacagagaatgcaactggatatcatcctgacaagtttgcaagatcatacccacgtagcctccctacttggctatagttcaccctctgatgctgctgacctatcttctgtgtgtactggctacggaaatctgtcagatcaaccttacggcactcagagctgccatccagatacccacctggctgaaattttgatgaagaccctcttaagaaatttaggattttatacagatcaagcatttggagagctagaaaagaatagtgataaatttctacttggaacatcatcatcagaaaacagtcagcctgctcatcttcatgaactgctatgttcactacagaaacagctgctggcattttgccatatcaataacattagtgagaactcaagcagtgtggcattgcttcataaacatcttcagcttttgttgcctcatgccacagatatttattcacgttctgcaaatttgctcaaagaaagtccttggaatggcagtgttggagaaaaattaagagatgtgatatacgtctcagctgctggcagtatgctctgccagattgttaactccctgctgttactccctgtgtcagtggctcggcctttattgagttacctcctcgacttgttgccacctcttgattgccttaatagactcctgccagctgctgatcttttagaagaccaggagttacagtggcctcttcatggagggccagaactaattgatcctgctggtctgccattacctcagccagctcagtcctgggtatggcttgtggatctagaaagaacaattgctctccttattgggcggtgtcttggtggcatgcttcagggctcccctgtgtctccagaggaacaggacactgcatattggatgaaaacgccactgttcagtgacggtgtagaaatggacactcctcaattggataaatgtatgagttgcctgttagaagtagcactttctggaaatgaagaacagaagccttttgattataaattgcggcctgaaattgctgtctatgtagacttggcattgggttgttctaaagagcctgcccgaagcctttggatcagcatgcaggactatgctgttagtaaagattgggacagtgcaactttaagtaatgagtcactcttggacactgtgtctagatttgttcttgcagctcttctgaaacacacaaatttacttagtcaagcatgtggagaaagccgatatcaacctggtaaacacttatcagaagtgtaccgttgtgtatacaaagttcgaagtcgtttacttgcttgcaagaaccttgaacttattcaaacaaggtcatcatcacgggacagatggatatcagaaaaccaggactctgcagatgttgatcctcaggagcattcatttactcgaactattgatgaagaagctgaaatggaagaacaggctgagagagaccgggaagaggggcatccggagccagaggatgaagaggaggaacgggaacatgaagtgatgacagctggcaaaatctttcagtgtttcctctcagcccgtgaagtagctcgtagccgagaccgagatagaatgaacagtggggcagggtctggggctcgagctgatgatccacctcctcagtctcagcaagagcgaagggtcagcacagaccttcctgagggtcaggatgtgtacactgctgcatgcaactccgtgatccatcggtgtgccctgttaatattaggagtaagtcctgtgatagatgagcttcagaagcgaagagaagaaggacagttgcagcaaccttcaacaagtgcctctgaagggggtggacttatgaccaggagtgaaagtcttactgcagagagccggctagtccacacaagcccaaattatagactgatcaaatcgaggagtgaatctgatttgtctcagcctgaatcagatgaagagggttacgcactgagtggcagacgaaatgttgatttggatttggcagcatctcacagaaagagaggtcctatgcacagtcaattggaatccctgagtgactcttgggctcgcctgaaacatagcagagactggttatgcaactcctcctattcctttgagtcagattttgatcttaccaagtctttgggagttcacactttgattgaaaatgttgtaagctttgtgagtggagatgtggggaatgccccaggttttaaagagccagaggaaagtatgtctacaagtccccaggcctccatcattgcaatggaacagcagcagttaagggcagaacttcgtttagaggcacttcatcagatcctcgttctattgtctgggatggaagaaaaaggtagcatctcactggcaggaagcagattgagttcaggcttccagtcctccacactactcacgtctgtgaggctgcagttcctagcagggtgttttggtttaggcactgttggacacacaggaggcaagggagagagtggccgattgcatcactatcaggatgggatcagagcagctaagagaaatattcagattgaaatccaggtagctgtgcataaaatttatcaacagttgtctgctaccctggaaagagccctgcaagcaaacaagcatcacattgaagcccagcaacgtctgcttctggttacagtttttgccctaagtgttcattatcaaccagtagatgtttctttggcaatttccactggtctgctaaacgtattgtcacagttgtgtggtacagacaccatgctaggacagcccctgcagttgttgccaaagacgggtgtttcccagcttagcacagctttgaaagtggccagtacaaggttgctccagattctagccatcactactgggacctatgctgataaactgagtcccaaagtagttcaatccttgttggatctactctgtagtcagttgaagaatttattgtcccaaactggtgtactacatatggcctctttcggagaaggggagcaagaagacggtgaagaagaagaaaaaaaagttgactccagtggagaaactgagaagaaagatttcagagctgctcttaggaaacaacatgcagccgaactccatctaggggattttttagtttttcttcgcagagttgtatcttcaaaagcaattcaatcaaaaatggcttccccaaagtggaccgaagtgcttctaaatatagcatctcagaaatgttcttcaggtatccctctggttggtaacttaagaacaaggctccttgcacttcatgtccttgaagctgtgctgccagcttgtgaatctggtgtagaagatgatcaaatggcccagattgttgagcgcttattttcccttctctctgattgtatgtgggagacacccattgctcaggccaaacatgctattcagataaaggaaaaagaacaagaaataaaactacagaagcagggcgagttggaagaagaagatgagaatcttcctatccaagaagtatcctttgacccggagaaagctcagtgttgcctagtggagaatggacagattttaactcacggcagtggagggaaaggatatggattggcatctacaggagtaacttctgggtgctatcagtggaagttttatattgtgaaggaaaacagaggtaatgaaggcacgtgtgttggagtttctcgctggccagtacatgactttaatcaccgcactacctcggatatgtggctctatagggcctacagtggtaacctctatcacaatggagaacagactctcacattgtccagctttactcaaggagatttcattacctgtgtgttagacatggaagccaggaccatttcttttgggaaaaatggagaggaacccaaattagcttttgaagatgtggatgcagcagagttgtacccatgtgtgatgttctatagtagcaatccaggggaaaaggtgaaaatttgtgatatgcagatgcgtggcacaccccgagacttacttccaggagaccctatttgtagtccagtagcagcagtgctggctgaggccactattcagctcatccgtatccttcaccgaacagaccgttggacttactgcattaacaaaaaaatgatggaaaggcttcacaaaattaagatatgtattaaagagtcaggtcagaagctaaagaaaagccgctcggttcagagccgagaggaaaatgaaatgagagaggagaaggagagcaaagaggaagagaaaggtaaacatactaggcatggcctcgctgacctctcagagctgcagctgaggactctttgcatagaggtgtggcccgtgctggctgtgataggaggagttgatgctggtcttagagttggaggtcggtgtgttcacaagcaaactgggcgccatgccacgctgctgggagtggtcaaagagggcagcacgtctgccaaggtccaatgggatgaagcagaaattactatcagcttcccaactttttggtcgcctagtgatactccattgtataatctggaaccctgtgaaccattgccgtttgatgtggcgcgattccgaggcctgacggcttctgtgctgctggacctaacatatctcactggcgttcatgaagacatgggcaaacagagcaccaaacgacatgaaaagaaacaccgacatgaatccgaggagaaaggggatgttgagcagaaacctgagagtgaatccgctttagatatgcgaacaggcctaacatctgatgacgtcaaaagtcagagtaccacaagctccaaatcagaaaatgaaatcgcttcattttctttagatccaacactgccaagtgtggaatcccaacatcaaataacagaagggaaaagaaaaaatcatgaacacatgtccaaaaaccatgatgtagcccagtcagaaatcagagcagtccagctgtcctatctttacctcggtgctatgaagtcacttagtgcccttcttggctgtagtaaatatgctgagctgttgctgataccaaaagttctggctgaaaatggccacaactcagactgtgcaagttctccagttgttcatgaagacgtggagatgcgagcagccctgcagttcttgatgcgacacatggtgaagcgagcagtcatgcggtcacccataaagagagcattgggattagctgatctggaacgagcgcaagccatgatctataaattagtggttcatgggcttttggaagaccagtttgggggcaaaattaagcaagagattgatcaacaagctgaagaaagtgaccctgcccagcaggcacagacaccagttactactagcccatcagcctcaagcacgacctcctttatgagcagctctctggaggacaccacaactgccaccactccagtcactgacacagaaacagtgcctgcatccgagtccccgggagtgatgcctcttagtcttctcaggcaaatgttctctagttacccaactaccactgtacttcccacacgtcgggcacagactcctccaatatcttcgttaccaacctctccttctgatgaagtaggaaggaggcaaagtttaacttctcctgattcccagtcagcaaggccagctaaccgcacagccttgtcagacccaagcagtagactttcaacttctcctcctcctccagcaattgcagttcccttgctggaaatggggttctctcttcggcagattgccaaagccatggaagctacaggtgctaggggagaggctgatgcccagaatatcactgtccttgccatgtggatgatagagcaccctgggcatgaggatgaagaggagccccagtcgggcagcacagcagactctaggcctggagcagccgttctaggcagtggcgggaagtcaaatgatccctgttatttgcagtcacctggagacataccatcagctgatgctgctgaaatggaggaaggttttagtgaaagccctgataatttggatcatacagagaatgcagcttctggaagtggaccatcagctagaggtcgctcagcggtaacaagaagacacaagtttgacttagctgctcgcacactgctagcaagagcagcgggattataccgctctgtgcaggcccacaggaatcaaagtcggagagaaggaatatctttgcagcaagacccaggggcgttgtatgactttaatttagatgaggaattggaaattgatcttgatgatgaggcgatggaagctatgtttggacaagacctgaccagtgacaatgatattctgggaatgtggatcccagaggtactggattggcctacctggcatgtttgtgagtctgaagacagggaagaagtggtggtgtgtgaactgtgtgaatgcagcgtcgtcagcttcaatcagcacatgaagagaaaccatccaggctgtgggcgcagtgcaaaccgccagggctatcgcagcaatggttcctatgtggatggctggtttggcggtgaatgtgggagtggaaatccgtactacctgttatgtggcacctgcagggagaagtacttagccatgaagaccaaatctaagtcaacaagttctgaaaggtacaagggacaagctccagatctaattggcaagcaagacagtgtgtatgaagaagactgggacatgttggatgttgatgaagatgaaaagctaactggtgaagaagaatttgaattacttgctggaccgcttggtttaaatgaccggcgcattgtaccagaaccagttcagttccctgacagcgatccactgggagcatcagtagcaatggtcacagccaccaacagtatggaagagactctgatgcaaataggttgccatggctccgtagaaaagagctcctctgggagaataacgttaggagagcaggcagctgccctagcaaaccctcatgaccgtgtggtggctttaaggagagtgactgctgctgctcaggttcttctggccagaaccatggtcatgagagcgctgtctcttctctcagtcagtggttccagttgtagcctggctgctggtcttgagtctctggggctaacagatatccgaacgctagttcgattaatgtgcttggcagcagcagggagagctggcctctccaccagcccttctgccatggctagcacctcagaacgatcacgaggtgggcatagcaaggctaacaagcctatctcttgcctggcctatttgagcacagcagtgggatgtctggcatcaaatgctcctagtgctgccaaactgcttgtacagttgtgtacacagaacttgatttctgctgcaacaggtgtaaatctaaccacagttgatgactcaattcagcgaaagtttctacccagctttctccgaggaattgctgaagagaacaagcttgtgacctccccaaactttgttgtaacacaggcccttgtggcattgctagcagacaaaggggccaaactaagacctaactatgataagtcagaagttgaaaagaaaggccctctggagttggctaatgccctggcagcctgctgcctctcctccaggctgtcctcacagcatcggcaatgggcagctcagcaactcgtgcgcactcttgctgcacacgaccgtgacaaccaaactactctgcagacacttgctgatatgggaggagatcttagaaaatgctcctttatcaaattggaggctcatcagaacagagtaatgacatgtgtttggtgtaataaaaaaggtcttttggctacaagtggcaatgatggcaccatccgcgtatggaatgttaccaagaagcaatattcactgcaacagacctgtgtgttcaacagattggaaggggatgctgaggaaagcctgggatcacccagtgatccaagtttctcaccagtttcctggagtatcagtggcaaatatctagcaggcgctttggaaaagatggtgaatatctggcaagttaatggaggaaaaggattagtagatattcagcctcattgggtatctgccctggcttggccagaagagggtccggctacagcctggtcaggagagtctccagaattgttgttggtgggacggatggatggatctctgggactgattgaagttgttgatgtgtccaccatgcaccgtcgagaattggagcattgctatcgaaaggatgtgtctgttacttgcattgcatggttcagtgaagacagaccatttgcagtgggatattttgatggaaaactgttactgggaacaaaggaaccacttgagaaaggaggcattgttctaattgatgcacataaggatactcttattagcatgaagtgggaccctacaggtcatattcttatgacatgtgccaaagaagacagtgtgaaactctggggctctatttcgggatgctggtgctgtctacattcactctgccatccatctattgtaaatggcattgcttggtgccgccttccagggaaaggatccaagttgcagttactgatggctactggctgtcagagtggcttagtatgtgtttggcgcattcctcaagatactacacagaccaatgtgactagtgcagaaggatggtgggagcaggaatcaaattgccaggatggatataggaaatcatcaggagccaagtgtgtttatcagctgcggggacacatcactcctgttcggactgttgcctttagttctgatgggttggccctggtgtctggtggactaggtgggctcatgaacatttggtctttaagggatggctctgtcttgcaaactgttgtgataggctctggagctattcagaccacagtatggattccagaagttggagtagctgcttgctcaaatagatcaaaggatgttttggtcgtgaattgtacagcagaatgggcagctgccaatcatgttttggcaacctgtaggacagcattgaaacagcagggtgttctgggattgaacatggctccctgcatgagagcatttttggagcggctccccatgatgcttcaggagcagtatgcctatgaaaagcctcatgtggtttgtggtgaccaacttgttcatagcccctatatgcaatgcttggcttcccttgctgtgggacttcatctggatcagctgttgtgtaaccctccagtgccaccacaccaccagaactgtctccctgaccctgcatcctggaatccaaatgaatgggcctggttagaatgtttctcaaccactataaaagctgccgaagccctgaccaatggagcccagtttccagaatcttttaccgttccagatctagaacctgttccagaggatgaacttgtatttctaatggataacagtaaatggattaacggcatggatgaacaaattatgtcttgggcaacttccagacctgaggactggcacctgggaggtaaatgtgatgtctacttatggggtgctggtaggcatggacagctggcagaagctggaagaaatgtaatggtacctgcagcagctccctcattctcacaggcccaacaggtcatttgtggtcagaattgtacctttgtcatccaggccaatggcacagtgttggcttgtggggaaggaagttatggcagattaggacaaggaaattcagatgaccttcatgtgctgacagttatttcagccttacaaggctttgtggtgacccagctggtgacttcctgtggttctgatgggcactctatggccctaactgaaagtggtgaggtctttagctggggagatggtgactatggtaaacttggccatgggaacagcgacaggcagcggcggcccaggcagatcgaggccttacaaggagaagaagtggtgcagatgtcttgtggcttcaagcactcagcagtggtcacttcagatggcaaactgttcacctttgggaatggtgactatggtcgtctgggtcttggaaatacctctaacaaaaaacttccagagagagtgactgcactggagggatatcagattggacaggtggcctgtggattaaaccacactttggcagtgtcagcagatggttccatggtgtgggcttttggagatggagactatggaaaactaggcttaggaaattccactgcaaaatcttcacctcagaaaattgacgtcctttgtggaattggaataaaaaaggttgcttgtggaactcagttttctgttgctttgaccaaagatggtcatgtgtatacctttggtcaagatcgcctgataggcttgccagaggggcgtgctcgcaatcacaatcgaccgcaacaaatccctgtcctggctggagtaatcatagaagatgtggcagttggagctgaacacacacttgctttggcatcaaatggagatgtgtatgcctgggggagcaattcagaagggcagctcggcttaggccataccaaccatgttcgagaaccaaccctggtaacaggtctgcaagggaaaaatgttcggcagatctcggctggccgctgccacagtgctgcatggacagcaccacctgtcccaccaagagcaccaggtgtgtcagtacctctgcagctgggcctgcctgacacagtgcccccccagtatggggcgctgagagaagtcagcattcacacggtgcgggccaggctccggctgctctaccacttctctgacctcatgtactcatcctggagactgctgaaccttagccccaacaaccagaacagcacatcccattataatgctggaacttggggcattgtacagggacaacttcggcctttgttagccccaagagtctacactctgccaatggtgcgctccataggaaaaaccatggttcaaggcaaaaactatggacctcagataactgtaaagaggatatcaaccagaggacggaagtgtaagcctatttttgtccaaatagcgagacaagtagttaagctgaatgcttcagacctccgcctgccttcccgagcgtggaaggttaagctggttggagaaggggctgatgatgctggaggagtgtttgatgacaccatcacagagatgtgccaggaacttgaaactggtattgttgaccttcttataccctctcccaatgccaccgcagaagtgggttacaatagggacaggttcctttttaacccttctgcctgcctcgatgaacacttaatgcagtttaagtttttaggaattttaatgggggttgccattcgcacaaagaagcctctggacctccacttggcccctctggtgtggaagcagctgtgctgtgtcccactcaccctagaggacctggaggaggtggatctgctctacgtgcagactctcaacagcattcttcacattgaagacagtgggattaccgaggagagtttccatgagatgattcctcttgattcttttgttggccagagtgctgatggcaaaatggttcctataatccctggtggaaatagtatcccactcacattttccaacaggaaggaatatgtggagagggccattgaatatcgacttcatgagatggacagacaggtggctgcagtccgagaagggatgtcctggattgttcctgtgccgctgctgtccctcctcacagcaaaacaactggagcagatggtgtgtgggatgcccgagatctctgtggaagtcttgaagaaagtggtgcggtaccgtgaggtggatgagcagcatcagctggtgcagtggttctggcacacgctggaagagttctccaatgaggagcgggtgcttttcatgaggtttgtgtcaggaagatctcgactaccagccaacactgctgacatttctcagagatttcaaatcatgaaggttgataggccttacgacagtctgcctacctcacagacctgcttcttccagctgaggctgcccccgtactccagccagctggtcatggccgagcgcctgcgctatgccatcaacaactgccgctcaatcgacatggacaactacatgctctcgagaaacgtggacaacgccgagggctccgacactgactactgaccgtgcgggtgctctcaccctcccttctctccctcaataatgctcacttctgatttgatgttgatatacttttatggtaactacatagatgttataagaacataaaccaacattataaacaatggccacatttagttactctaaatgtaacaaagaaattagatgtttttatttttctgtgattgtacaaaaacaacaaaaacgaagtgctctcagtcaggtttttccctccatatttttggtcacttttgataagtttgcatgaaaccattttggtgcatttttagttgggaatggtacatttttgtaaatccacccagtgaacatgaaattgtacattgtgtataattgttcattagaaaggacagttttacatgaatattcatatatttattttgttttaatttgaattgcctgttcagggttccttatgcagagaaataaagcagattcaggaattgga

SEQ ID NO: 142123 - protein, 254 aa, Artificial Sequence
  derived and/or modified sequence
PALPSTLPHRPAPSTRPGPCPRCLPSRMGPCSGSRLGPPEAESPSQPPKRRKKRYLRHDKPPYTYLAMIALVIQAAPSRRLKLAQIIRQVQAVFPFFREDYEGWKDSIRHNLSSNRCFRKVPKDPAKPQAKGNFWAVDVSLIPAEALRLQNTALCRRWQNGGARGAFAKDLGPYVLHGRPYRPPSPPPPPSEGFSIKSLLGGSGEGAPWPGLAPQSSPVPAGTGNSGEEAVPTPPPPSGGSCPPPTCLSTLPMW

SEQ ID NO: 142124 - protein, 365 aa, Artificial Sequence
  derived and/or modified sequence
MGPCSGSRLGPPEAESPSQPPKRRKKRYLRHDKPPYTYLAMIALVIQAAPSRRLKLAQIIRQVQAVFPFFREDYEGWKDSIRHNLSSNRCFRKVPKDPAKPQAKGNFWAVDVSLIPAEALRLQNTALCRRWQNGGARGAFAKDLGPYVLHGRPYRPPSPPPPPSEGFSIKSLLGGSGEGAPWPGLAPQSSPVPAGTGNSGEEAVPTPPLPSSERPLWPLCPLPGPTRVEGETVQGGAIGPSTLSPEPRAWPLHLLQGTAVPGGRSSGGHRASLWGQLPTSYLPIYTPNVVMPLAPPPTSCPQCPSTSPAYWGVAPETRGPPGLLCDLDALFQGVPPNKSIYDVWVSHPRDLAAPGPGWLLSWCSL

SEQ ID NO: 142125 - DNA, 2193 bp, Artificial Sequence
  derived and/or modified sequence
gttgagtcaatgtgtccccctcttgttcctagggtgcgggcttcatggccttctcctccaggaagctccacctgatcatgtcctgggtggatatccagcccccatagttcagggcctactagcagctgctagatcttgaactccaggagcgccccacgccttgggagcttggcatgggctaaatactcccccatttgttaaatggggtcctgaaacctgaccagggaagacgggataaagtagccatgggtcatcgcagcccctttgaagccgggcctggccacccaaaggcaactcaggggtggagactgaggcctcaggagaagcccccactagaatgctctctgcccctcccttccagattaaccaaaacctgctaattgtggaagccctcggcatgctcccctcccccacagcctcttcctcccttccctcccctcccccttccatccgaatgataaaggccccagcccgcctgccccagcccggcctcaggtcccggccctgccttctacactgccccaccgccctgcaccctccacccggccaggcccctgcccacgctgtctaccgtcccgcatggggccctgcagcggctcccgcctggggcccccagaggcagagtcgccctcccagccccctaagaggaggaagaagaggtacctgcgacatgacaagcccccctacacctacttggccatgatcgccttggtgattcaggccgctccctcccgcagactgaagctggcccagatcatccgtcaggtccaggccgtgttccccttcttcagggaagactacgagggctggaaagactccattcgccacaacctttcctccaaccgatgcttccgcaaggtgcccaaggaccctgcaaagccccaggccaagggcaacttctgggcggtcgacgtgagcctgatcccagctgaggcgctccggctgcagaacaccgccctgtgccggcgctggcagaacggaggtgcgcgtggagccttcgccaaggacctgggcccctacgtgctgcacggccggccataccggccgcccagtcccccgccaccacccagtgagggcttcagcatcaagtccctgctaggagggtccggggagggggcaccctggccggggctagctccacagagcagcccagttcctgcaggcacagggaacagtggggaggaggcggtgcccaccccaccccttccctcttctgagaggcctctgtggcccctctgcccccttcctggccccacgagagtggagggggagactgtgcaggggggagccatcgggccctcaaccctctccccagagcctagggcctggcctctccacttactgcagggcaccgcagttcctgggggacggtccagcgggggacacagggcctccctctgggggcagctgcccacctcctacttgcctatctacactcccaatgtggtaatgcccttggcaccaccacccacctcctgtccccagtgtccgtcaaccagccctgcctactggggggtggcccctgaaacccgagggcccccagggctgctctgcgatctagacgccctcttccaaggggtgccacccaacaaaagcatctacgacgtttgggtcagccaccctcgggacctggcggcccctggcccaggctggctgctctcctggtgcagcctgtgaggctcttaagacaggggccactcctccctcccgctcccacccccaccttgttgacagggagccaaggcgaggcggctgtctgcgaccacagcagcctcgaaacaccaggcagcagccttgctgggagtccacggtgtttattgggccaccccacgcatggccgtggcccagctgggcacaaccctcaccctggtctgtcatgcctgtttttcctacactcagcggcaaagctgcaggagcagggctgagcctggaatagcccttcctagtcccctcttctcagcccactacccatccatcagtcaccagccgtcacctcccctcccgtgctccaggctgggggagggagagcccagtggtggatccagcctgaagtcctgccctctctcatctgtctggaaaggaggtagcacctttttcgggaaacgggttagggagtaaagactgcaccctacatggtcctggtggtgggggggataacagtaaaggaatttgcaacgttttaaaaaaaaaaaa

SEQ ID NO: 142126 - DNA, 765 bp, Artificial Sequence
  derived and/or modified sequence
cccgccctgcctagtaccctgccccatcggcctgccccaagcacaaggccaggcccgtgtccccggtgtttgccttcgagaatgggtccttgcagcgggagtagacttggcccaccagaggccgagagcccaagccagccacccaagaggcggaagaagcgttacctgcgccatgataagcccccctatacctacctggccatgattgctctcgttatccaagcagcaccttcaagaaggctgaaactggcccagattatccgccaagtccaggcggtatttcccttcttccgagaagactatgaggggtggaaggacagcattagacataacctgagtagcaataggtgcttccgtaaggtgccaaaagaccctgccaaaccgcaggctaagggaaatttctgggcggtcgacgttagcctgatccctgccgaggccctgcggctccagaacacagcgctgtgtcgacggtggcaaaacggcggagctcgcggggcttttgcaaaggacctgggcccttacgtgttgcacggacgcccctatcgtcctccctcaccaccgcccccaccctcagaaggcttttcaatcaagtcactactgggcggctccggggagggcgccccctggccaggcctggccccacagtctagccctgttcctgccggcactggaaattctggagaagaggctgtcccaactcctccccctccaagtggcgggagctgtcctccccctacctgtctgagcactctgcctatgtggtag

SEQ ID NO: 142127 - DNA, 1098 bp, Artificial Sequence
  derived and/or modified sequence
atgggtccgtgttccggatctcgtctgggccctcccgaggcagaatctcccagtcagccgcctaagaggaggaagaaaagatacttgcggcacgataagccgccttatacctatcttgcaatgattgctctggtgatccaggccgctccgtcaaggcgacttaagctcgcacaaataatccggcaggtccaggcagtcttccctttttttcgggaagattatgaggggtggaaagactctattaggcataacctgagcagcaatagatgctttagaaaggtccccaaggatccagcaaagccacaggccaagggaaatttttgggccgtggatgtatcactgatcccggctgaggcactgcgcctccagaatacagcactgtgtcgccgatggcagaatggaggtgctagaggcgcttttgccaaggacttaggcccatatgtgctccacggaaggccttaccggcccccatcacctcccccccctccgagcgaggggttctccattaagagtctactgggtggtagcggagagggggccccatggccaggcctggccccacagtcttctcctgtcccagccgggacggggaattctggagaggaggcggtgcccacaccacctctgccaagtagcgaaagacccctttggcctctgtgccccctgccagggcctacccgcgttgaaggggaaaccgtgcagggaggtgcgatcgggccctccacattatctccagaacctcgggcctggcccttacatttgctccaaggtacagctgtgcctggcggccgctcaagcggcgggcaccgcgcttctctctgggggcagctcccaactagctacctgcccatttacacacccaacgtggttatgcccttagcccccccccccacgtcctgcccccaatgcccttcaacttccccagcgtattggggtgtagcacctgaaaccagggggcccccaggtctgctgtgcgacctcgacgcactgttccaaggggtgccacctaacaaatctatatacgatgtctgggtgtctcaccctcgcgacctggcagcccccggaccagggtggctgctgagctggtgctcgttatag

SEQ ID NO: 142128 - DNA, 765 bp, Artificial Sequence
  derived and/or modified sequence
ccagccctgcccagcaccctgccccacaggcctgcccccagcaccaggcctggcccctgcccccgctgcctgcccagcaggatgggcccctgcagcggcagccggctgggccccccagaggccgagagccccagccagccccccaagaggaggaagaagcgctacctgcggcatgacaagccaccctacacctacctggccatgattgccctggtgatccaggccgcccccagccggcggctgaagctggcccagatcatccggcaggtgcaggccgtgttccccttcttcagagaagattatgagggctggaaggacagcatccgccacaacctgagcagcaaccgctgcttcaggaaggtgcccaaggaccctgccaagccccaggccaagggcaacttctgggccgtggatgtgtccctcatcccagctgaggccctgcggctgcagaacacagccctgtgccgccgctggcagaatggaggagcccggggggcctttgccaaggacctgggcccctacgtgctgcacggccggccctacagaccacccagccccccacctcctccttctgagggcttcagcatcaagagcctgctgggcggcagcggggagggcgccccctggccaggcctggccccccagagcagccctgtgcctgctggcactggaaacagcggggaggaggccgtgcccaccccacctccacccagcggcggcagctgccccccacccacctgcctgagcaccctgcccatgtggtag

SEQ ID NO: 142129 - DNA, 1098 bp, Artificial Sequence
  derived and/or modified sequence
atgggcccctgcagcggcagccggctgggccccccagaggccgagagccccagccagccccccaagaggaggaagaagcgctacctgcggcatgacaagccaccctacacctacctggccatgattgccctggtgatccaggccgcccccagccggcggctgaagctggcccagatcatccggcaggtgcaggccgtgttccccttcttccgggaggactatgagggctggaaggacagcatccgccacaacctgagcagcaaccgctgcttcaggaaggtgcccaaggaccctgccaagccccaggccaagggcaacttctgggccgtggatgtgtccctcatcccagctgaggccctgcggctgcagaacacagccctgtgccgccgctggcagaatggaggagcccggggggcctttgccaaggacctgggcccctacgtgctgcacggccggccctaccggccccccagccccccacctccacccagcgagggcttcagcatcaagagcctgctgggcggcagcggggagggcgccccctggccaggcctggccccccagagcagccctgtgcctgctggcaccggcaacagcggggaggaggccgtgcccaccccacccctgcccagcagcgagcggcccctgtggcccctgtgccccctgcccggccccaccagggtggagggggagaccgtgcagggcggggccatcggccccagcaccctgagccctgagccccgggcctggcccctgcacctgctgcagggcacagctgtgcctgggggccgcagcagcggcggccaccgggccagcctgtggggccagctgcccaccagctacctgcccatctacacccccaacgtggtgatgcccctggcccccccacccaccagctgcccccagtgccccagcaccagccctgcctactggggcgtggcccctgagacccggggccccccaggcctgctgtgtgacctggatgccctcttccagggcgtgccccccaacaagagcatctatgatgtgtgggtgagccacccccgggacctggccgcccctggccctggctggctgctgtcctggtgcagcctgtag

SEQ ID NO: 142130 - DNA, 765 bp, Artificial Sequence
  derived and/or modified sequence
cccgccctgcccagcaccctgccccaccggcccgcccccagcacccgccctggaccctgcccacgctgcctaccatccaggatgggcccctgctccggttcccgcctcggtcccccggaggcagagtctccaagtcaaccccccaaaagacgcaagaagagatacttgaggcacgacaagcctccatacacgtatctcgcaatgattgccctcgtgatccaggccgccccaagtcggcgcctgaagcttgctcagattattagacaagtacaggcggtgtttccattcttcagggaggactatgagggctggaaagactctatccggcacaatctcagttctaacagatgctttcgtaaggtccctaaggacccagcgaagccccaggccaagggtaacttttgggctgtggacgtttcccttattcccgcagaagccctgcgtctgcagaacacagcgttgtgtcgcagatggcagaacggcggcgcccggggtgctttcgcaaaagatctgggaccctatgtactccatggccgcccctatcgcccgcccagcccaccccctcccccaagtgaggggttttccattaaaagcctcctgggtggatccggcgagggcgccccatggcccggactggctcctcagtcatcacctgtccccgcaggaactgggaattccggtgaggaggctgtaccaacgcctcctccaccatcaggcgggagctgtccccctcctacttgcctgtcaactctgcctatgtggtag

SEQ ID NO: 142131 - DNA, 1098 bp, Artificial Sequence
  derived and/or modified sequence
atgggcccctgcagcggcagccggctgggcccccccgaggccgagtcaccttcccagccacctaagcgccgtaagaagcgctatctgagacatgataaacccccttacacatatttggccatgattgcactggtaattcaagccgccccatccagaaggctgaagctcgcccagattatccgccaagtccaggccgtatttcctttcttcagagaggattacgagggttggaaggacagtatcagacacaatctctcaagtaaccgctgcttcagaaaggtccccaaagatccagctaaaccacaggccaagggaaatttctgggcggtcgacgtgagtctgattcccgccgaagccttacgcctgcaaaacacagccctctgtaggaggtggcagaatggaggtgctcgcggcgctttcgccaaggaccttggcccgtatgtgctgcacgggcgaccctatcgtcccccatcacctccaccgcccccgtctgaaggattttcaattaagagtttgttgggcggaagcggggaaggagccccctggcccggccttgcccctcagagctctccagtgcccgcaggcaccgggaactctggagaggaggccgtcccgacaccaccactccccagcagcgagcgcccactgtggcctctatgtcctctccccggtcccactcgagtggaaggagagactgtgcagggcggagcaataggacccagtacgctgtcacccgaaccaagggcttggccactacatctcttacaggggacggcagttcccggaggccggagtagcggagggcaccgtgcaagcctatggggacagctccccacttcgtacctcccgatttatacgccaaatgtggtgatgcctctggccccaccaccaacatcctgtccgcagtgtccaagtacttcaccagcatactggggcgtggcacccgaaaccaggggaccaccaggactattgtgtgatctcgatgcattgttccagggggtaccacctaataagtctatctacgacgtttgggtcagtcatccacgggacctggccgcgcctgggccaggctggctgctgtcttggtgttcactttag

SEQ ID NO: 142132 - DNA, 765 bp, Artificial Sequence
  derived and/or modified sequence
cctgccctgccttctacactgccgcacagaccggcaccttctaccagacccggtccgtgcccaaggtgtctgccttccaggatgggcccatgtagcggcagccggctcggacctccggaagccgagagcccctcccagcccccaaagaggaggaaaaaaaggtacctgaggcacgataaaccgccatacacttatctggcaatgatagcgcttgtcattcaagctgctcccagccggaggctgaagttggctcagattattcggcaggtgcaggctgtgttcccctttttccgcgaggactacgaaggctggaaggacagtatccgacacaatctcagttcaaacaggtgcttccgaaaggtgcccaaggaccctgccaagcctcaggctaagggaaatttttgggccgtggatgttagcctcatccccgctgaggccctgcgccttcagaatacggccctgtgccgccgttggcagaatgggggagcaagaggagccttcgctaaggaccttggcccatacgtcctccatgggcgaccatatcggcctccgtctccaccaccaccaccaagtgaggggttctctatcaaatcattgctaggaggctcaggggaaggcgctccttggcctgggctggctccgcaatcctctcccgtgccggcaggcaccggcaattccggcgaggaggccgttcctactccaccgcctccaagtggagggagctgtcctccgccaacatgcctgtcgactctgccaatgtggtag

SEQ ID NO: 142133 - DNA, 1098 bp, Artificial Sequence
  derived and/or modified sequence
atgggcccttgcagcggtagccgcttaggccctcccgaagctgagagcccgtcacagcctcctaagcgcagaaagaaaagatacttgaggcacgacaaacccccatacacctacctggctatgattgccttggtaatacaggccgctccttcaaggagattgaagttggcgcagattattcggcaggtgcaggctgtgtttccattctttcgggaagactatgaggggtggaaagactccatcaggcataatcttagttctaatcgctgcttccggaaggtcccaaaggatccagccaagccacaggccaaaggaaacttctgggcagtggatgtgagtctaattcctgctgaagccctgcggcttcagaacacggctctgtgccggaggtggcagaacgggggagcgcgaggagcattcgccaaggacttgggaccatatgtgcttcatggcaggccatatcgccctccatcccccccaccacctccgtccgaaggcttttcgattaagtctctgcttggcggaagtggcgaaggcgcaccctggcctggattagcaccacaatccagtcccgtgccagccggtacagggaattcaggcgaggaggcagttcccacacccccacttccctcctccgagcgacccttgtggcctctatgtcccctaccgggaccgactcgggtcgaaggagagactgtccaggggggtgcaatagggccatccacactgtctcccgagccacgagcatggcctctgcatcttctgcaaggcaccgcagtcccagggggaagaagctctggaggacatagagccagcctgtggggacagctgccaacatcctacctccctatttacaccccaaacgtggtgatgcccctcgcgccaccccctacttcctgcccacagtgccccagcacgtccccagcctattggggcgtggcacctgaaacaagaggtccccctggcctattatgtgatttggacgccctttttcagggcgtaccaccgaacaaatctatatatgacgtgtgggtgtcccatccaagagacctggcagcaccaggacctgggtggttattaagctggtgctccctttag

SEQ ID NO: 142134 - DNA, 1497 bp, Artificial Sequence
  derived and/or modified sequence
cccggccctgccttctacactgccccaccgccctgcaccctccacccggccaggcccctgcccacgctgtctaccgtcccgcatggggccctgcagcggctcccgcctggggcccccagaggcagagtcgccctcccagccccctaagaggaggaagaagaggtacctgcgacatgacaagcccccctacacctacttggccatgatcgccttggtgattcaggccgctccctcccgcagactgaagctggcccagatcatccgtcaggtccaggccgtgttccccttcttcagggaagactacgagggctggaaagactccattcgccacaacctttcctccaaccgatgcttccgcaaggtgcccaaggaccctgcaaagccccaggccaagggcaacttctgggcggtcgacgtgagcctgatcccagctgaggcgctccggctgcagaacaccgccctgtgccggcgctggcagaacggaggtgcgcgtggagccttcgccaaggacctgggcccctacgtgctgcacggccggccataccggccgcccagtcccccgccaccacccagtgagggcttcagcatcaagtccctgctaggagggtccggggagggggcaccctggccggggctagctccacagagcagcccagttcctgcaggcacagggaacagtggggaggaggcggtgcccaccccaccccctccctctgggggcagctgcccacctcctacttgcctatctacactcccaatgtggtaatgcccttggcaccaccacccacctcctgtccccagtgtccgtcaaccagccctgcctactggggggtggcccctgaaacccgagggcccccagggctgctctgcgatctagacgccctcttccaaggggtgccacccaacaaaagcatctacgacgtttgggtcagccaccctcgggacctggcggcccctggcccaggctggctgctctcctggtgcagcctgtgaggctcttaagacaggggccactcctccctcccgctcccacccccaccttgttgacagggagccaaggcgaggcggctgtctgcgaccacagcagcctcgaaacaccaggcagcagccttgctgggagtccacggtgtttattgggccaccccacgcatggccgtggcccagctgggcacaaccctcaccctggtctgtcatgcctgtttttcctacactcagcggcaaagctgcaggagcagggctgagcctggaatagcccttcctagtcccctcttctcagcccactacccatccatcagtcaccagccgtcacctcccctcccgtgctccaggctgggggagggagagcccagtggtggatccagcctgaagtcctgccctctctcatctgtctggaaaggaggtagcacctttttcgggaaacgggttagggagtaaagactgcaccctacatggtcctggtggtgggggggataacagtaaaggaatttgcaacgtttt

SEQ ID NO: 142135 - DNA, 2503 bp, Artificial Sequence
  derived and/or modified sequence
gttgagtcaatgtgtccccctcttgttcctagggtgcgggcttcatggccttctcctccaggaagctccacctgatcatgtcctgggtggatatccagcccccatagttcagggcctactagcagctgctagatcttgaactccaggagcgccccacgccttgggagcttggcatgggctaaatactcccccatttgttaaatggggtcctgaaacctgaccagggaagacgggataaagtagccatgggtcatcgcagcccctttgaagccgggcctggccacccaaaggcaactcaggggtggagactgaggcctcaggagaagcccccactagaatgctctctgcccctcccttccagattaaccaaaacctgctaattgtggaagccctcggcatgctcccctcccccacagcctcttcctcccttccctcccctcccccttccatccgaatgataaaggccccagcccgcctgccccagcccggcctcaggtcccggccctgccttctacactgccccaccgccctgcaccctccacccggccaggcccctgcccacgctgtctaccgtcccgcatggggccctgcagcggctcccgcctggggcccccagaggcagagtcgccctcccagccccctaagaggaggaagaagaggtacctgcgacatgacaagcccccctacacctacttggccatgatcgccttggtgattcaggccgctccctcccgcagactgaagctggcccagatcatccgtcaggtccaggccgtgttccccttcttcagggaagactacgagggctggaaagactccattcgccacaacctttcctccaaccgatgcttccgcaaggtgcccaaggaccctgcaaagccccaggccaagggcaacttctgggcggtcgacgtgagcctgatcccagctgaggcgctccggctgcagaacaccgccctgtgccggcgctggcagaacggaggtgcgcgtggagccttcgccaaggacctgggcccctacgtgctgcacggccggccataccggccgcccagtcccccgccaccacccagtgagggcttcagcatcaagtccctgctaggagggtccggggagggggcaccctggccggggctagctccacagagcagcccagttcctgcaggcacagggaacagtggggaggaggcggtgcccaccccaccccttccctcttctgagaggcctctgtggcccctctgcccccttcctggccccacgagagtggagggggagactgtgcaggggggagccatcgggccctcaaccctctccccagagcctagggcctggcctctccacttactgcagggcaccgcagttcctgggggacggtccagcgggggacacagggcctccctctgggggcagctgcccacctcctacttgcctatctacactcccaatgtggtaatgcccttggcaccaccacccacctcctgtccccagtgtccgtcaaccagccctgcctactggggggtggcccctgaaacccgagggcccccagggctgctctgcgatctagacgccctcttccaaggggtgccacccaacaaaagcatctacgacgtttgggtcagccaccctcgggacctggcggcccctggcccaggctggctgctctcctggtgcagcctgtgaggctcttaagacaggggccactcctccctcccgctcccacccccaccttgttgacagggagccaaggcgaggcggctgtctgcgaccacagcagcctcgaaacaccaggcagcagccttgctgggagtccacggtgtttattgggccaccccacgcatggccgtggcccagctgggcacaaccctcaccctggtctgtcatgcctgtttttcctacactcagcggcaaagctgcaggagcagggctgagcctggaatagcccttcctagtcccctcttctcagcccactacccatccatcagtcaccagccgtcacctcccctcccgtgctccaggctgggggagggagagcccagtggtggatccagcctgaagtcctgccctctctcatctgtctggaaaggaggtagcacctttttcgggaaacgggttagggagtaaagactgcaccctacatggtcctggtggtgggggggataacagtaaaggaatttgcaacgttttaatgccatgcctgatttttgggtcaggagtggtgacttgggtaaccacttggcgggggggcctgggattccctgctgtgtgccgtgataacagcaaatggtgataaggagaaagccaagacctgtggcctgatgcagggctgggggcggggggtgatcacttcagcaggcacaacacacttcactggctgcggaggtggaggggtgactctgggagctcaggggcaatggatccaaagaggctagggagcttgtgccctgggagacggggtacagggactttactaccgcctctgccagcagagacctggcctgagacccca

SEQ ID NO: 142136 - DNA, 765 bp, Artificial Sequence
  derived and/or modified sequence
cccgccctgcccagcaccctgccccacagacccgcccccagcaccagacccggcccctgccccagatgcctgcccagcagaatgggcccctgcagcggcagcagactgggcccccccgaggccgagagccccagccagccccccaagagaagaaagaagagatacctgagacacgacaagcccccctacacctacctggccatgatcgccctggtgatccaggccgcccccagcagaagactgaagctggcccagatcatcagacaggtgcaggccgtgttccccttcttcagagaggactacgagggctggaaggacagcatcagacacaacctgagcagcaacagatgcttcagaaaggtgcccaaggaccccgccaagccccaggccaagggcaacttctgggccgtggacgtgagcctgatccccgccgaggccctgagactgcagaacaccgccctgtgcagaagatggcagaacggcggcgccagaggcgccttcgccaaggacctgggcccctacgtgctgcacggcagaccctacagaccccccagccccccccccccccccagcgagggcttcagcatcaagagcctgctgggcggcagcggcgagggcgccccctggcccggcctggccccccagagcagccccgtgcccgccggcaccggcaacagcggcgaggaggccgtgcccaccccccccccccccagcggcggcagctgccccccccccacctgcctgagcaccctgcccatgtggtag

SEQ ID NO: 142137 - DNA, 1098 bp, Artificial Sequence
  derived and/or modified sequence
atgggcccctgcagcggcagcagactgggcccccccgaggccgagagccccagccagccccccaagagaagaaagaagagatacctgagacacgacaagcccccctacacctacctggccatgatcgccctggtgatccaggccgcccccagcagaagactgaagctggcccagatcatcagacaggtgcaggccgtgttccccttcttcagagaggactacgagggctggaaggacagcatcagacacaacctgagcagcaacagatgcttcagaaaggtgcccaaggaccccgccaagccccaggccaagggcaacttctgggccgtggacgtgagcctgatccccgccgaggccctgagactgcagaacaccgccctgtgcagaagatggcagaacggcggcgccagaggcgccttcgccaaggacctgggcccctacgtgctgcacggcagaccctacagaccccccagccccccccccccccccagcgagggcttcagcatcaagagcctgctgggcggcagcggcgagggcgccccctggcccggcctggccccccagagcagccccgtgcccgccggcaccggcaacagcggcgaggaggccgtgcccaccccccccctgcccagcagcgagagacccctgtggcccctgtgccccctgcccggccccaccagagtggagggcgagaccgtgcagggcggcgccatcggccccagcaccctgagccccgagcccagagcctggcccctgcacctgctgcagggcaccgccgtgcccggcggcagaagcagcggcggccacagagccagcctgtggggccagctgcccaccagctacctgcccatctacacccccaacgtggtgatgcccctggcccccccccccaccagctgcccccagtgccccagcaccagccccgcctactggggcgtggcccccgagaccagaggcccccccggcctgctgtgcgacctggacgccctgttccagggcgtgccccccaacaagagcatctacgacgtgtgggtgagccaccccagagacctggccgcccccggccccggctggctgctgagctggtgcagcctgtag

SEQ ID NO: 142138 - DNA, 75 bp, Artificial Sequence
  derived and/or modified sequence
atggaaaacccctccccggcagcagccctcggtaaagccctgtgtgcgctcctgttggcaactttaggcgcttag

SEQ ID NO: 142139 - protein, 314 aa, Artificial Sequence
  derived and/or modified sequence
MYKMEYSYLNSSAYESCMAGMDTSSLASAYADFSSCSQASGFQYNPIRTTFGATSGCPSLTPGSCSLGTLRDHQSSPYAAVPYKLFTDHGGLNEKRKQRRIRTTFTSAQLKELERVFAETHYPDIYTREELALKIDLTEARVQVWFQNRRAKFRKQERAAAAAAAAAKNGSSGKKSDSSRDDESKEAKSTDPDSTGGPGPNPNPTPSCGANGGGGGGPSPAGAPGAAGPGGPGGEPGKGGAAAAAAAAAAAAAAAAAAAAGGLAAAGGPGQGWAPGPGPITSIPDSLGGPFASVLSSLQRPNGAKAALVKSSMF

SEQ ID NO: 142140 - DNA, 945 bp, Artificial Sequence
  derived and/or modified sequence
atgtacaaaatggaatactcatatcttaacagcagcgcctacgagagctgcatggcagggatggatacgtccagccttgcaagcgcttacgcggacttctcgtcatgctcacaggcgtcagggtttcagtataaccccatcagaacaactttcggcgcaacaagcggttgtccctccttgacacccggctcatgttcacttggcactctacgcgatcaccagtccagtccctacgcggctgtcccctacaagctattcaccgaccacggcggcttgaatgaaaagagaaagcaacgaaggattcgcacaacatttacctctgctcagttgaaggagctggagcgtgtattcgcggaaactcattatccagatatttatacccgggaagagttggctctcaagattgatctgacagaagctagagttcaagtgtggttccagaataggcgagcaaagtttaggaagcaagagagggcagccgctgccgcagcggcggcagcgaagaacgggtcgtccgggaaaaaaagcgactcatcaagagatgacgaatcaaaagaagccaagtccacagatccagactcaacaggtggaccaggccccaaccccaaccccactccgagctgtggtgctaatggaggcggtggtggagggccatccccagccggggctcctggagccgcaggccctggcggcccgggaggagaacccgggaaaggcggggccgcagctgccgccgctgctgcggccgccgccgcagccgcagcagccgctgctgccgcgggcgggctcgcggccgccggaggacctggacagggatgggcaccagggcctggtcctatcacatcgatccctgatagtctaggaggaccgttcgccagtgttctcagcagccttcagcgcccaaatggcgcaaaggctgctctggtcaagagcagcatgttttag

SEQ ID NO: 142141 - DNA, 945 bp, Artificial Sequence
  derived and/or modified sequence
atgtacaagatggagtacagctacctgaacagcagcgcctatgagagctgcatggccggcatggacaccagcagcctggccagcgcctatgctgacttcagcagctgcagccaggccagcggcttccagtacaaccccatccgcaccacctttggagccaccagcggctgccccagcctgaccccaggcagctgcagcctgggcaccctgcgggaccaccagagcagcccctatgctgctgtgccctacaagctgttcacagaccatggaggcctgaatgagaagaggaagcagaggcgcatccgcaccaccttcaccagcgcccagctgaaggagctggagcgggtgtttgctgagacccactacccagacatctacacccgggaggagctggccctgaagattgacctgacagaggcccgggtgcaggtgtggttccagaacagaagagccaagttcaggaagcaggagagagctgctgctgctgctgctgctgctgccaagaatggcagcagcggcaagaagagtgacagcagcagagatgatgagagcaaggaggccaagagcacagatcctgacagcactggaggccctggccccaaccccaaccccacccccagctgtggggccaatggaggcggcggcggcggccccagccctgctggggcccctggagctgctggccctgggggccctggaggagagcccgggaagggcggcgctgctgctgctgctgctgctgctgctgctgctgctgctgctgctgctgctgctgctgctgggggcctggccgccgccggcggccctggccagggctgggcccctggccctggccccatcaccagcatcccagacagcctgggcggcccctttgcctctgtgctgagcagcctgcagaggcccaacggggccaaggccgccctggtgaagagctccatgttttag

SEQ ID NO: 142142 - DNA, 945 bp, Artificial Sequence
  derived and/or modified sequence
atgtacaagatggagtacagctacctgaacagcagcgcctacgagtcgtgcatggccggcatggacacatctagtttagcaagcgcgtatgcagacttttccagttgttctcaagcgtctggatttcagtacaatcccatcagaaccacgtttggtgcaacctcaggctgcccctcattgactcccggatcctgctccttgggcaccctgcgggaccatcagtcctctccctatgcagctgtgccctacaaactgtttaccgaccatgggggtctgaatgaaaagcgcaagcaacgtcgaatcaggacaacctttacttctgctcagcttaaggagctggaacgggtgttcgccgagacacattatccagacatctatacaagggaggagctcgccctgaagatagatctgaccgaggccagggttcaggtatggtttcagaatcgccgagccaaatttcgtaaacaagagagggcggccgccgccgcggccgcagccgccaagaatggcagctccgggaaaaagtcggactcatctagagatgatgagtcaaaggaagcaaaatctaccgacccggactcaaccggagggccagggcccaaccctaatccaactcccagttgcggagcaaatggcggaggaggtggtgggccatctcccgcaggagcgcctggagcagcaggccctggaggtcccggaggagagccaggtaaagggggagccgcggctgcggcggctgcagctgctgcggccgccgctgcagccgctgccgccgctgcgggtggcctggcagctgccggtgggcccggacaaggctgggcacctggccccggccccattactagcatcccggattctctcggtggaccctttgccagcgttctttcaagcttacagcgacctaacggggccaaggcagccctggtcaagagcagcatgttttag

SEQ ID NO: 142143 - DNA, 3030 bp, Artificial Sequence
  derived and/or modified sequence
ttaaattctaattagagatgcaggaatcaatgatagggaggttggacagctcagttccccagtgccagcccaatagacggatgagttattgtcatgtaaaaagcgccagcaataagaccaaccgctttgctattgtccaagtggaaagagccaagtttattatgaggactatatgctctagagacctcagacaaggcatctcataggaggctttttcataaaactaggctctgctggtagtaaggaggccagtttggaggcaggcgttgagctgtgcacatctccccactccagccaccttctccatatccatcttttatttcatttttccacttggctgagccatccagaaccttttcaatgtataaaatggaatattcttacctcaattcctctgcctacgagtcctgtatggctgggatggacacctcgagcctggcttcagcctatgctgacttcagttcctgcagccaggccagtggcttccagtataacccgataaggaccacttttggggccacgtccggctgcccttccctcacgccgggatcctgcagcctgggcaccctcagggaccaccagagcagtccgtacgccgcagttccttacaaactcttcacggaccacggcggcctcaacgagaagcgcaagcagcggcgcatccgcaccactttcaccagtgcccagctcaaagagctggaaagggtcttcgcggagactcactaccccgacatctacactcgggaggagctggccctgaagatcgacctcacagaggcgcgagtccaggtgtggttccagaaccgccgcgccaagtttcgcaagcaggagcgcgcagcggcagccgcagcggccgcggccaagaacggctcctcgggcaaaaagtctgactcttccagggacgacgagagcaaagaggccaagagcactgacccggacagcactgggggcccaggtcccaatcccaaccccacccccagctgcggggcgaatggaggcggcggcggcgggcccagcccggctggagctccgggggcggcggggcccgggggcccgggaggcgaacccggcaagggcggcgcagcagcagcggcggcggccgcggcagcggcggcggcggcagcggcagcggcggcagctggaggcctggctgcggctgggggccctggacaaggctgggctcccggccccggccccatcacctccatcccggattcgcttgggggtcccttcgccagcgtcctatcttcgctccaaagacccaacggtgccaaagccgccttagtgaagagcagtatgttctgatctggaatcctgcggcggcggcggcggcggcgacagcgggcgagccagggcccgggcgggcgagtgggcgagcgggtaggcccaaggctattgtcgtcgctgctgccatggctttttcattgagggcctaaagtaatcgcgctaagaataaagggaaaacggcgtcgccctcatttcaaccccactcctacccccttcctcaacccccaaacaaaacaaacaaacttccctggcttcgcacctgcctggggcctcgcagcggggccagggctccgcctgctgatcgggggttgtgagcagcgcggcctggacgcggggcactctcagggggctgtgtctgcgtgtcagtttgtgtctgtctcggggaatgtgtgtctgtggcccaagcaggtgacaggaagagatggggggcctcaaccaacttagtgacttgtttagaaaaaaaagacaaaaaagtaaaaataaaaacaaaaaagttggaaggcagaaaccattaaaaaacaaaaagccaacaacccagaaaggtttaaaaaacataaggaaaaaaaagacaaattaaaggaggggctaggggagaagctgcagctggagctgaaggctcgatcttgtgaacccctaaatccgctccctcctaacagcacggattctcttggggctcttcttcagggaagagtagggacgccgttccagccccccttcctatcgtgtccttgggttcgggtcactgcggcgacgacttgctcagactgtcccggcggccggagtgactttctcgcacccccttgcctgtcccacctcgctgaacaccatcccgccattagcgcatcggaaccccacacagttgcaactcccaaccccgaatctttgcagccgttcggccctgaaagatgccctatccatgagatgccttttcatctgcaaactctgcaaaatgtgtctcatgtttcgcaactctttttttccccctcgctcccgcctaccccgtcggcattttcttcttccaccagcttttactgaactttttggcactgctttggattggggtcaattgcagtccacgtaactggctgcagagaaatctaccgagcaaggaaaaggcacacacacacgtttgcaggggtgtctcggtttgcatttctgttggaatgatccgaactggactcacatcctgtatggtggatggactgtatattgagggttccattcttcgcgcagtttagacatctctgttttgattctttgttgttgtttttattttaaaaggcacaaactctagatattagttgaatgttgaggctttaactttttcggtgtctttctacaactgtgttctgtgactcaattgtatcgtgttaatatcagtgcagactgtctcctctacgtgaccgtataatgtttttctcttcttgtagtctctatggcgtgtctttatggtgtaataaggttctcacgggttcaatcttttgtgtttagagaggccacggttcagacaatggtatatatttttgttatcaggtgcatgtctgtctgatttctttttttttcctgttggactatgtttgtgaacataattgtcataagttatgtttcagatttttgaatttatttatatgtgttataatgaatgcttctatttaaaagggaaatatttctacatgtgcatatagttttccaagagtgtaccattaacttgattgttgataataaaaacaaaaagcaagtcta

SEQ ID NO: 142144 - DNA, 945 bp, Artificial Sequence
  derived and/or modified sequence
atgtataaaatggaatactcttaccttaattccagcgcttatgagtcttgcatggccggaatggacacgtcctcactggcctctgcatacgcggatttctccagctgctcccaggccagcggctttcaatacaatcctataaggactacgttcggggcaacaagtggatgcccgtcacttaccccaggctcttgctccctggggacactccgagatcaccaatccagtccgtatgccgctgtgccttataaactgttcaccgatcacgggggacttaacgagaagcgcaagcagcgccgtattcgcactacctttaccagtgctcagctgaaagaactggagcgggtgttcgccgaaacccattaccctgacatctatactcgagaggagctggccctgaaaatcgacctgactgaggcccgtgtgcaggtgtggttccaaaacagacgagccaagttcagaaaacaagaaagggccgctgctgctgccgcagccgcagctaagaacggaagctcaggaaagaaatccgactcctctagagatgatgagtctaaggaggccaaatctaccgaccctgattctactgggggtccaggccctaaccctaaccccactccctcctgtggcgcaaatgggggaggaggaggagggcctagtcccgctggagctcccggagcagcagggcctggcggtcctggtggtgaaccagggaaaggaggtgccgctgccgcagccgctgctgccgcagccgcagccgctgctgcagctgctgcagcggctggcggactggctgccgcagggggtcccggacagggttgggccccaggaccagggcctatcaccagcatcccagacagcctgggtggcccatttgcctctgtcctgtctagcctccagcgcccaaatggcgctaaggcggctctggtcaagtcctcaatgttttag

SEQ ID NO: 142145 - DNA, 945 bp, Artificial Sequence
  derived and/or modified sequence
atgtacaagatggagtacagctacctgaacagcagcgcctacgagagctgcatggccggcatggacaccagcagcctggccagcgcctacgccgacttcagcagctgcagccaggccagcggcttccagtacaaccccatcagaaccaccttcggcgccaccagcggctgccccagcctgacccccggcagctgcagcctgggcaccctgagagaccaccagagcagcccctacgccgccgtgccctacaagctgttcaccgaccacggcggcctgaacgagaagagaaagcagagaagaatcagaaccaccttcaccagcgcccagctgaaggagctggagagagtgttcgccgagacccactaccccgacatctacaccagagaggagctggccctgaagatcgacctgaccgaggccagagtgcaggtgtggttccagaacagaagagccaagttcagaaagcaggagagagccgccgccgccgccgccgccgccgccaagaacggcagcagcggcaagaagagcgacagcagcagagacgacgagagcaaggaggccaagagcaccgaccccgacagcaccggcggccccggccccaaccccaaccccacccccagctgcggcgccaacggcggcggcggcggcggccccagccccgccggcgcccccggcgccgccggccccggcggccccggcggcgagcccggcaagggcggcgccgccgccgccgccgccgccgccgccgccgccgccgccgccgccgccgccgccgccgccggcggcctggccgccgccggcggccccggccagggctgggcccccggccccggccccatcaccagcatccccgacagcctgggcggccccttcgccagcgtgctgagcagcctgcagagacccaacggcgccaaggccgccctggtgaagagcagcatgttctag

SEQ ID NO: 142146 - protein, 580 aa, Artificial Sequence
  derived and/or modified sequence
MGTTGLESLSLGDRGAAPTVTSSERLVPDPPNDLRKEDVAMELERVGEDEEQMMIKRSSECNPLLQEPIASAQFGATAGTECRKSVPCGWERVVKQRLFGKTAGRFDVYFISPQGLKFRSKSSLANYLHKNGETSLKPEDFDFTVLSKRGIKSRYKDCSMAALTSHLQNQSNNSNWNLRTRSKCKKDVFMPPSSSSELQESRGLSNFTSTHLLLKEDEGVDDVNFRKVRKPKGKVTILKGIPIKKTKKGCRKSCSGFVQSDSKRESVCNKADAESEPVAQKSQLDRTVCISDAGACGETLSVTSEENSLVKKKERSLSSGSNFCSEQKTSGIINKFCSAKDSEHNEKYEDTFLESEEIGTKVEVVERKEHLHTDILKRGSEMDNNCSPTRKDFTGEKIFQEDTIPRTQIERRKTSLYFSSKYNKEALSPPRRKAFKKWTPPRSPFNLVQETLFHDPWKLLIATIFLNRTSGKMAIPVLWKFLEKYPSAEVARTADWRDVSELLKPLGLYDLRAKTIVKFSDEYLTKQWKYPIELHGIGKYGNDSYRIFCVNEWKQVHPEDHKLNKYHDWLWENHEKLSLS

SEQ ID NO: 142147 - DNA, 2470 bp, Artificial Sequence
  derived and/or modified sequence
ggcggctgtagccgagggggcggccggaaagcagcggcggcgtctggggcgctttcgcaacattcagacctcggttgcagcccggtgccgtgagctgaagaggtttcacatcttactccgccccacaccctgggcgttgcggcgctgggctcgttgctgcagccggaccctgctcgatgggcacgactgggctggagagtctgagtctgggggaccgcggagctgcccccaccgtcacctctagtgagcgcctagtcccagacccgccgaatgacctccgcaaagaagatgttgctatggaattggaaagagtgggagaagatgaggaacaaatgatgataaaaagaagcagtgaatgtaatcccttgctacaagaacccatcgcttctgctcagtttggtgctactgcaggaacagaatgccgtaagtctgtcccatgtggatgggaaagagttgtgaagcaaaggttatttgggaagacagcaggaagatttgatgtgtactttatcagcccacaaggactgaagttcagatccaaaagttcacttgctaattatcttcacaaaaatggagagacttctcttaagccagaagattttgattttactgtactttctaaaaggggtatcaagtcaagatataaagactgcagcatggcagccctgacatcccatctacaaaaccaaagtaacaattcaaactggaacctcaggacccgaagcaagtgcaaaaaggatgtgtttatgccgccaagtagtagttcagagttgcaggagagcagaggactctctaactttacttccactcatttgcttttgaaagaagatgagggtgttgatgatgttaacttcagaaaggttagaaagcccaaaggaaaggtgactattttgaaaggaatcccaattaagaaaactaaaaaaggatgtaggaagagctgttcaggttttgttcaaagtgatagcaaaagagaatctgtgtgtaataaagcagatgctgaaagtgaacctgttgcacaaaaaagtcagcttgatagaactgtctgcatttctgatgctggagcatgtggtgagaccctcagtgtgaccagtgaagaaaacagccttgtaaaaaaaaaagaaagatcattgagttcaggatcaaatttttgttctgaacaaaaaacttctggcatcataaacaaattttgttcagccaaagactcagaacacaacgagaagtatgaggatacctttttagaatctgaagaaatcggaacaaaagtagaagttgtggaaaggaaagaacatttgcatactgacattttaaaacgtggctctgaaatggacaacaactgctcaccaaccaggaaagacttcactggtgagaaaatatttcaagaagataccatcccacgaacacagatagaaagaaggaaaacaagcctgtatttttccagcaaatataacaaagaagctcttagccccccacgacgtaaagcctttaagaaatggacacctcctcggtcaccttttaatctcgttcaagaaacactttttcatgatccatggaagcttctcatcgctactatatttctcaatcggacctcaggcaaaatggcaatacctgtgctttggaagtttctggagaagtatccttcagctgaggtagcaagaaccgcagactggagagatgtgtcagaacttcttaaacctcttggtctctacgatcttcgggcaaaaaccattgtcaagttctcagatgaatacctgacaaagcagtggaagtatccaattgagcttcatgggattggtaaatatggcaacgactcttaccgaattttttgtgtcaatgagtggaagcaggtgcaccctgaagaccacaaattaaataaatatcatgactggctttgggaaaatcatgaaaaattaagtctatcttaaactctgcagctttcaagctcatctgttatgcatagctttgcacttcaaaaaagcttaattaagtacaaccaaccacctttccagccatagagattttaattagcccaactagaagcctagtgtgtgtgctttcttaatgtgtgtgccaatggtggatctttgctactgaatgtgtttgaacatgttttgagatttttttaaaataaattattatttgacaacaatccaaaaaaaatacggcttttccaatgatgaaatataatcagaagatgaaaaatagttttaaactatcaataatacaaagcaaatttctatcagccttgctaaagctaggggcccactaaatatttttatcggctaggcgtggtggtgcatgcctgtaatctcggaaggctgaggcaggaggatcatttgagctcatgagggcccaggaggtcaaggcttcagtgagccatgatcatgccactgcactccagtctggatgacagagagagaccctgtctcaaaaaatatatatttaaaaaataaaaataaaagctgaccccaaagac

SEQ ID NO: 142148 - DNA, 1743 bp, Artificial Sequence
  derived and/or modified sequence
atgggcaccaccggcctggagagcctgagcctgggcgacagaggcgccgcccccaccgtgaccagcagcgagagactggtgcccgacccccccaacgacctgagaaaggaggacgtggccatggagctggagagagtgggcgaggacgaggagcagatgatgatcaagagaagcagcgagtgcaaccccctgctgcaggagcccatcgccagcgcccagttcggcgccaccgccggcaccgagtgcagaaagagcgtgccctgcggctgggagagagtggtgaagcagagactgttcggcaagaccgccggcagattcgacgtgtacttcatcagcccccagggcctgaagttcagaagcaagagcagcctggccaactacctgcacaagaacggcgagaccagcctgaagcccgaggacttcgacttcaccgtgctgagcaagagaggcatcaagagcagatacaaggactgcagcatggccgccctgaccagccacctgcagaaccagagcaacaacagcaactggaacctgagaaccagaagcaagtgcaagaaggacgtgttcatgccccccagcagcagcagcgagctgcaggagagcagaggcctgagcaacttcaccagcacccacctgctgctgaaggaggacgagggcgtggacgacgtgaacttcagaaaggtgagaaagcccaagggcaaggtgaccatcctgaagggcatccccatcaagaagaccaagaagggctgcagaaagagctgcagcggcttcgtgcagagcgacagcaagagagagagcgtgtgcaacaaggccgacgccgagagcgagcccgtggcccagaagagccagctggacagaaccgtgtgcatcagcgacgccggcgcctgcggcgagaccctgagcgtgaccagcgaggagaacagcctggtgaagaagaaggagagaagcctgagcagcggcagcaacttctgcagcgagcagaagaccagcggcatcatcaacaagttctgcagcgccaaggacagcgagcacaacgagaagtacgaggacaccttcctggagagcgaggagatcggcaccaaggtggaggtggtggagagaaaggagcacctgcacaccgacatcctgaagagaggcagcgagatggacaacaactgcagccccaccagaaaggacttcaccggcgagaagatcttccaggaggacaccatccccagaacccagatcgagagaagaaagaccagcctgtacttcagcagcaagtacaacaaggaggccctgagcccccccagaagaaaggccttcaagaagtggaccccccccagaagccccttcaacctggtgcaggagaccctgttccacgacccctggaagctgctgatcgccaccatcttcctgaacagaaccagcggcaagatggccatccccgtgctgtggaagttcctggagaagtaccccagcgccgaggtggccagaaccgccgactggagagacgtgagcgagctgctgaagcccctgggcctgtacgacctgagagccaagaccatcgtgaagttcagcgacgagtacctgaccaagcagtggaagtaccccatcgagctgcacggcatcggcaagtacggcaacgacagctacagaatcttctgcgtgaacgagtggaagcaggtgcaccccgaggaccacaagctgaacaagtaccacgactggctgtgggagaaccacgagaagctgagcctgagctag

SEQ ID NO: 142149 - DNA, 1743 bp, Artificial Sequence
  derived and/or modified sequence
atgggaactacgggcctcgaatccttgagtcttggtgatcggggtgccgcccctaccgtcacctccagcgagcggctggtgcctgacccaccgaatgatctgaggaaggaggacgtggctatggaactggaaagagttggggaggatgaggagcagatgatgataaaacgaagcagcgaatgcaacccactgctgcaggagcctattgctagcgctcagtttggagcgactgcaggtaccgagtgcagaaaatctgtgccatgtggttgggagagggtcgtgaaacagagactttttggaaagacagccgggcgcttcgatgtctactttatcagcccgcaaggactgaagttcagatcaaagtcttcccttgccaactatctgcacaagaatggagaaaccagcctgaaaccggaggactttgacttcactgtgctctccaagcgaggcatcaaaagtaggtacaaggattgttccatggctgcactcacttcccacttgcagaaccaaagtaacaacagcaactggaacctgcgcacgcgatctaaatgcaagaaagatgtgttcatgccaccaagctcttcctcagagctgcaagaatcccgcgggttatcaaattttacttctacccacctcctgctcaaagaggacgagggagtggatgatgtcaatttccgcaaggtgaggaagccaaaggggaaggtcaccattctgaaaggaattccgattaaaaagaccaagaaagggtgccgaaagagttgctctgggttcgtccagagcgactctaagcgcgaatccgtttgtaacaaggcggatgctgaatcagagccagttgcacagaagtcccaattagaccggacagtctgtatctccgatgcgggcgcctgtggggaaacactgagtgtgactagcgaagagaattctctggtgaaaaagaaagaacgatctctttcatccggtagcaatttctgcagtgagcaaaaaacatccggaattatcaacaagttctgtagcgcaaaggactccgagcacaatgaaaagtacgaagatacattcttagagagcgaggagatcggtaccaaggtcgaagtggtagagcggaaagagcaccttcatactgatattctgaagcgtgggagcgaaatggataacaattgctcaccaacccgaaaagactttaccggagagaagatctttcaggaggacaccatcccacgtacacaaatagaaaggcgcaaaaccagtctctatttctcctccaagtataataaagaggcactttccccccccagaaggaaggcgtttaaaaagtggactccacctcgtagtcccttcaatctggtgcaggaaacgcttttccatgacccatggaagttgctaatcgcgactatatttctcaatcgcactagtggtaaaatggcaattccggtgctgtggaagtttctcgaaaagtatccgagcgccgaagtggccaggacggcagactggcgggacgtgagcgagcttctcaagcctctcggcctatacgatctgcgggcaaagacaatcgtgaagttctccgacgagtatctaacaaagcaatggaagtaccctattgagctgcatggaataggaaaatacggtaatgattcatatcggatattctgcgtgaatgagtggaaacaggtccatccagaggatcataaattaaacaaatatcatgattggttatgggagaaccacgaaaagctatcactgagctag

SEQ ID NO: 142150 - DNA, 1743 bp, Artificial Sequence
  derived and/or modified sequence
atgggcaccaccggcctggagagcctgagcctgggggacagaggagctgcccccaccgtgaccagcagcgagcggctggtgcctgaccccccaaatgacctgaggaaagaagatgtggccatggagctggagcgggtgggggaggatgaggagcagatgatgatcaagaggagcagcgagtgcaaccccctgctgcaggagcccatcgccagcgcccagtttggagccacagctggaacagaatgtaggaagtctgtgccctgtggctgggagcgggtggtgaagcagaggctgtttgggaagacagctggccgctttgatgtgtacttcatcagcccccagggcctgaagttccgcagcaagagcagcctggccaactacctgcacaagaatggagagaccagcctgaagccagaagattttgacttcaccgtgctgagcaagaggggcatcaagagccgctacaaggactgcagcatggccgccctgaccagccacctgcagaaccagagcaacaacagcaactggaacctgcggaccaggagcaagtgcaagaaggatgtgttcatgccacccagcagcagcagcgagctgcaggagagccggggcctgagcaacttcaccagcacccacctgctgctgaaggaggatgaaggagtggatgatgtgaacttcaggaaggtgaggaagcccaagggcaaggtgaccatcctgaagggcatccccatcaagaagaccaagaagggctgcaggaagagctgcagcggctttgtgcagagcgacagcaagcgggagagcgtgtgcaacaaggcagatgctgagagcgagcctgtggcccagaagagccagctggacagaacagtgtgcatcagtgatgctggggcctgtggggagaccctgtctgtgaccagcgaggagaacagcctggtgaagaagaaggagaggagcctgagcagcggcagcaacttctgcagcgagcagaagaccagcggcatcatcaacaagttctgcagcgccaaggacagcgagcacaatgagaagtatgaggacaccttcctggagagcgaggagatcggcaccaaggtggaggtggtggagaggaaggagcacctgcacacagacatcctgaagaggggcagcgagatggacaacaactgcagccccaccaggaaggacttcaccggggagaagatcttccaggaggacaccatccccaggacccagattgaaagaaggaagaccagcctgtacttcagcagcaagtacaacaaggaggccctgagcccccccaggaggaaggccttcaagaagtggaccccacccaggagccccttcaacctggtgcaggagaccctcttccatgacccctggaagctgctgattgccaccatcttcctgaacagaaccagcggcaagatggccatccctgtgctgtggaagttcctggagaagtaccccagcgctgaggtggccaggacagctgactggagagatgtgtctgagctgctgaagcccctgggcctgtatgacctgcgggccaagaccatcgtgaagttcagtgatgagtacctgaccaagcagtggaagtaccccatcgagctgcatggaattggcaagtatggaaatgacagctaccgcatcttctgtgtgaatgagtggaagcaggtgcaccctgaggaccacaagctgaacaagtaccatgactggctgtgggagaaccacgagaagctgagcctgtcctag

SEQ ID NO: 142151 - DNA, 2470 bp, Artificial Sequence
  derived and/or modified sequence
ggcggctgtagccgagggggcggccggaaagcagcggcggcgtctggggcgctttcgcaacattcagacctcggttgcagcccggtgccgtgagctgaagaggtttcacatcttactccgccccacaccctgggcgttgcggcgctgggctcgttgctgcagccggaccctgctcgatgggcacgactgggctggagagtctgagtctgggggaccgcggagctgcccccaccgtcacctctagtgagcgcctagtcccagacccgccgaatgacctccgcaaagaagatgttgctatggaattggaaagagtgggagaagatgaggaacaaatgatgataaaaagaagcagtgaatgtaatcccttgctacaagaacccatcgcttctgctcagtttggtgctactgcaggaacagaatgccgtaagtctgtcccatgtggatgggaaagagttgtgaagcaaaggttatttgggaagacagcaggaagatttgatgtgtactttatcagcccacaaggactgaagttcagatccaaaagttcacttgctaattatcttcacaaaaatggagagacttctcttaagccagaagattttgattttactgtactttctaaaaggggtatcaagtcaagatataaagactgcagcatggcagccctgacatcccatctacaaaaccaaagtaacaattcaaactggaacctcaggacccgaagcaagtgcaaaaaggatgtgtttatgccgccaagtagtagttcagagttgcaggagagcagaggactctctaactttacttccactcatttgcttttgaaagaagatgagggtgttgatgatgttaacttcagaaaggttagaaagcccaaaggaaaggtgactattttgaaaggaatcccaattaagaaaactaaaaaaggatgtaggaagagctgttcaggttttgttcaaagtgatagcaaaagagaatctgtgtgtaataaagcagatgctgaaagtgaacctgttgcacaaaaaagtcagcttgatagaactgtctgcatttctgatgctggagcatgtggtgagaccctcagtgtgaccagtgaagaaaacagccttgtaaaaaaaaaagaaagatcattgagttcaggatcaaatttttgttctgaacaaaaaacttctggcatcataaacaaattttgttcagccaaagactcagaacacaacgagaagtatgaggatacctttttagaatctgaagaaatcggaacaaaagtagaagttgtggaaaggaaagaacatttgcatactgacattttaaaacgtggctctgaaatggacaacaactgctcaccaaccaggaaagacttcactggtgagaaaatatttcaagaagataccatcccacgaacacagatagaaagaaggaaaacaagcctgtatttttccagcaaatataacaaagaagctcttagccccccacgacgtaaagcctttaagaaatggacacctcctcggtcaccttttaatctcgttcaagaaacactttttcatgatccatggaagcttctcatcgctactatatttctcaatcggacctcaggcaaaatggcaatacctgtgctttggaagtttctggagaagtatccttcagctgaggtagcaagaaccgcagactggagagatgtgtcagaacttcttaaacctcttggtctctacgatcttcgggcaaaaaccattgtcaagttctcagatgaatacctgacaaagcagtggaagtatccaattgagcttcatgggattggtaaatatggcaacgactcttaccgaattttttgtgtcaatgagtggaagcaggtgcaccctgaagaccacaaattaaataaatatcatgactggctttgggaaaatcatgaaaaattaagtctatcttaaactctgcagctttcaagctcatctgttatgcatagctttgcacttcaaaaaagcttaattaagtacaaccaaccacctttccagccatagagattttaattagcccaactagaagcctagtgtgtgtgctttcttaatgtgtgtgccaatggtggatctttgctactgaatgtgtttgaacatgttttgagatttttttaaaataaattattatttgacaacaatccaaaaaaaatacggcttttccaatgatgaaatataatcagaagatgaaaaatagttctaaactatcaataatacaaagcaaatttctatcagccttgctaaagctaggggcccactaaatatttttatcggctaggcgtggtggtgcatgcctgtaatctcggaaggctgaggcaggaggatcatttgagctcatgagggcccaggaggtcaaggcttcagtgagccatgatcatgccactgcactccagtctggatgacagagagagaccctgtctcaaaaaatatatatttaaaaaataaaaataaaagctgaccccaaagac

SEQ ID NO: 142152 - DNA, 1743 bp, Artificial Sequence
  derived and/or modified sequence
atgggcaccaccggcctggagagcctgagcctgggcgaccggggcgccgcgcctacagtgacctcttccgagcgactggtgccagaccccccgaacgacttaaggaaggaggacgtggcgatggagctcgaaagagtgggggaagacgaagagcagatgatgatcaagagatccagcgaatgcaaccccctgctgcaagaacccatcgcctcggcccaatttggggctaccgctggcactgagtgtaggaagtctgtaccgtgcgggtgggagcgtgtagtaaagcagcggctattcgggaagactgccggacgctttgacgtctacttcatatctccacagggactcaagtttaggagcaagagtagtctggcaaactatttgcacaaaaatggcgagacgtccctgaagcctgaagactttgacttcaccgtcctcagcaagaggggaatcaagtcccgctataaagattgctcaatggccgcgctgacaagccatttgcagaatcagtccaataattctaactggaacctgcgaacccgctccaaatgtaaaaaagatgtctttatgcctccttcttcctcctccgagctgcaggaatccagaggactttcaaattttacgtcaacccacttgcttcttaaagaggacgagggcgtcgacgacgtgaatttccgaaaggtgaggaaaccaaaggggaaggtcactatcctgaaaggaatccccatcaagaagacaaaaaagggatgccgtaagtcgtgttctgggttcgtccagtcggattccaagagagagagcgtttgcaacaaggcagacgcagagtcggagcctgtggcccagaagtcccagctggataggacggtgtgtatttccgacgcgggtgcatgtggcgagaccctcagcgtgacttccgaggagaactcacttgtgaaaaaaaaagagcggtccctgtcttccggctctaacttttgcagtgaacagaaaacaagtggtatcattaataagttttgtagcgctaaagacagtgagcacaatgaaaaatatgaagataccttcttagagtccgaagagattgggactaaggtcgaggttgtggagaggaaagaacatctgcacaccgacattttaaagcgaggatctgagatggacaataactgttcacccacccgaaaagactttactggcgaaaaaatcttccaggaggacacaattccaaggactcagatcgaacgccgcaagacatctctgtatttctctagcaagtacaacaaggaggctctttcccctccccgtcggaaagcttttaagaaatggacacccccgagatcgccttttaacctagtacaggagacgctgtttcatgacccatggaaactgctcatcgcgaccattttcctcaatcggacctcaggcaagatggccatcccagttctttggaagtttttagagaaatatcctagcgctgaagtcgcgcgcaccgctgattggcgagacgtctctgagctgcttaagcccctcggcttgtatgacctccgcgcgaagactattgtcaagttttcagacgagtacctcactaagcagtggaaataccccatcgagctgcacggcatagggaagtacgggaacgatagttatagaatcttttgcgtaaatgagtggaaacaggtccacccggaagaccacaagctgaataaataccatgattggttgtgggagaatcacgagaagctctcgctctcctag

SEQ ID NO: 142153 - DNA, 1743 bp, Artificial Sequence
  derived and/or modified sequence
atgggaaccacagggttagagagtctcagcttaggagacagaggcgcagcgcctacggttacgagcagtgagcgcctggttcccgacccacctaacgacctgcggaaagaggacgtggcaatggagctcgaaagagtgggcgaggatgaagagcagatgatgataaaaagatcaagcgagtgtaatccactgttgcaggagcccatcgcatctgcgcagtttggagccacagccggaactgagtgccgcaagtctgtgccctgtgggtgggagcgggtggttaagcagcggctgttcgggaagacagctggcagatttgatgtgtacttcatctcgcctcagggtttaaaattcaggtccaagagtagtctggctaactatctgcacaagaacggggagacaagtttgaaacctgaagatttcgatttcacagttttaagcaagagaggaataaagagtagatacaaggactgctccatggccgctctaacaagccatttgcaaaatcaaagtaataatagcaactggaatttgcgcactcgctcaaagtgcaaaaaggatgttttcatgcccccatctagttcgtccgagctgcaagagagccgcggtctctcaaacttcacctctacccacctacttctcaaggaagatgaaggagtagacgacgtgaactttagaaaagttaggaagcccaaaggtaaagtaaccatcctgaagggaattccgataaaaaaaacgaagaaagggtgccgaaaaagctgctcaggcttcgtgcaatcagactccaagcgggaatccgtgtgcaataaggcagatgccgagtctgaacctgtcgcacagaagagtcagctcgaccggaccgtttgtatctccgatgcaggcgcttgtggggaaaccctgagtgtgacctctgaggagaattccctggtgaagaagaaggagcggagcctgagcagtggatcaaatttttgctctgaacagaagaccagcgggattattaacaagttctgcagtgccaaggattccgaacataatgagaagtatgaagatacctttctggagtctgaagagatcggcacaaaggtcgaggtggtggagaggaaggaacatctgcatactgatatcttaaaacgcggatccgaaatggataataactgctccccgacccgtaaggactttacaggagaaaagatcttccaggaggataccattccacgaacccagattgaacgtcggaagacaagtctttacttctcaagcaaatataacaaggaagctctgtctccgcctaggaggaaagcgttcaagaagtggactcctcccagatctccttttaacctggtgcaggagacgttattccatgacccctggaagctgttgattgcgactatctttctgaaccgcaccagcggaaaaatggctataccagtcttgtggaagtttctggaaaagtacccaagtgcagaagtggctcgcaccgccgattggagggatgtttctgagttgctcaaacccttgggcctgtacgaccttcgggctaaaactattgtcaagttcagcgatgagtacctgactaaacaatggaagtatccaatcgagctgcacggcatcggcaagtatggcaacgactcttataggattttctgcgttaatgagtggaaacaggtccatcctgaggaccacaagcttaacaagtatcacgactggttgtgggagaatcatgagaaactgagcctcagctag

SEQ ID NO: 142154 - protein, 411 aa, Artificial Sequence
  derived and/or modified sequence
MRAHPGGGRCCPEQEEGESAAGGSGAGGDSAIEQGGQGSALAPSPVSGVRREGARGGGRGRGRWKQAGRGGGVCGRGRGRGRGRGRGRGRGRGRGRPPSGGSGLGGDGGGCGGGGSGGGGAPRREPVPFPSGSAGPGPRGPRATESGKRMDCPALPPGWKKEEVIRKSGLSAGKSDVYYFSPSGKKFRSKPQLARYLGNTVDLSSFDFRTGKMMPSKLQKNKQRLRNDPLNQNKGKPDLNTTLPIRQTASIFKQPVTKVTNHPSNKVKSDPQRMNEQPRQLFWEKRLQGLSASDVTEQIIKTMELPKGLQGVGPGSNDETLLSAVASALHTSSAPITGQVSAAVEKNPAVWLNTSQPLCKAFIVTDEDIRKQEERVQQVRKKLEEALMADILSRAADTEEMDIEMDSGDEA

SEQ ID NO: 142155 - DNA, 1236 bp, Artificial Sequence
  derived and/or modified sequence
atgagggcccaccctggcggcggaagatgttgccctgagcaggaggagggtgaatctgcagcaggaggatcaggcgctgggggtgatagtgcaatcgagcaaggtggacaaggttccgccctcgcccctagcccggtttccggtgtgcggcgcgaaggtgcaagaggaggcggccgggggcgaggccgatggaagcaggccgggaggggaggtggcgtctgtggaaggggccgcggcaggggccgcgggcgcggcaggggtagaggccggggacgtggtcggggcaggccgccttcgggtggaagcgggctaggaggagatgggggtggctgtggcggaggtggcagcggtggcggaggggcaccccgccgggagcctgtcccttttccctccggctctgctggacccggaccgagaggacctagggcaacggaatctgggaaacgtatggattgtcctgctctaccgcctggatggaaaaaagaggaagtgattaggaagtcaggcttaagtgccggcaaatctgacgtgtattatttctcaccatccggcaagaagttcaggtccaagccgcagctcgcccggtacctaggaaacacagtcgatttgagtagcttcgatttccggaccgggaaaatgatgcccagtaaactccaaaagaacaagcagagattacgaaacgatccccttaaccagaataaggggaaacccgaccttaacactaccttgcctatcaggcagacagccagcatcttcaagcagccggtgaccaaggtgactaaccatcctagtaacaaagtgaagtcagacccacagagaatgaatgagcagccgaggcaactgttttgggagaagaggctccagggcctctcagcttccgacgttactgagcagattatcaaaaccatggaactgccaaagggcctgcaaggagtcggtccaggcagcaacgatgagacacttctatcagccgtggcctccgccctgcacacctcttcagcaccaataactgggcaggtgagcgcagctgttgaaaaaaatcctgctgtgtggctgaacacttctcaacctctctgcaaagcgttcatcgtcacagatgaggatattcgaaaacaggaagagcgggtgcaacaagtgaggaaaaagttggaggaggccctgatggcggacatcctttcaagagccgctgatacagaggagatggatatagagatggactccggcgatgaggcatag

SEQ ID NO: 142156 - DNA, 1236 bp, Artificial Sequence
  derived and/or modified sequence
atgagggcccaccctgggggcggccgctgctgcccagagcaggaggagggggagagcgctgctgggggcagcggggccggcggggacagcgccatcgagcagggcggccagggcagcgccctggcccccagccctgtgtctggagtgcggcgggagggcgcccggggcggcggccggggccggggccgctggaagcaggccggccggggcggcggcgtgtgtggccggggccggggccggggccggggccggggccggggccggggccggggccggggccggggccggcccccatctgggggcagcggcctgggcggagatggcggcggctgcggcggcggcggcagcggcggcggcggggccccccggcgggagcctgtgcccttccccagcggcagcgctggccctggcccccggggcccccgggccacagagagcggcaagaggatggactgcccagccctgcccccaggctggaagaaggaggaggtgatcaggaagagcggcctgtctgctgggaagagtgatgtgtactacttcagccccagcggcaagaagttccgcagcaagccccagctggcccgctacctgggcaacacagtggacctgagcagctttgacttcagaacaggcaagatgatgcccagcaagctgcagaagaacaagcagaggctgagaaatgaccccctgaaccagaacaagggcaagccagacctgaacaccaccctgcccatccggcagacagccagcatcttcaagcagcctgtgaccaaggtgaccaaccaccccagcaacaaggtgaagagtgacccccagaggatgaatgagcagccccggcagctgttctgggagaagaggctgcagggcctgagcgccagtgatgtgacagagcagatcatcaagaccatggagctgcccaagggcctgcagggcgtgggccctggcagcaatgatgagaccctgctgtctgctgtggccagcgccctgcacaccagcagcgcccccatcaccggccaggtgtctgctgctgtggagaagaacccagctgtgtggctgaacaccagccagcccctgtgcaaggccttcatcgtgacagatgaggacatcaggaagcaggaggagcgggtgcagcaggtgaggaagaagctggaggaggccctgatggctgacatcctgagcagagctgctgacacagaggagatggacatcgagatggattctggagatgaggcctag

SEQ ID NO: 142157 - DNA, 5188 bp, Artificial Sequence
  derived and/or modified sequence
gggggcgtggccccgagaaggcggagacaagatggccgcccatagcgcttggaggacctaagaggcggtggccggggccacgccccgggcaggagggccgctctgtgcgcgcccgctctatgatgcttgcgcgcgtcccccgcgcgccgcgctgcgggcggggcgggtctccgggattccaagggctcggttacggaagaagcgcagcgccggctggggagggggctggatgcgcgcgcacccggggggaggccgctgctgcccggagcaggaggagggggagagtgcggcgggcggcagcggcgctggcggcgactccgccatagagcaggggggccagggcagcgcgctcgccccgtccccggtgagcggcgtgcgcagggaaggcgctcggggcggcggccgtggccgggggcggtggaagcaggcgggccggggcggcggcgtctgtggccgtggccggggccggggccgtggccggggacggggacggggccggggccggggccgcggccgtcccccgagtggcggcagcggccttggcggcgacggcggcggctgcggcggcggcggcagcggtggcggcggcgccccccggcgggagccggtccctttcccgtcggggagcgcggggccggggcccaggggaccccgggccacggagagcgggaagaggatggattgcccggccctcccccccggatggaagaaggaggaagtgatccgaaaatctgggctaagtgctggcaagagcgatgtctactacttcagtccaagtggtaagaagttcagaagcaagcctcagttggcaaggtacctgggaaatactgttgatctcagcagttttgacttcagaactggaaagatgatgcctagtaaattacagaagaacaaacagagactgcgaaacgatcctctcaatcaaaataagggtaaaccagacttgaatacaacattgccaattagacaaacagcatcaattttcaaacaaccggtaaccaaagtcacaaatcatcctagtaataaagtgaaatcagacccacaacgaatgaatgaacagccacgtcagcttttctgggagaagaggctacaaggacttagtgcatcagatgtaacagaacaaattataaaaaccatggaactacccaaaggtcttcaaggagttggtccaggtagcaatgatgagacccttttatctgctgttgccagtgctttgcacacaagctctgcgccaatcacagggcaagtctccgctgctgtggaaaagaaccctgctgtttggcttaacacatctcaacccctctgcaaagcttttattgtcacagatgaagacatcaggaaacaggaagagcgagtacagcaagtacgcaagaaattggaagaagcactgatggcagacatcttgtcgcgagctgctgatacagaagagatggatattgaaatggacagtggagatgaagcctaagaatatgatcaggtaactttcgaccgactttccccaagagaaaattcctagaaattgaacaaaaatgtttccactggcttttgcctgtaagaaaaaaaatgtacccgagcacatagagctttttaatagcactaaccaatgcctttttagatgtatttttgatgtatatatctattattcaaaaaatcatgtttattttgagtcctaggacttaaaattagtcttttgtaatatcaagcaggaccctaagatgaagctgagcttttgatgccaggtgcaatctactggaaatgtagcacttacgtaaaacatttgtttcccccacagttttaataagaacagatcaggaattctaaataaatttcccagttaaagattattgtgacttcactgtatataaacatatttttatactttattgaaaggggacacctgtacattcttccatcatcactgtaaagacaaataaatgattatattcacagactgattggaattctttctgttgaaaagcacacacaataaagaacccctcgttagccttcctctgatttacattcaactctgatccctgggccttaggtttgacatggaggtggaggaagatagcgcatatatttgcagtatgaactattgcctctggacgttgtgagaattgtgctttcaccagaatttctaagaatttctgctaaatatcacctagcatgtgtaattttttttccttgcctgtgacttggacttttgatagttctataagaataaggctttttcttcccttgggcatgagtcagatacacaaggacccttcaggtgttactagaaggcgtccatgtttattgttttttaaagaatgtttggcactctctaacgtccactagcttactgagttatcaggtgcaggtcagactcttggctacagtgagaggcagcttctagacagagttgcttaatgaaagggtttgtaatactttacaaaccattacctgtacctggcctggcctccaaaatattaacattctttttctgttgaaactcgcgagtgtaactttcataccacttgaatttattgatatttaattatgaaaactagcattacattattaaacgatttctaaaatcaaaacatacttaatctgataccaaggaagggagggagtggttataagcaaatgaaaacaaattttgagagacagagcaaaagtaaaatcattctatagaaaaggtgtgtttatttcttaactcttgagttcttttaaaattagaacctaaatgatgcagtcaggggtatgaccaattccacatgagtgtcacctgtacattttattaccactacctccagtttccaaggcagggaagaagaggggaatagtcaaagcaatatgactagctaggtttgggctgctgtttgggctgctgtttttcctggacttttatgccaaactacataaatacttcttggaattcctgatttacgctcaactttgatccctggaccctagggccattagtttccttgaagcagtcctgctggtggatgagcagggaaacttgtagaccctgggaagccaattggtagagggtgcctgcccgccccatcagactgtcccaactggggtgggggtgaggatcatagtgatttctttttaaaagctagtatgactagtgagaatggatgtccaagggcttttctcttcctcccccgagtccacgattcttcatttgtgatcagggttggggtaacttcaccttggtgatcatatattctttttacaaaccaatccagccaagatatatgtgcttttctaaacagcttgtaaaagcaaaaacacaatgtatacacatataaaactgatttttttttttttgcttatatactttgctcaggtggagaacaaggtatgaaagccattatatggtgtcccttggggaccatcccataagtccagggtgttcccaatatacccacaagacaacatgttcaaaacttcatcacctggtccccacaaacctaccaccctcttccattccctcactctggtaaaagcaagccatcttctccagttacgcaaggcagaagcccaggagtgagcacaatgctgccctttcccttgcttctgacttctcatcaatcctattagaactactgactgcaccccacctctcctccatccccacgatcactgccttcatatgaactgcctttcctgtcctctggactttcagtggcttccttttttgctcacctgtccactttcttccccttccctctctccatccctccacatagtcatcagaaagatcatcaaaacaggcaaatgtgactgtattatttccctcacttatctttgtatgcagtttagagtgatttttaagagcacacactttgaaattaggagaacctgtgtctgaatcctgatttttgccatttgtgtgacttgtcaggttatttaatctctttgagcctgtccctcctcagtgaaataggaataataatacctacctcatagagttgttgtgaggattcagtgagatagactgtttctaaagtgtgtagcacagtgcctggcacatagtgggtgctcacattggagcacactattgtcgctatccctgcaggtgtgagttttacatcctttccaagaggcatttgctaataaccctaactaccgcctatccctgtgacactattttctgcctcagcaccctatttcttttgtagacattttctaagtctgtattttatttatttgttggctttttgtctatttctctactagaatgtaagctccatgagagcaaggatgtgtttgtctgatttcccgttacagccccagcacttagctgagtgactggcacctagtaagcactcagtaactgtttgctgaataaatggaagaatggtcaaaaggctcttcttgatctgatccctgcttgtctgtctggcctcatgctgccactattcctcactgcaccttcagctcaagaaaaacctctttacttgcttctttgaagtgccccttgggcctctgtgtctttgtacctgttgttccctttgcctgaaacaccctttgcctgcccgtctacatggtgaattcctaatcattgatgaagtctcagctcaatggctacctcctctgtgaagctgtccctgatttcttcaggcagatgttctttcccgccttccctgttcccaccgcactttgtaaatacctccatggaagcactttattgtattgtattgtaatttttttttgcatgtctgtttctactattagactgtaagcaccgtaaaagcagagattgtgctttttcatcctcatgttccccgagcctagcccagtgcctggcacgtaatagcttgtcattaaatatttgttgaatgaatctgtgaatgaacaagagtcatgcagttggaaaagtgttagaagctgtatgtattataaaggaaagaaatgcccttggtggcttccagggtgtttttttttttttttttggtctaaagaggagatctagagagtgttatacaatctctttgaatataagattactcgtttggatttttaaaataatatagatcttcataaataattgcaaagatataaacaagctttgtgatttctcaaatgctatgaagtccaaaataaatatttgcactattagtatttccatagtaaatgctatgagaaaatgtacagcaataaattttgaagctttaaaactgtt

SEQ ID NO: 142158 - DNA, 1236 bp, Artificial Sequence
  derived and/or modified sequence
atgcgggcccaccccggcggcggccggtgctgccccgagcaggaggaaggcgagagcgctgcaggcggctccggcgccgggggcgactctgcaatagagcagggagggcagggtagcgcgcttgcaccatcccctgtcagtggcgtcagacgggagggcgcccgtggcggtgggcggggcagaggccgttggaaacaggccgggcggggcggcggtgtttgtgggagaggcagaggacgcggcagggggcgcggacgcggtcgaggtcgtggtcggggcaggggccgtcctccgagcggcggtagcggcctcggaggcgacggcgggggctgtggcggagggggttctggtggaggtggtgccccccgccgcgaacctgttccctttccttctggcagtgcagggccgggcccccgcggcccaagagctactgaatccggtaagaggatggactgcccagctctgccaccaggctggaagaaggaggaagtgatcaggaagagcggcttgagtgccggaaagagcgatgtgtactacttcagtcctagtggtaagaagtttagatccaaacctcagctcgcccgctacctcggcaacactgtggacctgtcctcctttgactttaggacaggcaaaatgatgccgagcaaacttcagaaaaacaagcagcgtcttcgaaacgatcctctcaaccaaaacaagggaaagcccgacttgaacacaaccctgccgatcagacagactgcgtcaattttcaagcaaccggtcacaaaagtgacaaaccatccttccaataaagtcaagagtgatccgcagcggatgaatgagcaaccccggcagctattctgggagaaacgtctccagggcttgagtgcatcagacgtcacagagcaaattatcaaaactatggaactccccaagggcctgcagggggttggcccgggatccaacgatgaaacgctgctgtccgctgttgcctccgcgttgcacacatccagtgctcctatcacgggccaagtgagtgccgcggtggaaaagaaccccgcagtgtggttgaacacctctcagcccctgtgcaaggccttcatcgtgacagatgaagatataagaaaacaggaggagcgagttcagcaggtaagaaaaaagttggaagaggctttgatggccgatatactgtcgcgggccgcagataccgaagagatggacatcgagatggactcaggggatgaagcatag

SEQ ID NO: 142159 - DNA, 1236 bp, Artificial Sequence
  derived and/or modified sequence
atgcgcgcacatcctgggggaggcaggtgctgcccagagcaggaggaaggagagtccgcagcaggcggttccggggctggcggtgacagtgctatagagcagggagggcagggaagtgccctagctccgtcccctgtttcaggggtaaggcgggagggagcacgaggcggtgggcgaggacggggacgatggaagcaggcaggtagagggggaggcgtgtgcgggaggggacgtgggagaggtcgcggacgcggacggggaagaggcaggggcagaggccgagggagacctccttcggggggaagtggattaggaggtgacggtggaggctgcggagggggaggatcgggagggggtggtgctccacgtagggagcctgtccctttccccagcggatcagcaggtccgggaccccgtggtcctagagccacagagtcagggaagcggatggattgtcctgcgctgcccccagggtggaaaaaggaggaggtcattagaaagtcaggactcagtgctggcaaatcagacgtctactatttctcaccttctgggaagaagttcagatcgaagccgcagctggccaggtacttgggcaacaccgtcgatttatcatcattcgatttcagaactgggaaaatgatgccgtcgaaactccaaaagaacaagcagcgcctccgaaatgaccctcttaatcagaacaagggcaaacctgacctcaatacgacactgccgattcgccagactgctagtattttcaaacaacccgttacaaaagtcacaaatcatcctagcaacaaagtgaagtcagatcctcagaggatgaacgagcagcctaggcaattgttctgggaaaaaagactgcagggactgagtgcctccgacgtcacagagcaaattataaagactatggagttacctaaggggctgcaaggtgttggacctggatccaacgacgagaccctccttagcgccgtggcatcagctctacacacgagttcagctccaatcaccggacaggtgagcgccgctgttgagaaaaacccggcagtttggctgaataccagtcaaccactatgcaaggcatttatcgtgactgacgaggacatcaggaaacaggaagaacgcgttcaacaggtaagaaaaaagctagaagaggctctcatggctgatatacttagtcgggcagccgacaccgaggaaatggacatcgagatggactctggcgatgaagcttag

SEQ ID NO: 142160 - DNA, 1236 bp, Artificial Sequence
  derived and/or modified sequence
atgagagcccaccccggcggcggcagatgctgccccgagcaggaggagggcgagagcgccgccggcggcagcggcgccggcggcgacagcgccatcgagcagggcggccagggcagcgccctggcccccagccccgtgagcggcgtgagaagagagggcgccagaggcggcggcagaggcagaggcagatggaagcaggccggcagaggcggcggcgtgtgcggcagaggcagaggcagaggcagaggcagaggcagaggcagaggcagaggcagaggcagaggcagaccccccagcggcggcagcggcctgggcggcgacggcggcggctgcggcggcggcggcagcggcggcggcggcgcccccagaagagagcccgtgcccttccccagcggcagcgccggccccggccccagaggccccagagccaccgagagcggcaagagaatggactgccccgccctgccccccggctggaagaaggaggaggtgatcagaaagagcggcctgagcgccggcaagagcgacgtgtactacttcagccccagcggcaagaagttcagaagcaagccccagctggccagatacctgggcaacaccgtggacctgagcagcttcgacttcagaaccggcaagatgatgcccagcaagctgcagaagaacaagcagagactgagaaacgaccccctgaaccagaacaagggcaagcccgacctgaacaccaccctgcccatcagacagaccgccagcatcttcaagcagcccgtgaccaaggtgaccaaccaccccagcaacaaggtgaagagcgacccccagagaatgaacgagcagcccagacagctgttctgggagaagagactgcagggcctgagcgccagcgacgtgaccgagcagatcatcaagaccatggagctgcccaagggcctgcagggcgtgggccccggcagcaacgacgagaccctgctgagcgccgtggccagcgccctgcacaccagcagcgcccccatcaccggccaggtgagcgccgccgtggagaagaaccccgccgtgtggctgaacaccagccagcccctgtgcaaggccttcatcgtgaccgacgaggacatcagaaagcaggaggagagagtgcagcaggtgagaaagaagctggaggaggccctgatggccgacatcctgagcagagccgccgacaccgaggagatggacatcgagatggacagcggcgacgaggcctag

SEQ ID NO: 142161 - protein, 359 aa, Artificial Sequence
  derived and/or modified sequence
MPNPSSTSSPYPLPEEIRNLLADVETFVADILKGENLSKKAKEKRESLIKKIKDVKSIYLQEFQDKGDAEDGEEYDDPFAGPPDTISLASERYDKDDEAPSDGAQFPPIAAQDLPFVLKAGYLEKRRKDHSFLGFEWQKRWCALSKTVFYYYGSDKDKQQKGEFAIDGYSVRMNNTLRKDGKKDCCFEISAPDKRIYQFTAASPKDAEEWVQQLKFVLQDMESDIIPEDYDERGELYDDVDHPLPISNPLTSSQPIDDEIYEELPEEEEDSAPVKVEEQRKMSQDSVHHTSGDKSTDYANFYQGLWDCTGAFSDELSFKRGDVIYILSKEYNRYGWWVGEMKGAIGLVPKAYIMEMYDI

SEQ ID NO: 142162 - protein, 126 aa, Artificial Sequence
  derived and/or modified sequence
MTTRSVLDVETFVADILKGENLSKKAKEKRESLIKKIKDVKSIYLQEFQDKGDAEDGEEYDDPFAGPPDTISLASERYDKDDEAPSDGAQFPPIAAQDLPFVLKAGYLEKRRKDHSFLGFEWQKRW

SEQ ID NO: 142163 - protein, 344 aa, Artificial Sequence
  derived and/or modified sequence
MTTRSVLDVETFVADILKGENLSKKAKEKRESLIKKIKDVKSIYLQEFQDKGDAEDGEEYDDPFAGPPDTISLASERYDKDDEAPSDGAQFPPIAAQDLPFVLKAGYLEKRRKDHSFLGFEWQKRWCALSKTVFYYYGSDKDKQQKGEFAIDGYSVRMNNTLRKDGKKDCCFEISAPDKRIYQFTAASPKDAEEWVQQLKFVLQDMESDIIPEDYDERGELYDDVDHPLPISNPLTSSQPIDDEIYEELPEEEEDSAPVKVEEQRKMSQDSVHHTSGDKSTDYANFYQGLWDCTGAFSDELSFKRGDVIYILSKEYNRYGWWVGEMKGAIGLVPKAYIMEMYDI

SEQ ID NO: 142164 - protein, 187 aa, Artificial Sequence
  derived and/or modified sequence
MNNTLRKDGKKDCCFEISAPDKRIYQFTAASPKDAEEWVQQLKFVLQDMESDIIPEDYDERGELYDDVDHPLPISNPLTSSQPIDDEIYEELPEEEEDSAPVKVEEQRKMSQDSVHHTSGDKSTDYANFYQGLWDCTGAFSDELSFKRGDVIYILSKEYNRYGWWVGEMKGAIGLVPKAYIMEMYDI

SEQ ID NO: 142165 - DNA, 1080 bp, Artificial Sequence
  derived and/or modified sequence
atgcccaaccccagcagcaccagcagcccctaccccctgcccgaggagatcagaaacctgctggccgacgtggagaccttcgtggccgacatcctgaagggcgagaacctgagcaagaaggccaaggagaagagagagagcctgatcaagaagatcaaggacgtgaagagcatctacctgcaggagttccaggacaagggcgacgccgaggacggcgaggagtacgacgaccccttcgccggcccccccgacaccatcagcctggccagcgagagatacgacaaggacgacgaggcccccagcgacggcgcccagttcccccccatcgccgcccaggacctgcccttcgtgctgaaggccggctacctggagaagagaagaaaggaccacagcttcctgggcttcgagtggcagaagagatggtgcgccctgagcaagaccgtgttctactactacggcagcgacaaggacaagcagcagaagggcgagttcgccatcgacggctacagcgtgagaatgaacaacaccctgagaaaggacggcaagaaggactgctgcttcgagatcagcgcccccgacaagagaatctaccagttcaccgccgccagccccaaggacgccgaggagtgggtgcagcagctgaagttcgtgctgcaggacatggagagcgacatcatccccgaggactacgacgagagaggcgagctgtacgacgacgtggaccaccccctgcccatcagcaaccccctgaccagcagccagcccatcgacgacgagatctacgaggagctgcccgaggaggaggaggacagcgcccccgtgaaggtggaggagcagagaaagatgagccaggacagcgtgcaccacaccagcggcgacaagagcaccgactacgccaacttctaccagggcctgtgggactgcaccggcgccttcagcgacgagctgagcttcaagagaggcgacgtgatctacatcctgagcaaggagtacaacagatacggctggtgggtgggcgagatgaagggcgccatcggcctggtgcccaaggcctacatcatggagatgtacgacatctag

SEQ ID NO: 142166 - DNA, 381 bp, Artificial Sequence
  derived and/or modified sequence
atgaccaccagaagcgtgctggacgtggagaccttcgtggccgacatcctgaagggcgagaacctgagcaagaaggccaaggagaagagagagagcctgatcaagaagatcaaggacgtgaagagcatctacctgcaggagttccaggacaagggcgacgccgaggacggcgaggagtacgacgaccccttcgccggcccccccgacaccatcagcctggccagcgagagatacgacaaggacgacgaggcccccagcgacggcgcccagttcccccccatcgccgcccaggacctgcccttcgtgctgaaggccggctacctggagaagagaagaaaggaccacagcttcctgggcttcgagtggcagaagagatggtag

SEQ ID NO: 142167 - DNA, 3998 bp, Artificial Sequence
  derived and/or modified sequence
aggctctttcttctggggccgggaaaaccgaggaatacacatgcgcagttggacccctcaggcccttcgtgtcccttcccacccatctccccgccccggccctctgggcggggctgggccgacagtccagctgcagctcgctggagattcagtgacttccttgttgtgagccccggcccggcagtgtcccgactcgtagccccgctgttcttaatccgggccgctagcctgagtctaggtcgcagccgcagccccaccccgtcggtcaccttttcagcgcaggtcctttccccgcacgccctgcgctccctaacatgcccaaccccagcagcacctcctctccctaccccctccctgaggaaattaggaacctgttggcagatgttgaaacatttgtagcagatatactgaaaggagaaaatttatccaagaaagcaaaggaaaagagagaatcccttattaagaagataaaagatgtaaagtctatctatcttcaggaatttcaagacaaaggtgatgcagaagatggggaagaatatgatgacccttttgctgggcctccagacactatttcattagcctcagaacgatatgataaagacgatgaagccccctctgatggagcccagtttcctccaattgcagcacaagaccttccttttgttctaaaggctggctaccttgaaaaacgcagaaaagatcacagctttctgggatttgaatggcagaaacggtggtgtgctctcagtaaaacggtattctattattatggaagtgataaagacaaacaacagaaaggtgaatttgcaatagatggctacagtgtcagaatgaataacactctaagaaaggatggaaagaaagattgctgttttgaaatctctgctcctgataaacgtatatatcagtttacagcagcttctcccaaagatgctgaagaatgggtacagcagctgaaatttgtattgcaagatatggaatctgatattattcctgaggattatgatgagagaggagaattatatgatgatgttgatcatcctctaccaataagcaatccactaacaagcagtcaaccaatagatgatgaaatttatgaagaacttccagaagaagaagaggacagtgctccagtgaaagtggaagaacaaaggaagatgagtcaggatagtgtccatcacacctcaggggataagagcactgattatgctaatttttaccagggattgtgggattgtactggagctttttctgatgagttgtcatttaagcgtggtgatgtgatttacattcttagcaaggaatacaatagatatggctggtgggtaggagaaatgaagggagccattggcttggtgcctaaagcctacataatggagatgtatgatatttgagagtcctggaaaaggaaaattcttctgcttgtctgcaaatgctttggatttagaagcgtcatgaaagcacgagtgacagctcctaacctctccttgttttattaaacattacttatctttgactgttattttatgcagtcgctcattaaaatattcctctgatgtgaaattaaatgaaggatattaatgtaaattagatgcaaccagttaagttatacctgttgctattttgcaaagaaataattatagtttttatttacccatttgatttgtgtgaagaattcatcactattttatacgtaacatatagtctactatagcatagtatgctactattgctacttctggtgtgatttgtaatgtttcttaatcattggacatcaattatttttagagagtaatgtataatttcatagcattttaaatttagtgtatcatgcgagttttttttggtagatgctgaagaatgtggttgctaaacaaagaatgctaaagaatgttcaaactttatagataactttattgttattatttattttcacacatttaattcctattaagtacagccgcaagaaagaaaaaatgatgaagttgcaaatggcagtgtgctgtcacctgcaacagaagtgcgtaccagaagtatgactcatgcaaagcattttaccgtacaaatatcctggtgcgatgatgggcctggcaacattttctactgtacttttgtttaaatttaatgaaacaaaaaattcctaagaaataccaccctaccactaacaaaatggtataaagaatctcccagccaggccaacatggtgaaaccctgtctctactaaaaattagccaagtgtggtaatgttcacctgcagtcccagctacttgggaggccaaggcacgagaattgcttgaacaaggtaggcagaggttgcagtgagccaagatcgcgccactgcactccagcctgggcgacagagtgagactccatctcagaaaaaaaaaaaaaaaaaaacagaatctcagtgtattctcaaagtaaaaaggcataaccaagcactctcttatcttgccttattgctatactatttacatcccactgcagaacagcagatttgaggcttttctatatacttctcagagcactgaaaagaaaggaagggtttgcagaggagagtgtagaaatcccagtggtagcatgtaccaacaggtgagtagaaaggtagtgttagcctgacatttgagttatactctgtgctgcctgagcaagatttgtagaatcatataattaccttttcatgtatatttgaaatcagaggtgtttaaaatacctatgagataccaatgtagccttaacatatgtcaaaatgcattgctggttagataattatttggactacacataaactcctaatattgaatcattacctatcaggtattatctttatggaacttttcaatatctttgctttataaagattctaaacatgtatctgagctggtaatattttaaaatctccattatttgtgtaaaactgtttataagcagtgtttgagagggtctgctttaccattaccccctcaatatcatgatcatccaatctcaaatgtgaaaaaaaaaaagaaatttgattttagggattgtgagtaaacaagtttatatagagagacattgtgaagttaaagttttcagaagttacatttgtgcagttcttaccttttcctcatatagtgccattgaaatagactgaaattatcttggcaaaagttagacaaccaaagacgactttagtggactggttttcaaaacttgagcagctgaaaagcaaaagccgttgtttcccatgacaatgtagcctttgtggatttgggtttgtgctttgggttgaaaagaagtttttagtcctaggccagtagatggcagcagcttttcattgcagacaaaacctcttgaaacccttcccccatggcacaaactcgcccatgatggaaagcatctagatttctgcctccttttacagttaatccaggagagggagtcctttgccaactgatgaccaacagttccaagccagatagtctcgtgaacagtgacaatacagaaataaggtgttatttctgttcagatctccaccggcctttgttcttttaaaacttgaatataggtgggagacataagaaaggaaagaaaagacttaaaactggagtgacaggacaaataatcattactttcaattcatgactgctttatattcatttgatgaaatcatttgtatacaaaccagggagagttttctttacacccttgacaatatatcacatactcttcaagatcataataatatcattaatataaatttaaacaacatggcttgttagaaaatatgctaattgctatggtctcattatgtttgcttagcttttatttgtttttctgtgaacagttagagagctaatttttttcaaaggtgattgtaagtcatattttatatagcattttgcttgattatttgctctgtactgaatttgtactctattgccattagatcttacaataatgttccactctgcaaatttttaaggttcaaataaagtttaattgtttgcaaactgtta

SEQ ID NO: 142168 - DNA, 1035 bp, Artificial Sequence
  derived and/or modified sequence
atgaccaccagaagcgtgctggacgtggagaccttcgtggccgacatcctgaagggcgagaacctgagcaagaaggccaaggagaagagagagagcctgatcaagaagatcaaggacgtgaagagcatctacctgcaggagttccaggacaagggcgacgccgaggacggcgaggagtacgacgaccccttcgccggcccccccgacaccatcagcctggccagcgagagatacgacaaggacgacgaggcccccagcgacggcgcccagttcccccccatcgccgcccaggacctgcccttcgtgctgaaggccggctacctggagaagagaagaaaggaccacagcttcctgggcttcgagtggcagaagagatggtgcgccctgagcaagaccgtgttctactactacggcagcgacaaggacaagcagcagaagggcgagttcgccatcgacggctacagcgtgagaatgaacaacaccctgagaaaggacggcaagaaggactgctgcttcgagatcagcgcccccgacaagagaatctaccagttcaccgccgccagccccaaggacgccgaggagtgggtgcagcagctgaagttcgtgctgcaggacatggagagcgacatcatccccgaggactacgacgagagaggcgagctgtacgacgacgtggaccaccccctgcccatcagcaaccccctgaccagcagccagcccatcgacgacgagatctacgaggagctgcccgaggaggaggaggacagcgcccccgtgaaggtggaggagcagagaaagatgagccaggacagcgtgcaccacaccagcggcgacaagagcaccgactacgccaacttctaccagggcctgtgggactgcaccggcgccttcagcgacgagctgagcttcaagagaggcgacgtgatctacatcctgagcaaggagtacaacagatacggctggtgggtgggcgagatgaagggcgccatcggcctggtgcccaaggcctacatcatggagatgtacgacatctag

SEQ ID NO: 142169 - DNA, 1080 bp, Artificial Sequence
  derived and/or modified sequence
atgcccaacccgtcaagtacctccagtccttacccattgccagaagagatccgtaacctgctagcagacgtcgaaaccttcgtagccgatattctaaaaggcgaaaatctgtcaaagaaagcaaaggagaaacgggaaagtttgataaagaaaataaaggacgtcaagtccatctacctgcaggagttccaggacaagggggatgctgaagatggcgaagaatacgatgacccgtttgccggacctcctgacacaattagcctagctagtgagcgctatgataaagacgacgaggctccgagcgatggagcacagttccccccaattgccgcccaggatctgccctttgtcttgaaggccgggtacttagagaagcggcgcaaagatcactcgtttcttggttttgaatggcagaaacgatggtgtgcactgtctaagactgtgttttattactatggctccgataaggataagcagcaaaagggcgagttcgctattgatggctactccgtgcggatgaacaacacactgcgaaaggatggtaaaaaggattgctgcttcgagatcagcgcgcccgacaagcgaatctatcaatttaccgcggcttctcccaaggatgcagaagaatgggtgcaacagctgaagtttgttctgcaagatatggaatcagatataattcccgaggactacgacgaaaggggcgaattgtacgatgatgtcgatcaccccctgcctatctccaatccgctgacctcctcgcagcccatcgatgatgagatctacgaagaactgccggaggaagaggaagacagcgcccctgtgaaggtggaagaacagcggaagatgtcgcaggactcagtccatcacactagcggagataaatctacggactacgccaacttttaccaggggttgtgggactgcaccggggctttttctgatgagcttagtttcaagaggggggacgtcatttacatactaagcaaagaatacaacaggtacggctggtgggtcggcgaaatgaagggcgcgatcgggctagtgcctaaggcgtacattatggagatgtacgatatatag

SEQ ID NO: 142170 - DNA, 381 bp, Artificial Sequence
  derived and/or modified sequence
atgacgacccgttccgttcttgacgtggagaccttcgttgccgacattttgaagggcgagaacctgtctaagaaagcaaaggaaaagagagagagtttgattaagaagattaaggatgtcaagagtatatatctgcaggagtttcaagataaaggagacgcagaggatggagaggaatatgatgacccctttgcgggtccaccagatacaatttctctggcctccgaacggtatgacaaggacgacgaggctcccagtgacggcgcccagtttccccccatagcagcccaagatttacctttcgtccttaaagcaggctatctggaaaagaggcggaaagatcactccttcctcgggttcgaatggcagaaacggtggtag

SEQ ID NO: 142171 - DNA, 1035 bp, Artificial Sequence
  derived and/or modified sequence
atgaccacgagaagtgtgctggatgtggaaacttttgtggccgatatcctgaagggtgagaatctgtccaaaaaagccaaggagaagcgcgagtccctgatcaagaagattaaagatgtgaaatcgatttacctgcaggagtttcaggacaaaggcgatgccgaggatggagaggagtacgacgatcccttcgccgggccgcccgataccatctctctggcctcggagagatacgacaaagacgacgaggcccccagcgacggggcccaattcccaccgatcgccgcccaggaccttccctttgtactcaaagctggatacctggagaagcggagaaaagatcatagcttcctgggatttgagtggcaaaaaaggtggtgcgccctgtccaaaacggtgttctattattatggatcggacaaggacaagcagcagaaaggcgaatttgctatcgacgggtattccgtcagaatgaacaacaccctgcggaaagacggaaagaaagactgctgctttgagattagcgctccagacaagagaatataccaattcaccgccgcctcgcccaaagatgccgaggaatgggtgcagcaactcaaattcgtgctgcaggatatggagtccgacatcatacccgaggactacgacgagagaggagagctctacgacgatgtagaccatcctctgccaatctcaaacccgttgacttcatcacaaccaatcgacgacgagatctatgaagagctgcctgaggaggaagaggacagcgctcccgttaaggtagaggaacagcgtaagatgagtcaggattctgtgcaccacacgtcgggtgacaagagtacagattacgcgaatttttaccagggtttatgggactgtactggagcctttagcgatgagttgtcatttaagcgaggcgatgtgatttacatccttagtaaggagtataatcggtacggttggtgggtgggcgagatgaaaggcgctattggactcgtgccgaaagcatatataatggagatgtatgacatctag

SEQ ID NO: 142172 - DNA, 1080 bp, Artificial Sequence
  derived and/or modified sequence
atgcccaaccccagcagcaccagcagcccctaccccctgcctgaggagatccggaacctgctggctgatgtggagacctttgtggccgacatcctgaagggggagaacctgagcaagaaggccaaggagaagcgggagagcctcatcaagaagatcaaggatgtgaagagcatctacctgcaggagttccaggacaagggagatgctgaagatggagaggagtatgatgacccctttgctggccccccagacaccatcagcctggccagcgagagatatgacaaggatgatgaggcccccagtgatggagcccagtttcctcccatcgccgcccaggacctgccctttgtgctgaaggccggctacctggagaagaggaggaaggaccacagcttcctgggctttgagtggcagaagcgctggtgtgccctgagcaagacagtgttctactactacggcagtgacaaggacaagcagcagaagggggagtttgccattgatggctacagcgtgaggatgaacaacaccctgaggaaggatggcaagaaggactgctgctttgagatcagcgccccagacaagaggatctaccagttcaccgctgccagccccaaggatgctgaggagtgggtgcagcagctgaagtttgtgctgcaggacatggagagtgacatcatccctgaggactatgatgagcggggggagctgtatgatgatgtggaccaccccctgcccatcagcaaccccctgaccagcagccagcccattgatgatgagatctatgaggagctgcctgaggaggaggaggacagcgcccctgtgaaggtggaggagcagaggaagatgagccaggacagcgtgcaccacaccagcggggacaagagcacagattatgccaacttctaccagggcctgtgggactgcacaggagccttcagtgatgagctgtccttcaagagaggagatgtgatctacatcctgagcaaggagtacaacagatatggctggtgggtgggggagatgaagggggccatcggcctggtgcccaaggcctacatcatggagatgtatgacatctag

SEQ ID NO: 142173 - DNA, 381 bp, Artificial Sequence
  derived and/or modified sequence
atgaccaccaggtctgtgctggatgtggagacctttgtggccgacatcctgaagggggagaacctgagcaagaaggccaaggagaagcgggagagcctcatcaagaagatcaaggatgtgaagagcatctacctgcaggagttccaggacaagggagatgctgaagatggagaggagtatgatgacccctttgctggccccccagacaccatcagcctggccagcgagagatatgacaaggatgatgaggcccccagtgatggagcccagttcccccccatcgccgcccaggacctgccctttgtgctgaaggccggctacctggagaagaggaggaaggaccacagcttcctgggctttgagtggcagaagcgctggtag

SEQ ID NO: 142174 - DNA, 1035 bp, Artificial Sequence
  derived and/or modified sequence
atgaccaccaggtctgtgctggatgtggagacctttgtggccgacatcctgaagggggagaacctgagcaagaaggccaaggagaagcgggagagcctcatcaagaagatcaaggatgtgaagagcatctacctgcaggagttccaggacaagggagatgctgaagatggagaggagtatgatgacccctttgctggccccccagacaccatcagcctggccagcgagagatatgacaaggatgatgaggcccccagtgatggagcccagttcccccccatcgccgcccaggacctgccctttgtgctgaaggccggctacctggagaagaggaggaaggaccacagcttcctgggctttgagtggcagaagcgctggtgtgccctgagcaagacagtgttctactactacggcagtgacaaggacaagcagcagaagggggagtttgccattgatggctacagcgtgaggatgaacaacaccctgaggaaggatggcaagaaggactgctgctttgagatcagcgccccagacaagaggatctaccagttcaccgctgccagccccaaggatgctgaggagtgggtgcagcagctgaagtttgtgctgcaggacatggagagtgacatcatcccagaagattatgatgagcggggggagctgtatgatgatgtggaccaccccctgcccatcagcaaccccctgaccagcagccagcccattgatgatgagatctatgaggagctgcctgaggaggaggaggacagcgcccctgtgaaggtggaggagcagaggaagatgagccaggacagcgtgcaccacaccagcggggacaagagcacagattatgccaacttctaccagggcctgtgggactgcaccggggccttcagtgatgagctgtccttcaagagaggagatgtgatctacatcctgagcaaggagtacaacagatatggctggtgggtgggggagatgaagggggccatcggcctggtgcccaaggcctacatcatggagatgtatgacatctag

SEQ ID NO: 142175 - DNA, 1080 bp, Artificial Sequence
  derived and/or modified sequence
atgcccaaccccagcagcaccagcagcccctaccccctgcccgaggaaatcagaaatctgctggcagatgtagagaccttcgtcgcggatattttgaagggtgagaatctatccaaaaaggcaaaggaaaagcgagaatcgctaatcaagaagattaaagacgtgaagtcaatctacttgcaggagtttcaagataagggggacgcggaagatggcgaggagtatgacgatccgtttgccgggcccccggacaccataagtcttgcctcagaaaggtacgataaggatgacgaagccccgagcgacggcgctcaatttcctccaattgcagcgcaggaccttccattcgtgctgaaggcaggctacttagaaaagcggaggaaagatcactcattccttggatttgaatggcagaaaagatggtgtgccctgtctaaaacagtcttttattactatgggagcgacaaagacaaacaacagaagggcgagttcgcaattgatggctacagtgtgcgtatgaataacaccctgcgcaaagacggcaaaaaagactgttgttttgagatcagtgcccctgacaagagaatataccagtttaccgcagcctcccccaaagatgcagaggagtgggttcagcaactgaaattcgtcttgcaggacatggaatccgatattattcccgaagattacgacgagcgcggagagctttacgacgatgtagatcatccactcccaatcagtaatcctttgacctctagtcagcctattgatgatgagatttacgaggaactccccgaagaagaggaagactctgcacccgtaaaggtggaagaacagcggaaaatgtctcaagatagtgttcatcacactagtggagataaaagtacggactacgccaatttctaccagggcctgtgggattgcactggtgcattttccgatgagctgagctttaagcggggtgatgtgatctacattctaagcaaggagtataacaggtatggctggtgggtgggggaaatgaagggtgcgatcggactcgtgcccaaagcctacataatggaaatgtacgatatatag

SEQ ID NO: 142176 - DNA, 381 bp, Artificial Sequence
  derived and/or modified sequence
atgaccacccggagcgtgctggacgtggagaccttcgtggccgacattttaaaaggcgagaatctcagcaagaaggctaaggaaaagcgcgaatccctgatcaaaaagattaaagacgtgaaatccatctacttgcaagaattccaggacaaaggcgatgctgaggacggggaggaatacgatgacccttttgctggaccccctgacaccattagcctggcaagcgagagatatgataaggacgatgaggcgccctcagacggggcccagttcccacccatcgctgctcaggatctgccttttgttctgaaggccggatatctagagaagcgtcgtaaagaccactctttcctgggatttgagtggcaaaagaggtggtag

SEQ ID NO: 142177 - DNA, 1035 bp, Artificial Sequence
  derived and/or modified sequence
atgaccacccggagcgtgctggacgtggagaccttcgtggccgacattctcaaaggtgagaatctaagcaaaaaggcaaaagaaaagcgcgagtcactgattaagaaaattaaggacgtcaaatctatttatctgcaggagttccaggacaagggggatgcggaggacggtgaagaatacgatgaccccttcgctggccccccagataccatatccctagcgagcgaaagatacgacaaggacgacgaagctccgagtgatggggcacagttcccgcctatcgcggctcaggatctgccttttgtcctcaaggcaggataccttgagaagaggcgaaaggaccattcattccttggcttcgaatggcagaaaaggtggtgcgctctttcaaaaactgtgttttactactatggaagcgataaggataagcagcaaaaaggcgagtttgccattgacggctactccgtgcgcatgaacaacaccctgagaaaggatggcaaaaaggattgctgcttcgagatctccgcacccgataagagaatataccaatttacagcagcgagtcccaaagacgctgaagaatgggtgcagcagctgaaattcgttttacaggatatggaaagtgatatcatacctgaagactatgatgaaagaggtgaattgtatgatgacgttgaccatccacttcctatttcaaatcccctcacaagctctcaaccgatagacgacgaaatctatgaggagctcccggaagaggaggaggacagcgcacctgtaaaagttgaagaacagcggaaaatgagccaggatagcgtgcaccatacatcgggcgacaaaagcactgactacgccaatttctatcaggggctatgggactgtacgggggcgttttcagacgagctgagcttcaagagaggggatgtcatatacatcctctccaaagagtataaccgttacggatggtgggttggagagatgaaaggagctattgggctcgtgcctaaggcatatattatggaaatgtacgatatctag

SEQ ID NO: 142178 - DNA, 1080 bp, Artificial Sequence
  derived and/or modified sequence
atgcctaatccaagctcaacctcaagcccatatcctctgcccgaggaaattcgcaacctgttggctgatgtcgaaactttcgtcgcagacatcttgaaaggggagaatctgtcaaagaaggctaaggaaaaacgagagagcttaattaagaagatcaaggatgtgaagagcatctacttgcaggaattccaggacaaaggggacgctgaagatggggaagagtacgatgatccattcgcaggtccacccgacacaatatccctagccagcgaacggtacgacaaagacgatgaggccccatccgacggggcacagttcccgcctattgccgcacaagatttgccctttgtcctcaaggccggttacttggaaaaacggagaaaagaccattcattcttggggttcgaatggcagaagcggtggtgcgccctcagcaagacagtgttttactattatgggtccgacaaagacaagcagcagaaaggggagtttgccatcgacggatattctgtgaggatgaataacaccctccgcaaagatggtaagaaggactgttgctttgaaatctctgccccagacaagagaatataccagtttaccgcagcctctcccaaggacgccgaggagtgggtgcagcagctgaagttcgtgcttcaagatatggagagcgatataataccggaagattatgacgaacgaggcgaattgtacgacgatgtcgaccatcccctccccatttctaatccactgacctccagtcagccaattgacgatgagatatacgaggagcttcctgaggaagaggaggactcagcccctgtgaaggttgaagaacagcggaaaatgagtcaggatagcgtgcatcacacctccggcgacaaaagtacagattacgccaacttttatcaaggcctgtgggattgcacaggggctttcagcgacgagttgtctttcaagaggggagatgtgatatatattctgtctaaagaatataaccgctacggttggtgggtcggtgagatgaagggagctataggactcgtccccaaggcatacataatggaaatgtatgacatttag

SEQ ID NO: 142179 - DNA, 381 bp, Artificial Sequence
  derived and/or modified sequence
atgaccacccgtagtgtgctggacgtcgaaaccttcgtggccgatatacttaagggtgaaaatttgtccaaaaaagcaaaagaaaagagggagagcctcatcaagaagatcaaagatgtgaaaagcatctacctccaggaatttcaggataagggcgatgcagaggatggcgaggaatatgatgacccgtttgcaggtccacctgatacaataagcctagcttcagaacggtatgataaagacgacgaggcaccttccgacggtgctcagtttccgccaatcgccgcacaggatttaccctttgtgctgaaggctggatatctcgaaaagcgaagaaaagatcactcattcttgggcttcgagtggcaaaagcgatggtag

SEQ ID NO: 142180 - DNA, 1035 bp, Artificial Sequence
  derived and/or modified sequence
atgacaacacggtctgtcttggacgtcgaaacgtttgtggccgatattctgaaaggagagaacttgtcaaaaaaggccaaggagaaacgggagagcctcattaaaaaaatcaaagatgttaaaagcatctacttacaggagtttcaggataaaggcgacgcagaggacggcgaagagtacgacgaccctttcgcaggccctccggacactatctctttggccagtgagcgttatgataaagacgatgaggctccgagcgacggagcccagttcccccctatcgcagcccaagacttaccctttgtcctcaaggctggttatctggaaaagcgccgaaaggaccattcctttctgggtttcgaatggcagaagagatggtgtgctctgtcaaagacagtcttctactactatggatctgacaaggacaaacagcagaagggtgaatttgcaattgatggttactccgtcagaatgaacaataccttgcggaaggatgggaaaaaggactgctgcttcgagattagcgcaccagataagaggatttaccaatttaccgccgcttcccccaaggacgcagaggaatgggtgcagcagctgaaatttgttctccaggacatggagtctgatattattcctgaagattacgatgagcgcggagaactgtacgacgacgtagatcaccccctacccattagtaatccgctgacctcaagccaacccattgatgacgaaatatatgaggaactccccgaggaggaagaggatagtgcccctgtcaaagtggaagaacaacgcaagatgtcacaggacagtgtccatcacaccagtggcgacaagtccactgattacgccaacttctaccagggcctgtgggactgtaccggggcattcagcgacgagttatcctttaaaaggggcgacgtgatatacatcctgtctaaagagtataaccggtatggctggtgggtgggggaaatgaagggcgcaattgggcttgtaccaaaggcctacatcatggaaatgtatgatatctag

SEQ ID NO: 142181 - DNA, 577 bp, Artificial Sequence
  derived and/or modified sequence
aatttttctctgcttgttggacatgaagagagggagacaaaggctctcagaaagagaaagacgggctggtgaaggacaaactaaggaatttgattattcacttttccaagataaagtggcatggagtggggaaagaccattaaggaatgctgaacataaaggaatcctggggacctgaccctcagttaagacataagaatgacaaccaggagtgtgctcgatgttgaaacatttgtagcagatatactgaaaggagaaaatttatccaagaaagcaaaggaaaagagagaatcccttattaagaagataaaagatgtaaagtctatctatcttcaggaatttcaagacaaaggtgatgcagaagatggggaagaatatgatgacccttttgctgggcctccagacactatttcattagcctcagaacgatatgataaagacgatgaagccccctctgatggagcccagtttcctccaattgcagcacaagaccttccttttgttctaaaggctggctaccttgaaaaacgcagaaaagatcacagctttctgggatttgaatggcagaaacggtggt

SEQ ID NO: 142182 - DNA, 1351 bp, Artificial Sequence
  derived and/or modified sequence
ctgcttgttggacatgaagagagggagacaaaggctctcagaaagagaaagacgggctggtgaaggacaaactaaggaatttgattattcacttttccaagataaagtggcatggagtggggaaagaccattaaggaatgctgaacataaaggaatcctggggacctgaccctcagttaagacataagaatgacaaccaggagtgtgctcgatgttgaaacatttgtagcagatatactgaaaggagaaaatttatccaagaaagcaaaggaaaagagagaatcccttattaagaagataaaagatgtaaagtctatctatcttcaggaatttcaagacaaaggtgatgcagaagatggggaagaatatgatgacccttttgctgggcctccagacactatttcattagcctcagaacgatatgataaagacgatgaagccccctctgatggagcccagtttcctccaattgcagcacaagaccttccttttgttctaaaggctggctaccttgaaaaacgcagaaaagatcacagctttctgggatttgaatggcagaaacggtggtgtgctctcagtaaaacggtattctattattatggaagtgataaagacaaacaacagaaaggtgaatttgcaatagatggctacagtgtcagaatgaataacactctaagaaaggatggaaagaaagattgctgttttgaaatctctgctcctgataaacgtatatatcagtttacagcagcttctcccaaagatgctgaagaatgggtacagcagctgaaatttgtattgcaagatatggaatctgatattattcctgaggattatgatgagagaggagaattatatgatgatgttgatcatcctctaccaataagcaatccactaacaagcagtcaaccaatagatgatgaaatttatgaagaacttccagaagaagaagaggacagtgctccagtgaaagtggaagaacaaaggaagatgagtcaggatagtgtccatcacacctcaggggataagagcactgattatgctaatttttaccagggattgtgggattgtactggagctttttctgatgagttgtcatttaagcgtggtgatgtgatttacattcttagcaaggaatacaatagatatggctggtgggtaggagaaatgaagggagccattggcttggtgcctaaagcctacataatggagatgtatgatatttgagagtcctggaaaaggaaaattcttctgcttgtctgcaaatgctttggatttagaagcgtcatgaaagcacgagtgacagctcctaacctctccttgttttattaaacattacttatctttgactgtt

SEQ ID NO: 142183 - DNA, 1420 bp, Artificial Sequence
  derived and/or modified sequence
agagctggagcatctcgcagccctacaacttctttgcggcgcttggtctgtctttgcgttgcgagatcaggatcggtgtgttgctcagacaccggccgaacgccaccggcacgtctaggagtctcctgtgcctggaagaggctggtttcattcgattctaaaagaaacggatgttgaaacatttgtagcagatatactgaaaggagaaaatttatccaagaaagcaaaggaaaagagagaatcccttattaagaagataaaagatgtaaagtctatctatcttcaggaatttcaagacaaaggtgatgcagaagatggggaagaatatgatgacccttttgctgggcctccagacactatttcattagcctcagaacgatatgataaagacgatgaagccccctctgatggagcccagtttcctccaattgcagcacaagaccttccttttgttctaaaggctggctaccttgaaaaacgcagaaaagatcacagctttctgggatttgaatggcagaaacggtggtgtgctctcagtaaaacggtattctattattatggaagtgataaagacaaacaacagaaaggtgaatttgcaatagatggctacagtgtcagaatgaataacactctaagaaaggatggaaagaaagattgctgttttgaaatctctgctcctgataaacgtatatatcagtttacagcagcttctcccaaagatgctgaagaatgggtacagcagctgaaatttgtattgcaagatatggaatctgatattattcctgaggattatgatgagagaggagaattatatgatgatgttgatcatcctctaccaataagcaatccactaacaagcagtcaaccaatagatgatgaaatttatgaagaacttccagaagaagaagaggacagtgctccagtgaaagtggaagaacaaaggaagatgagtcaggatagtgtccatcacacctcaggggataagagcactgattatgctaatttttaccagggattgtgggattgtactggagctttttctgatgagttgtcatttaagcgtggtgatgtgatttacattcttagcaaggaatacaatagatatggctggtgggtaggagaaatgaagggagccattggcttggtgcctaaagcctacataatggagatgtatgatatttgagagtcctggaaaaggaaaattcttctgcttgtctgcaaatgctttggatttagaagcgtcatgaaagcacgagtgacagctcctaacctctccttgttttattaaacattacttatctttgactgttattttatgcagtcgctcattaaaatattcctctgatgtgaaattaaatgaaggatattaatgtaaattagatgcaaccagttaagttatacctgttgctattttgcaaag

SEQ ID NO: 142184 - protein, 369 aa, Artificial Sequence
  derived and/or modified sequence
MDPRKVNELRAFVKMCKQDPSVLHTEEMRFLREWVESMGGKVPPATQKAKSEENTKEEKPDSKKVEEDLKADEPSSEESDLEIDKEGVIEPDTDAPQEMGDENAEITEEMMDQANDKKVAAIEALNDGELQKAIDLFTDAIKLNPRLAILYAKRASVFVKLQKPNAAIRDCDRAIEINPDSAQPYKWRGKAHRLLGHWEEAAHDLALACKLDYDEDASAMLKEVQPRAQKIAEHRRKYERKREEREIKERIERVKKAREEHERAQREEEARRQSGAQYGSFPGGFPGGMPGNFPGGMPGMGGGMPGMAGMPGLNEILSDPEVLAAMQDPEVMVAFQDVAQNPANMSKYQSNPKVMNLISKLSAKFGGQA

SEQ ID NO: 142185 - protein, 211 aa, Artificial Sequence [sequence omitted]

SEQ ID NO: 142186 - protein, 162 aa, Artificial Sequence
  derived and/or modified sequence
MGGKVPPATQKAKSEENTKEEKPDSKKVEEDLKADEPSSEESDLEIDKEGVIEPDTDAPQEMGDENAEITEEMMDQANDKKVAAIEALNDGELQKAIDLFTDAIKLNPRLAILYAKRASVFVKLQKPNAAIRDCDRAIEINPDSAQPYKWRGKAHRLLGHWE

SEQ ID NO: 142187 - protein, 121 aa, Artificial Sequence
  derived and/or modified sequence
MDPRKVNELRAFVKMCKQDPSVLHTEEMRFLREWVESMGGKVPPATQKAKSEENTKEEKPDSKKVEEDLKADEPSSEESDLEIDKEGVIEPDTDAPQEMGDENAEITEEMMDQANDKSGCY

SEQ ID NO: 142188 - DNA, 636 bp, Artificial Sequence
  derived and/or modified sequence
atggaccccagaaaggtgaacgagctgagagccttcgtgaagatgtgcaagcaggaccccagcgtgctgcacaccgaggagatgagattcctgagagagtgggtggagagcatgggcggcaaggtgccccccgccacccagaaggccaagagcgaggagaacaccaaggaggagaagcccgacagcaagaaggtggaggaggacctgaaggccgacgagcccagcagcgaggagagcgacctggagatcgacaaggagggcgtgatcgagcccgacaccgacgccccccaggagatgggcgacgagaacgccgagatcaccgaggagatgatggaccaggccaacgacaagaaggtggccgccatcgaggccctgaacgacggcgagctgcagaaggccatcgacctgttcaccgacgccatcaagctgaaccccagactggccatcctgtacgccaagagagccagcgtgttcgtgaagctgcagaagcccaacgccgccatcagagactgcgacagagccatcgagatcaaccccgacagcgcccagccctacaagtggagaggcaaggcccacagactgctgggccactgggaggaggccgcccacgacctggccctggcctggacccagtag

SEQ ID NO: 142189 - DNA, 489 bp, Artificial Sequence
  derived and/or modified sequence
atgggcggcaaggtgccccccgccacccagaaggccaagagcgaggagaacaccaaggaggagaagcccgacagcaagaaggtggaggaggacctgaaggccgacgagcccagcagcgaggagagcgacctggagatcgacaaggagggcgtgatcgagcccgacaccgacgccccccaggagatgggcgacgagaacgccgagatcaccgaggagatgatggaccaggccaacgacaagaaggtggccgccatcgaggccctgaacgacggcgagctgcagaaggccatcgacctgttcaccgacgccatcaagctgaaccccagactggccatcctgtacgccaagagagccagcgtgttcgtgaagctgcagaagcccaacgccgccatcagagactgcgacagagccatcgagatcaaccccgacagcgcccagccctacaagtggagaggcaaggcccacagactgctgggccactgggagtag

SEQ ID NO: 142190 - DNA, 366 bp, Artificial Sequence
  derived and/or modified sequence
atggaccccagaaaggtgaacgagctgagagccttcgtgaagatgtgcaagcaggaccccagcgtgctgcacaccgaggagatgagattcctgagagagtgggtggagagcatgggcggcaaggtgccccccgccacccagaaggccaagagcgaggagaacaccaaggaggagaagcccgacagcaagaaggtggaggaggacctgaaggccgacgagcccagcagcgaggagagcgacctggagatcgacaaggagggcgtgatcgagcccgacaccgacgccccccaggagatgggcgacgagaacgccgagatcaccgaggagatgatggaccaggccaacgacaagagcggctgctactag

SEQ ID NO: 142191 - DNA, 1110 bp, Artificial Sequence
  derived and/or modified sequence
atggatcctcgcaaggtgaacgagctgagagcctttgtgaagatgtgtaagcaggatccctctgtgctgcacaccgaggagatgcggtttctgagagaatgggttgagtctatggggggcaaggtgcccccagccacacaaaaagccaaaagcgaggagaacaccaaagaggagaaacccgactcgaagaaagtcgaggaggacctgaaagctgatgaacccagtagtgaggagagtgacctggagatcgataaggagggcgtcattgagccagacactgatgccccacaggagatgggggatgaaaacgcggagataaccgaagagatgatggatcaggccaatgacaaaaaggttgccgccatcgaggctttaaacgacggtgaactgcagaaagcaattgatcttttcaccgacgccatcaagctgaacccacgcctagcgatcttgtatgccaagcgggcctccgtatttgtcaagctgcaaaaacccaatgccgccatcagagattgtgatcgcgcgatcgaaataaatcccgatagtgcacagccctataagtggaggggaaaagcccaccgcctgcttggccactgggaggaggctgcacacgaccttgctctagcctgcaagctagattacgatgaagatgccagtgctatgttgaaagaggtgcagccgagagcacaaaagatcgcagagcatcgaaggaagtatgagcggaaaagggaagagagggaaataaaggagcgtatcgagagggtgaagaaggccagggaggaacatgagcgtgctcaaagggaggaagaagcccgcagacagagcggtgctcaatatggctccttcccgggcggatttcccggggggatgcccggtaatttccccgggggcatgcctggtatgggcgggggaatgccgggcatggcagggatgcccgggctgaatgagatcctgagcgatccggaagtgttggcagcaatgcaagacccagaggttatggtagcattccaggatgtcgcccagaaccccgcgaatatgtcaaagtaccagagtaatcccaaggtaatgaacttaatctccaaactgtcggcgaaattcgggggccaggcttag

SEQ ID NO: 142192 - DNA, 636 bp, Artificial Sequence
  derived and/or modified sequence
atggacccacgtaaggtgaacgagctcagagctttcgtgaaaatgtgcaagcaggacccctctgtccttcataccgaggaaatgaggtttctgcgggagtgggtggagtcgatgggagggaaagtccccccggcaacacagaaagccaaaagcgaagaaaacaccaaggaagagaagcccgactcaaagaaagttgaggaagacctgaaggctgacgagccaagttcggaggagtcagacctggagattgacaaggaaggggtgatcgagcccgacacagacgccccgcaggaaatgggtgatgagaatgctgagatcaccgaagaaatgatggaccaagccaatgataagaaagtggccgcaatcgaggcgcttaatgatggcgagctccagaaggctatcgacctgtttacagacgcaattaagcttaatcctcgacttgccatcctctatgccaagagggcttccgtctttgtgaaattgcaaaaacccaacgctgccattagggactgcgatagagccatagaaatcaatcctgactcggcccaaccgtacaagtggagggggaaagcacatagactactgggccactgggaggaagccgcgcatgatctcgccctcgcatggactcagtag

SEQ ID NO: 142193 - DNA, 489 bp, Artificial Sequence
  derived and/or modified sequence
atgggtgggaaagtgcctccggctacacagaaagccaagagtgaagaaaacacaaaggaagagaagccagattccaagaaagtcgaggaggacctgaaggccgatgagccatcttcagaagaatcagacctggagatcgacaaggagggcgttattgaaccagatactgacgctccccaggagatgggagacgaaaatgccgaaattaccgaggaaatgatggatcaagctaatgataaaaaagtagcagccattgaagcactcaatgatggggagctacaaaaggctattgacctgttcaccgatgcaatcaaactgaatcccagactggctatcctctatgcaaaacgcgctagtgtatttgtgaagctccagaaaccaaatgccgccattcgcgactgtgatagggccatcgaaattaatcccgattccgctcagccgtataaatggagaggtaaagcacaccgtctattgggacattgggagtag

SEQ ID NO: 142194 - DNA, 366 bp, Artificial Sequence
  derived and/or modified sequence
atggatcctcggaaggtcaatgagttacgtgcttttgttaagatgtgtaagcaggacccgtcagttcttcatacggaagagatgcgctttctgcgggagtgggttgaaagcatggggggtaaagtgcctccggccacccaaaaagctaagagcgaggagaacactaaggaagaaaagcccgattcaaagaaagtggaggaggacctcaaggccgatgagccatcctctgaagagtcggacctcgaaattgacaaggagggagtgattgagcccgacaccgacgcccctcaggaaatgggtgatgagaatgccgaaatcactgaagagatgatggaccaggccaatgacaagtcggggtgttattag

SEQ ID NO: 142195 - DNA, 1110 bp, Artificial Sequence
  derived and/or modified sequence
atggaccccaggaaggtgaatgagctgcgggcctttgtgaagatgtgcaagcaggaccccagcgtgctgcacacagaggagatgaggttcctgcgggagtgggtggagagcatgggcggcaaggtgcccccagccacccagaaggccaagtctgaggagaacaccaaggaggagaagccagacagcaagaaggtggaggaggacctgaaggcagatgagcccagcagcgaggagagtgacctggagattgacaaggagggcgtgattgaaccagacacagatgccccccaggagatgggagatgaaaatgctgagatcacagaggagatgatggaccaggccaatgacaagaaggtggccgccatcgaggccctgaatgatggagagctgcagaaggccatcgacctcttcacagatgccatcaagctgaacccccggctggccatcctgtatgccaagagggcctctgtgtttgtgaagctgcagaagcccaatgctgccatccgggactgtgaccgggccatcgagatcaacccagattctgcccagccctacaagtggaggggcaaggcccaccggctgctgggccactgggaggaggccgcccatgacctggccctggcctgcaagctggactatgatgaagatgccagcgccatgctgaaggaggtgcagccccgggcccagaagattgctgagcacaggaggaaatatgaaaggaagcgggaggagcgggagatcaaggagagaattgagcgggtgaagaaggcccgggaggagcacgagcgggcccagcgggaggaggaggcccggcggcagagcggggcccagtatggcagcttccctgggggcttccctgggggcatgcctggcaacttccctgggggcatgcctggcatgggcggcggcatgcctggcatggccggcatgcctggcctgaatgagatcctgagtgaccctgaggtgctggccgccatgcaggaccctgaggtgatggtggccttccaggatgtggcccagaacccagccaacatgagcaagtaccagagcaaccccaaggtgatgaacctgatcagcaagctgagcgccaagtttggaggccaggcctag

SEQ ID NO: 142196 - DNA, 636 bp, Artificial Sequence
  derived and/or modified sequence
atggaccccaggaaggtgaatgagctgcgggcctttgtgaagatgtgcaagcaggaccccagcgtgctgcacacagaggagatgaggttcctgcgggagtgggtggagagcatgggcggcaaggtgcccccagccacccagaaggccaagtctgaggagaacaccaaggaggagaagccagacagcaagaaggtggaggaggacctgaaggcagatgagcccagcagcgaggagagtgacctggagattgacaaggagggcgtgattgaaccagacacagatgccccccaggagatgggagatgaaaatgctgagatcacagaggagatgatggaccaggccaatgacaagaaggtggccgccatcgaggccctgaatgatggagagctgcagaaggccatcgacctcttcacagatgccatcaagctgaacccccggctggccatcctgtatgccaagagggcctctgtgtttgtgaagctgcagaagcccaatgctgccatccgggactgtgaccgggccatcgagatcaacccagattctgcccagccctacaagtggaggggcaaggcccaccggctgctgggccactgggaggaggccgcccatgacctggccctggcctggacccagtag

SEQ ID NO: 142197 - DNA, 489 bp, Artificial Sequence
  derived and/or modified sequence
atgggcggcaaggtgcccccagccacccagaaggccaagtctgaggagaacaccaaggaggagaagccagacagcaagaaggtggaggaggacctgaaggcagatgagcccagcagcgaggagagtgacctggagattgacaaggagggcgtcatcgagccagacacagatgccccccaggagatgggagatgaaaatgctgagatcacagaggagatgatggaccaggccaatgacaagaaggtggccgccatcgaggccctgaatgatggagagctgcagaaggccatcgacctcttcacagatgccatcaagctgaacccccggctggccatcctgtatgccaagagggcctctgtgtttgtgaagctgcagaagcccaatgctgccatccgggactgtgaccgggccatcgagatcaacccagacagcgcccagccctacaagtggaggggcaaggcccaccggctgctgggccactgggagtag

SEQ ID NO: 142198 - DNA, 366 bp, Artificial Sequence
  derived and/or modified sequence
atggaccccaggaaggtgaatgagctgcgggcctttgtgaagatgtgcaagcaggaccccagcgtgctgcacacagaggagatgaggttcctgcgggagtgggtggagagcatgggcggcaaggtgcccccagccacccagaaggccaagtctgaggagaacaccaaggaggagaagccagacagcaagaaggtggaggaggacctgaaggcagatgagcccagcagcgaggagagtgacctggagattgacaaggagggcgtgattgaaccagacacagatgccccccaggagatgggagatgaaaatgctgagatcacagaggagatgatggaccaggccaatgacaagagcggctgctactag

SEQ ID NO: 142199 - DNA, 1110 bp, Artificial Sequence
  derived and/or modified sequence
atggacccccggaaggtgaacgagctgcgggccttcgtgaagatgtgtaagcaggacccatcagtgctgcacaccgaggagatgcggttcctcagggagtgggtggagagtatgggggggaaggttcccccggcaactcaaaaagctaaaagtgaagaaaacacgaaagaggaaaaacctgacagcaaaaaagtggaggaggaccttaaggctgatgaaccttcctctgaagagtcagatctcgaaatcgataaggaaggagtgatcgagcccgacactgacgcgcctcaagagatgggtgacgaaaatgcagagattaccgaggagatgatggatcaggctaacgataaaaaagtggccgccatcgaggctttgaacgatggcgagttacagaaagccattgacttgttcaccgacgctatcaagctgaacccaaggttggccattctttacgccaaaagagcgagcgtgttcgtcaaactgcagaaacccaacgctgccattcgggattgcgatcgtgccatagaaatcaaccctgattccgcgcagccgtataagtggcgaggcaaggcgcatagactgcttggacactgggaggaagcagctcacgatcttgcactcgcttgcaagttggactatgacgaggacgccagcgccatgttgaaggaagtgcagcctcgggcacaaaagatcgccgagcatagaagaaagtatgaacgcaagcgcgaagagcgggaaatcaaggagcgtattgagagggttaagaaagccagagaggaacacgaacgagcgcaacgcgaagaagaagccagacgtcaatctggcgcacagtatggctcttttcccggtggcttccctggtggcatgccaggtaattttccaggaggcatgcctggcatggggggcggcatgcccgggatggcgggaatgccgggtttaaatgaaatactctcagaccccgaggtgctggcggctatgcaggacccagaagttatggtggcctttcaggatgtggcccaaaatcccgcaaacatgtccaaatatcagagcaatcccaaagttatgaacctcatctctaagttgtctgctaaatttgggggccaggcttag

SEQ ID NO: 142200 - DNA, 636 bp, Artificial Sequence
  derived and/or modified sequence
atggacccccggaaggtgaacgagctgcgggccttcgtgaagatgtgcaaacaggacccctccgtcctccacaccgaggaaatgagatttctgagggaatgggtagagtctatggggggaaaagtcccccccgcgacccagaaggccaagagcgaggagaacacaaaggaagaaaaaccagactcaaagaaggtggaggaggatctcaaggccgacgagccttcctcagaagagtccgatcttgagatcgacaaagagggtgtaatcgaaccggacacagacgcccctcaggaaatgggggacgaaaacgctgaaataaccgaggagatgatggaccaggcgaatgataagaaggtggccgccattgaggctctgaatgacggggagctccagaaggccattgacttatttacagacgcaattaagctcaacccccgcctggccatcctttatgcaaagagagcatcagtatttgtgaagttacaaaagccaaacgcagcaatcagggactgcgaccgtgccatcgagattaacccggactccgcacagccctacaagtggaggggtaaagcccatagacttctggggcactgggaggaagccgcccatgaccttgccttggcttggacccagtag

SEQ ID NO: 142201 - DNA, 489 bp, Artificial Sequence
  derived and/or modified sequence
atgggcggcaaggtgccccccgccacccagaaggccaagagcgaggagaatacgaaagaagagaaacctgacagcaagaaagttgaggaggacttgaaggcagatgagccctcgtcggaggagtctgatctggagatagataaagagggtgtaatcgaacccgacaccgacgccccgcaagaaatgggcgacgaaaatgccgagataactgaggagatgatggaccaggctaacgacaagaaggtcgcggccatcgaagctctaaatgacggggaactgcagaaagccattgacctgttcacggatgccattaaactcaacccgcggctcgccattttgtatgctaagcgagcttctgtttttgtaaaactgcagaagcccaacgccgctattcgggactgcgatcgggctatcgaaataaatcctgatagcgcccagccatataaatggcgcggcaaagcgcaccggctgcttggccattgggagtag

SEQ ID NO: 142202 - DNA, 366 bp, Artificial Sequence
  derived and/or modified sequence
atggacccccggaaggtgaacgagctgcgggccttcgtgaagatgtgcaagcaggaccctagcgttctccatacagaggaaatgaggtttctgcgtgaatgggtagagagcatgggcggaaaagtcccccctgccacccaaaaagctaagtccgaagagaacacgaaggaggagaaacctgactccaaaaaagtggaggaagatctgaaggcggatgagccctcatctgaagagtctgacctggagatcgacaaagaaggagtgatcgagccggacacagacgccccccaggagatgggcgatgagaatgcagaaattacagaagaaatgatggaccaggccaacgataaaagcggttgttactag

SEQ ID NO: 142203 - DNA, 1110 bp, Artificial Sequence
  derived and/or modified sequence
atggaccccaggaaggtcaacgagttgagagctttcgttaaaatgtgtaagcaggatcccagcgtgcttcacactgaggagatgagatttcttcgtgaatgggttgaatctatggggggaaaagtgcccccagccacacagaaggctaaaagcgaagagaatacaaaggaggaaaagcctgatagcaaaaaggtcgaggaagatcttaaggccgacgagcccagcagtgaagaatccgatctggagatagacaaggagggggtcatagaacctgatactgacgccccacaggaaatgggtgatgagaatgcggaaataacagaagagatgatggatcaagctaatgataagaaagtagccgctattgaagccctgaatgatggcgaattacagaaggccatcgacttattcacggacgcaattaagctgaatccacgactggccatcctgtacgccaaacgagcctcggtgtttgtgaaactgcagaaacctaatgcagccatccgggactgcgaccgcgctatcgagatcaaccctgatagtgcgcagccctataaatggcggggaaaagcgcaccggctgctgggtcattgggaagaagccgctcacgatctggctttggcgtgcaaactcgactacgacgaagacgcctccgcgatgttgaaagaagttcagcccagggcacaaaagatagccgagcatagaagaaaatatgaacggaaaagggaagaaagagaaattaaggagcggatagaacgggtcaagaaagccagagaagagcatgagcgggctcaacgcgaagaagaagccagaaggcagtcaggggctcaatacggcagcttccctgggggtttccctggtggcatgcccggtaacttccccggaggaatgccaggcatggggggagggatgccagggatggccggaatgccaggcctgaacgagatcttgtcagatcccgaggtgctggctgcgatgcaggaccccgaggtgatggtggccttccaggatgttgctcagaacccagccaacatgagtaagtaccagtcaaatcccaaagtcatgaatttgatttcgaagctgtctgccaagtttggaggtcaggcttag

SEQ ID NO: 142204 - DNA, 636 bp, Artificial Sequence
  derived and/or modified sequence
atggacccacggaaggtcaatgaattaagggcttttgtgaaaatgtgcaaacaggatccgtccgtgctacataccgaggaaatgcgtttccttagagagtgggtggagtccatggggggtaaggtcccacctgctacgcagaaggcaaagtcagaagaaaacaccaaggaggagaagcccgactctaagaaggtggaagaggacctgaaagccgatgaaccttccagtgaggaaagtgacctcgaaatcgataaagagggagtgattgagccggacactgacgccccacaggaaatgggtgacgagaacgctgagataaccgaagagatgatggaccaggccaacgacaagaaagtggccgctatcgaggcgctaaacgatggtgagcttcagaaggccattgacctctttacggatgcgattaaactgaaccccaggctggctatactgtacgccaaaagagcatcggtgtttgtcaagctgcagaagccgaacgccgcaattagagattgtgatagagccatagaaatcaacccagactccgcccagccctataagtggaggggaaaggcccacaggctgcttggacactgggaagaggccgcacacgatctggcgttggcatggacccagtag

SEQ ID NO: 142205 - DNA, 489 bp, Artificial Sequence
  derived and/or modified sequence
atgggaggcaaggtcccccctgctacccaaaaggctaagtcagaggagaacactaaggaggagaaaccggattctaaaaaggtggaggaggaccttaaggcagacgaaccaagcagcgaggagtcagacctggaaattgacaaagaaggtgttattgagccggatacagatgctccccaagaaatgggcgatgagaatgcagagataacagaggagatgatggatcaggccaacgataaaaaggtcgctgcgatagaggccctgaacgacggggagctccagaaggccatcgacctcttcaccgatgctattaaactgaatccgagactggccatcctctacgccaagagggcaagcgtattcgttaaattgcagaagcctaatgctgctatccgtgattgtgatagggccatagagataaatccagatagcgcccagccttataagtggagagggaaggcacaccgcctgctggggcactgggaatag

SEQ ID NO: 142206 - DNA, 366 bp, Artificial Sequence
  derived and/or modified sequence
atggatccaaggaaagttaatgagctccgggcttttgtgaaaatgtgcaagcaggatccctctgtactgcacacggaagagatgagatttctacgggagtgggtggagtccatgggcggaaaagtgccaccagctactcaaaaagccaagagcgaagaaaacaccaaggaggagaaaccagacagcaaaaaagtggaagaagatctgaaggccgatgagccgtcttcagaggagtcggaccttgaaattgataaagaaggcgtaattgaaccggatacagatgccccacaggaaatgggagatgagaacgcagagatcaccgaagagatgatggaccaagccaacgacaagagtgggtgttattag

SEQ ID NO: 142207 - DNA, 3595 bp, Artificial Sequence
  derived and/or modified sequence
atgccccgagctgggaccgaccctccggctccacgcccttttttttttttttttttaggtcccgggcgttgagctctactcagtgcacgcagccacacaatatgctcttggacgtcgccccctggaggggatgttatctcccgcctccttgaagtcgcccatttctggggttgccccatccagggagctggttcctagttaagaatatgagaatgtatgcgcagggaggcaggcaacagcacgaacagccacgcttctagaagattctagggagcgcgcaggagcagcgcagagggagtaggaatgagcaggcggaggacccgaggtcacgagaccgttgggtgggaggagccagcggccggggaggttctagtctgttctgtcttgcggcagccgcccccttctgcgcggtcacgccgagccagcgcctgggcctggaaccgggccgtagcccccccagtttcgcccaccacctccctaccatggacccccgcaaagtgaacgagcttcgggcctttgtgaaaatgtgtaagcaggatccgagcgttctgcacaccgaggaaatgcgcttcctgagggagtgggtggagagcatgggtggtaaagtaccacctgctactcagaaagctaaatcagaagaaaataccaaggaagaaaaacctgatagtaagaaggtggaggaagacttaaaggcagacgaaccatcaagtgaggaaagtgatctagaaattgataaagaaggtgtgattgaaccagacactgatgctcctcaagaaatgggagatgaaaatgcggagataacggaggagatgatggatcaggcaaatgataaaaaagtggctgctattgaagccctaaatgatggtgaactccagaaagccattgacttattcacagatgccatcaagctgaatcctcgcttggccattttgtatgccaagagggccagtgtcttcgtcaaattacagaagccaaatgctgccatccgagactgtgacagagccattgaaataaatcctgattcagctcagccttacaagtggcgggggaaagcacacagacttctaggccactgggaagaagcagcccatgatcttgcccttgcctgtaaattggattatgatgaagatgctagtgcaatgctgaaagaagttcaacctagggcacagaaaattgcagaacatcggagaaagtatgagcgaaaacgtgaagagcgagagatcaaagaaagaatagaacgagttaagaaggctcgagaagagcatgagagagcccagagggaggaagaagccagacgacagtcaggagctcagtatggctcttttccaggtggctttcctgggggaatgcctggtaattttcccggaggaatgcctggaatgggagggggcatgcctggaatggctggaatgcctggactcaatgaaattcttagtgatccagaggttcttgcagccatgcaggatccagaagttatggtggctttccaggatgtggctcagaacccagcaaatatgtcaaaataccagagcaacccaaaggttatgaatctcatcagtaaattgtcagccaaatttggaggtcaagcgtaatgtccttctgataaataaagcccttgctgaaggaaaagcaacctagatcaccttatggatgtcgcaataatacaaaccagtgtacctctgaccttctcatcaagagagctggggtgctttgaagataatccctacccctctcccccaaatgcagctgaagcattttacagtggtttgccattagggtattcattcagataatgttttcctactaggaattacaaactttaaacactttttaaatcttcaaaatatttaaaacaaatttaaagggcctgttaattcttatatttttctttactaatcattttggatttttttctttgaattattggcagggaatatacttatgtatggaagattactgctctgagtgaaataaaagttattagtgcgaggcaaacataactcatttgaggataaagtttgtgttggatatgtggttcctgatgcattttgacttgtctttttaaatgctttatctttttctttaaagatttatttcaataaaactaattgggaccacccgtatttcagtaggacctgggtagggattggaagtacttggcagggcagcagcaatcttgctgtgtttgatataacatgcatccttgggcaggttgcccttaaatcttacactgtggtgaagggatgttttttttgtaatgctgcagtagagttggagtacttagttctcttgttgtccagtatatctaataagtgtttttcatattatttccacgtaagggaaataaggtagtacttttctttttatatttctatgcttaaaattctctttcctagtcaaaaattgcccaaatctgtgtttgctttctgcttgctacatttgtctcccttacttttcttgagctaaagacaggctttttccaccggcatcatcactgctatcatcattaacagcgtaattatacaagcatatttaatgctgagtttaatttaatatgtaatacatatggtaattgtagggtaatacccacaacaactgtagtttcttacttggccaagagaatgcttatttaagtgttagacttccattctggcaaaatcttgccttatcagaagacattggaaagagggattccctttggtgtttggtcttctacttagaaaaacctattgcagttagtttatcttgtagtattcatctttgtattctgaagataaggtttgaattaaattgatacacacagaggggaaccgattttttttatccaatgtgaattataaatgagataatccacagttattcattgtggagttgttgagactatgaaagactcattgtctttgtattcagctcttaaatagtgtaactatatccccacctctgcttgctttctttccctcccctccaatgataaagaaaatgataaattttctgttgtgcattcaattcttattttaaataagactaagtataggcattgtacctgacattgctacgtttctaccagtgtttcaatttaaagtgctagtgtttaaaaacattttcaagggataaggccttctgtactttgcttatttgaagaatcagtggtaggagcagtgaagtaaattctatggagtacatttctaaaataccacatttctgaaatcataaataagtttattcaggttctaaccctttgctgtacacaagcagacagaaatgcatctgttacataaatgagaaaaagctattatgctgatggagcatgctttttaaatcctttaaaaacactcaccatataaacttgcatttgagcttgtgtgttcttttgttaatgtgtagagttctcctttctcgaaattgccagtgtgtacttggcttaactcaagaacagtttcttctggattccttatttgatttatttaacctaattatattctaatattgcaaatattaccataagtgggtaaaagtaaaattcctcttctgaaaatgtgtcctgtgcttttagatttttaaattccataatatacattcttaattttcaactcaa

SEQ ID NO: 142208 - DNA, 944 bp, Artificial Sequence
  derived and/or modified sequence
cagtttcgcccaccacctccctaccatggacccccgcaaagtgaacgagcttcgggcctttgtgaaaatgtgtaagcaggatccgagcgttctgcacaccgaggaaatgcgcttcctgagggagtgggtggagagcatgggtggtaaagtaccacctgctactcagaaagctaaatcagaagaaaataccaaggaagaaaaacctgatagtaagaaggtggaggaagacttaaaggcagacgaaccatcaagtgaggaaagtgatctagaaattgataaagaaggtgtgattgaaccagacactgatgctcctcaagaaatgggagatgaaaatgcggagataacggaggagatgatggatcaggcaaatgataaaaaagtggctgctattgaagccctaaatgatggtgaactccagaaagccattgacttattcacagatgccatcaagctgaatcctcgcttggccattttgtatgccaagagggccagtgtcttcgtcaaattacagaagccaaatgctgccatccgagactgtgacagagccattgaaataaatcctgattcagctcagccttacaagtggcgggggaaagcacacagacttctaggccactgggaagaagcagcccatgatcttgcccttgcctggactcaatgaaattcttagtgatccagaggttcttgcagccatgcaggatccagaagttatggtggctttccaggatgtggctcagaacccagcaaatatgtcaaaataccagagcaacccaaaggttatgaatctcatcagtaaattgtcagccaaatttggaggtcaagcgtaatgtccttctgataaataaagcccttgctgaaggaaaagcaacctagatcaccttatggatgtcgcaataatacaaaccagtgtacctctgaccttctcatcaagagagctggggtgc

SEQ ID NO: 142209 - DNA, 549 bp, Artificial Sequence
  derived and/or modified sequence
aacagtgtcctcctgacttgtgctggagtgattgtgcctatgtagagaattccactttaagcatgggtggtaaagtaccacctgctactcagaaagctaaatcagaagaaaataccaaggaagaaaaacctgatagtaagaaggtggaggaagacttaaaggcagacgaaccatcaagtgaggaaagtgatctagaaattgataaagaaggtgtgattgaaccagacactgatgctcctcaagaaatgggagatgaaaatgcggagataacggaggagatgatggatcaggcaaatgataaaaaagtggctgctattgaagccctaaatgatggtgaactccagaaagccattgacttattcacagatgccatcaagctgaatcctcgcttggccattttgtatgccaagagggccagtgtcttcgtcaaattacagaagccaaatgctgccatccgagactgtgacagagccattgaaataaatcctgattcagctcagccttacaagtggcgggggaaagcacacagacttctaggccactgggaag

SEQ ID NO: 142210 - DNA, 3123 bp, Artificial Sequence
  derived and/or modified sequence
cgcggtcacgccgagccagcgcctgggcctggaaccgggccgtagcccccccagtttcgcccaccacctccctaccatggacccccgcaaagtgaacgagcttcgggcctttgtgaaaatgtgtaagcaggatccgagcgttctgcacaccgaggaaatgcgcttcctgagggagtgggtggagagcatgggtggtaaagtaccacctgctactcagaaagctaaatcagaagaaaataccaaggaagaaaaacctgatagtaagaaggtggaggaagacttaaaggcagacgaaccatcaagtgaggaaagtgatctagaaattgataaagaaggtgtgattgaaccagacactgatgctcctcaagaaatgggagatgaaaatgcggagataacggaggagatgatggatcaggcaaatgataaaagtggctgctattgaagccctaaatgatggtgaactccagaaagccattgacttattcacagatgccatcaagctgaatcctcgcttggccattttgtatgccaagagggccagtgtcttcgtcaaattacagaagccaaatgctgccatccgagactgtgacagagccattgaaataaatcctgattcagctcagccttacaagtggcgggggaaagcacacagacttctaggccactgggaagaagcagcccatgatcttgcccttgcctgtaaattggattatgatgaagatgctagtgcaatgctgaaagaagttcaacctagggcacagaaaattgcagaacatcggagaaagtatgagcgaaaacgtgaagagcgagagatcaaagaaagaatagaacgagttaagaaggctcgagaagagcatgagagagcccagagggaggaagaagccagacgacagtcaggagctcagtatggctcttttccaggtggctttcctgggggaatgcctggtaattttcccggaggaatgcctggaatgggagggggcatgcctggaatggctggaatgcctggactcaatgaaattcttagtgatccagaggttcttgcagccatgcaggatccagaagttatggtggctttccaggatgtggctcagaacccagcaaatatgtcaaaataccagagcaacccaaaggttatgaatctcatcagtaaattgtcagccaaatttggaggtcaagcgtaatgtccttctgataaataaagcccttgctgaaggaaaagcaacctagatcaccttatggatgtcgcaataatacaaaccagtgtacctctgaccttctcatcaagagagctggggtgctttgaagataatccctacccctctcccccaaatgcagctgaagcattttacagtggtttgccattagggtattcattcagataatgttttcctactaggaattacaaactttaaacactttttaaatcttcaaaatatttaaaacaaatttaaagggcctgttaattcttatatttttctttactaatcattttggatttttttctttgaattattggcagggaatatacttatgtatggaagattactgctctgagtgaaataaaagttattagtgcgaggcaaacataactcatttgaggataaagtttgtgttggatatgtggttcctgatgcattttgacttgtctttttaaatgctttatctttttctttaaagatttatttcaataaaactaattgggaccacccgtatttcagtaggacctgggtagggattggaagtacttggcagggcagcagcaatcttgctgtgtttgatataacatgcatccttgggcaggttgcccttaaatcttacactgtggtgaagggatgttttttttgtaatgctgcagtagagttggagtacttagttctcttgttgtccagtatatctaataagtgtttttcatattatttccacgtaagggaaataaggtagtacttttctttttatatttctatgcttaaaattctctttcctagtcaaaaattgcccaaatctgtgtttgctttctgcttgctacatttgtctcccttacttttcttgagctaaagacaggctttttccaccggcatcatcactgctatcatcattaacagcgtaattatacaagcatatttaatgctgagtttaatttaatatgtaatacatatggtaattgtagggtaatacccacaacaactgtagtttcttacttggccaagagaatgcttatttaagtgttagacttccattctggcaaaatcttgccttatcagaagacattggaaagagggattccctttggtgtttggtcttctacttagaaaaacctattgcagttagtttatcttgtagtattcatctttgtattctgaagataaggtttgaattaaattgatacacacagaggggaaccgattttttttatccaatgtgaattataaatgagataatccacagttattcattgtggagttgttgagactatgaaagactcattgtctttgtattcagctcttaaatagtgtaactatatccccacctctgcttgctttctttccctcccctccaatgataaagaaaatgataaattttctgttgtgcattcaattcttattttaaataagactaagtataggcattgtacctgacattgctacgtttctaccagtgtttcaatttaaagtgctagtgtttaaaaacattttcaagggataaggccttctgtactttgcttatttgaagaatcagtggtaggagcagtgaagtaaattctatggagtacatttctaaaataccacatttctgaaatcataaataagtttattcaggttctaaccctttgctgtacacaagcagacagaaatgcatctgttacataaatgagaaaaagctattatgctgatggagcatgctttttaaatcctttaaaaacactcaccatataaacttgcatttgagcttgtgtgttcttttgttaatgtgtagagttctcctttctcgaaattgccagtgtgtacttggcttaactcaagaacagtttcttctggattccttatttgatttatttaacctaattatattctaatattgcaaatattaccataagtgggtaaaagtaaaattcctcttctg

SEQ ID NO: 142211 - DNA, 1110 bp, Artificial Sequence
  derived and/or modified sequence
atggaccccagaaaggtgaacgagctgagagccttcgtgaagatgtgcaagcaggaccccagcgtgctgcacaccgaggagatgagattcctgagagagtgggtggagagcatgggcggcaaggtgccccccgccacccagaaggccaagagcgaggagaacaccaaggaggagaagcccgacagcaagaaggtggaggaggacctgaaggccgacgagcccagcagcgaggagagcgacctggagatcgacaaggagggcgtgatcgagcccgacaccgacgccccccaggagatgggcgacgagaacgccgagatcaccgaggagatgatggaccaggccaacgacaagaaggtggccgccatcgaggccctgaacgacggcgagctgcagaaggccatcgacctgttcaccgacgccatcaagctgaaccccagactggccatcctgtacgccaagagagccagcgtgttcgtgaagctgcagaagcccaacgccgccatcagagactgcgacagagccatcgagatcaaccccgacagcgcccagccctacaagtggagaggcaaggcccacagactgctgggccactgggaggaggccgcccacgacctggccctggcctgcaagctggactacgacgaggacgccagcgccatgctgaaggaggtgcagcccagagcccagaagatcgccgagcacagaagaaagtacgagagaaagagagaggagagagagatcaaggagagaatcgagagagtgaagaaggccagagaggagcacgagagagcccagagagaggaggaggccagaagacagagcggcgcccagtacggcagcttccccggcggcttccccggcggcatgcccggcaacttccccggcggcatgcccggcatgggcggcggcatgcccggcatggccggcatgcccggcctgaacgagatcctgagcgaccccgaggtgctggccgccatgcaggaccccgaggtgatggtggccttccaggacgtggcccagaaccccgccaacatgagcaagtaccagagcaaccccaaggtgatgaacctgatcagcaagctgagcgccaagttcggcggccaggcctag

SEQ ID NO: 142212 - protein, 1187 aa, Artificial Sequence
  derived and/or modified sequence
MRPRGAAFAAGPPGDLHLGTAIGFAGAIWRSRSPAMSTLLDIKSSVLRQVQVCPSFRRRTEQDPGSASADPQEPATGAWKPGDGVEFFAHMRLMLKKGEGRQGLPCLEVPLRSGSPAPPEPVDPSLGLRALAPEEVEMLYEEALYTVLYRAGTMGPDQVDDEEALLSYLQQVFGTSLEEHTEAIERVRKAKAPTYALKVSVMRAKNLLAKDPNGFSDPYCMLGILPASDATREPRAQKEQRFGFRKGSKRGGPLPAKCIQVTEVKSSTLNPVWKEHFLFEIEDVSTDQLHLDIWDHDDDVSLVEACRKLNEVIGLKGMGRYFKQIVKSARANGTAGPTEDHTDDFLGCLNIPVREVPVAGVDRWFKLEPRSSASRVQGHCHLVLKLITTQRDTAMSQRGRSGFLSHLLLLSHLLRLEHSAEEPNSSSWRGELSTPAATILCLHGAQSNLSPLQLAVLHWQVSSRHHQTCTLDYSYLLGLLEDMQAHWEEAPSLPQEQEESLADSLSAFSEFGLQLLRQLRDYFPATNSTAVHRLELLLKCLGKLQLFQPSFEICPFESELNMDIAAALKRGNREWYDRILNDKSPREQPGPQRLPGLVVLADAVYDDLQFCYSVYASLFHSILNVDVFTLTFRQLERLVAEEAWVLTEELSPKMTLEVASGLFELYLTLADLQRFWDSIPGRDSRSLALAGIHAPFLPAVKLWFQVLRDQAKWRLQGAVDMDTLEPVDASSRHSSSAATAGLCLSHIQELWVRLAWPDPAQAQGLGTQLGQDVCEATLFYTELLRKKVDTQPGAAGEAVSEALCVVLNNVELVRKAAGQALKGLAWPEGATGPEGVLPRPLLSCTQALDDDLQREAHTVTAHLTSKMVGDIRKYVQHISLSPDSIQNDEAVAPLMKYLDEKLALLNASLVKGNLSRVLEALWELLLQAILQALGANRDVSADFYSRFHFTLEALVSFFHAEGQGLPLESLRDGSYKRLKEELRLHKCSTRECIEQFYLDKLKQRTLEQNRFGRLSVRCHYEAAEQRLAVEVLHAADLLPLDANGLSDPFVIVELGPPHLFPLVRSQRTQVKTRTLHPVYDELFYFSVPAEACRRRAACVLFTVMDHDWLSTNDFAGEAALGLGGVTGVARPQVGGGARAGQPVTLHLCRPRAQVRSALRRLEGRTSKEAQEFVKKLKELEKCMEADP

SEQ ID NO: 142213 - DNA, 3564 bp, Artificial Sequence
  derived and/or modified sequence
atgagacctcgcggcgccgccttcgcagctggccctccaggagacctgcaccttggcaccgcaattggcttcgcaggggcaatttggaggtctcggagtccagccatgtccaccctgctggacatcaagagctctgtgctgagacaggtccaagtttgcccctcatttcggcgaaggactgagcaggacccaggtagcgcatcagcagacccgcaggagccagctaccggtgcttggaagcctggagatggcgtcgagtttttcgcccatatgagattgatgctcaaaaagggcgaaggccgccaaggcctcccctgcctcgaagttcccctgcggtctgggtctcccgcaccccctgaacctgtggacccctcgttgggcttgcgcgcccttgcccctgaggaagtggaaatgctgtatgaggaggctttatacaccgtgctatacagagccggaaccatggggcctgatcaagtggacgacgaagaggctctactgagttatctgcagcaggtgtttggaacatccctcgaagagcatacggaagctatagaaagggtgcgtaaagcaaaagctcccacttacgctttaaaggtctccgtaatgcgagctaagaatctgctggcgaaggaccccaatggcttcagcgatccctattgtatgcttggaatattgcccgcatctgatgctacgagagagcctagggcacagaaggagcagcgatttggtttccgcaaaggctctaagaggggaggtccactgccagcgaaatgcatccaagtcacggaggtgaaatcttcaacgctgaaccctgtgtggaaagaacacttcctatttgagatcgaagacgtgagtactgaccaactccatttagacatttgggatcacgacgatgacgtgagtctcgtggaggcttgtagaaaactcaatgaggtgatagggctaaaaggcatggggaggtatttcaaacagatcgttaagagcgcacgtgccaacggaactgctggccctactgaagaccacacagatgatttcctcgggtgtctcaatattccagtgagggaagtgcctgtggcaggtgtagacagatggttcaagttagagcctcggagctcagcctcccgtgtccagggccactgtcatctggtccttaagctgatcacgacccagagagacacagccatgtcacagcggggacgaagtgggttcttgagtcacttactgctgttgagccatctgcttagattggaacactccgcggaagagcccaattcatccagttggagaggagagctaagtacccccgctgcaaccatactgtgtctgcacggtgcccagtctaacctgtcacccctgcagctggctgtcttacattggcaagtcagttctagacatcaccagacctgtacactggactattcctatctcctcgggctgctggaagacatgcaggcccattgggaggaggccccctccctgccccaggagcaggaagaaagtttggccgattccttgagcgcattcagtgagttcgggcttcagttgcttcgtcagctgagagactattttcctgccaccaatagtaccgcggtccaccgcctggagctcttgctgaagtgtttggggaaacttcagctatttcagccatccttcgaaatttgccctttcgaaagcgaactgaatatggatatcgccgctgccctgaaacgcggtaatcgtgaatggtacgatcggatcctcaacgataagtcaccgcgagagcaaccaggccctcagaggctccccggcctggtggtcttagctgatgcggtgtatgacgacctgcagttttgttacagcgtctacgcaagcctgttccactccatccttaatgtcgatgtgtttactttaacattccgacagctggaacggttagtcgcagaggaggcgtgggttctgaccgaagagctttcaccgaagatgacattagaagttgcctcagggctgtttgaactctacctgactctcgccgacctgcaacggttttgggattccattcctggtcgcgacagcaggtctctggcactggctggtatccatgccccctttctgccagccgttaagctgtggtttcaggtgttgcgggatcaggcaaagtggcgactgcagggggctgtggatatggatactctagaacctgtagatgcttcatctagacactcaagtagtgcagcgacagccggcctttgtttgtctcatatccaggaactttgggtgcggctggcgtggccagatcccgctcaggcccagggcctgggtacgcaacttgggcaggacgtgtgcgaagcaaccctcttctacacagagttgcttcgtaagaaggtggatacacagcccggggccgcaggcgaggcagtcagcgaagccctctgcgtagtgctgaacaatgtagagctggttcgcaaagccgccggtcaggctctgaagggccttgcttggcctgaaggagccacggggccggaaggagtgctgcccaggccccttcttagctgcactcaggcgctggatgatgacctgcaacgcgaggcacacacagtaacagcccacctgaccagcaagatggtgggggatattaggaagtatgtgcagcacatctctttgtcgcctgacagcattcagaatgacgaagcggtcgcccctctcatgaagtacctagatgaaaaacttgcactgctcaatgctagcctggtgaaggggaacttgagccgggtgctggaagcactatgggaacttctcctgcaggccatcttgcaggccctcggtgcaaatcgtgatgtttctgcagacttctactctcgctttcatttcacactggaggctctagtcagtttctttcacgctgaggggcagggtttgcccttggagtcgctacgtgacggatcctataaacgccttaaagaggaattgagactgcataagtgtagtacccgggagtgcatcgagcagttctacctcgataagctgaagcagcgcacgctggagcaaaaccgctttggaagattgtcggttaggtgccattacgaagcagctgagcagagactcgccgtagaagtgctccacgccgcagatctgcttccactggacgcgaacggcctgtcagacccgtttgtgatcgtagaattgggtcccccccacctcttcccactggtgcgcagtcagaggacccaggtcaagacccgtactttacaccctgtttatgatgaactcttttactttagcgtccccgccgaggcctgccgtcgaagagcagcatgcgtgttatttacagtgatggatcacgactggctgagcaccaacgacttcgccggggaggccgctctggggctggggggtgtgaccggtgtggcccgcccccaggttggtgggggagcacgggcgggacaacccgtgactttacacttgtgccggccccgagcccaggttcgctcagccttgcgccgcctcgaaggcaggacctccaaagaagcacaggaatttgtgaaaaaacttaaggagctggagaagtgcatggaagccgacccgtag

SEQ ID NO: 142214 - DNA, 3459 bp, Artificial Sequence
  derived and/or modified sequence
atgtctaccctgctggatattaaatcttccgtgcttagacaagtccaggtgtgtccctccttccgtcggcggacagaacaggatccagggtccgcgagtgctgaccctcaggaacctgcaacgggcgcctggaagcctggtgacggcgtggagttttttgcccacatgcggctgatgttaaagaaaggagaaggacggcaagggctcccttgtctcgaggtgccactgagatccgggtcccccgctcctcctgaacccgtggaccccagcctgggactccgtgcactagctcccgaggaggtagagatgctgtacgaggaagcactctatacggtgttgtatcgcgctggcacaatggggccagaccaggtggacgacgaagaggcgcttctatcatatctccagcaggtgtttggcaccagtttggaggagcacactgaagcaatagagagggtaagaaaagccaaggctcctacgtatgccctaaaggtgagtgtgatgagggccaaaaacctattagctaaggaccccaacggcttcagcgacccgtattgcatgctgggtatcctcccagcatccgatgccacaagggaaccacgcgcacagaaggaacagcggttcggcttccggaaagggagcaaaagagggggccctctcccagccaagtgcattcaggtaacggaagtcaagtcctctacactgaaccccgtctggaaggaacatttcctgttcgagatcgaagacgtaagtaccgaccaactgcacctcgacatctgggaccatgacgacgacgtttcacttgtcgaggcgtgccgaaagctgaatgaggtgattggtctaaagggcatgggtagatactttaagcagatcgtcaaatcagccagagctaatggaacggcaggtcctacagaggatcacaccgatgacttcctcgggtgcctgaatatacccgtgcgcgaggtgcctgtagctggggtggaccgctggttcaagctggaaccgcgctcatccgcatccagagtccagggacactgtcacctggtccttaaactgataactacccagcgagacacagccatgagccagcgcggccgtagcggcttcctgtcccatctcctcctcctgagtcatttacttaggctggagcatagcgctgaggagcctaacagcagtagttggcgaggcgaactgagtacacccgcagccactatcttatgccttcatggagcacaatccaacctgtcccctctgcagctagccgtgcttcattggcaggtaagcagtcgccaccaccagacctgcacccttgactacagttatttactgggtctcctggaagatatgcaagcacactgggaagaagcgccctctctgccacaggagcaagaagagtcactggccgatagcttatctgccttctctgaattcgggctgcagcttctgaggcagctcagagactactttccggctactaacagcacggcagtacatcggctggagctgctgctgaaatgcctcggcaaactgcagttgttccagccatcctttgaaatctgtccattcgaaagcgaactaaatatggatatcgctgcagctttaaagcgcggtaacagggagtggtacgatcggatacttaacgataaatcgccacgcgaacaaccaggcccccagcgcctgccgggcctggttgtccttgctgacgcagtatacgacgacctgcagttctgctatagcgtctacgccagcctttttcacagcatcctcaatgtggacgttttcaccctcacgttccgccaactggagcggttagtcgccgaggaggcttgggtgcttacggaggaattgagtccgaagatgactctagaggtggccagcgggctgtttgaactttatcttactctggccgacctacagaggttttgggactctatcccgggccgcgacagtagatcgctcgccctggcaggtatccacgcacctttcctgcccgccgtgaagctttggtttcaagtgctgcgggatcaggccaaatggcgcttacagggcgcagtcgatatggacacacttgagccagtggatgcctcctctcgacattccagtagcgcagctaccgccggcctgtgtttgagccacattcaggagctgtgggttagactcgcctggccagatcccgctcaggctcagggcctgggaacacagttgggccaggacgtctgcgaagcaacgttgttctacacggagttgctgcgaaagaaagttgacacgcagccaggagcagctggtgaggcagtgtcagaggccctctgcgtcgtgcttaataatgtcgagctggttcggaaggccgccgggcaggcgctgaagggcctggcatggcccgaaggcgccaccggccccgaaggagtgttgccacgcccactcctcagctgcacccaggccctcgacgacgacttacagcgggaagcacataccgtgactgcgcacttaacctccaaaatggttggagacatcaggaagtatgttcagcatatcagcttgagtccagactcaatccagaacgacgaggccgtggcgccactaatgaagtatctggatgagaagctcgcattgctgaatgcctccctagttaaaggtaatctttctcgggtattggaggccctgtgggagttactcctgcaggccatcctccaggctctgggcgccaatagagatgtgtccgcagacttttactccaggtttcacttcacgctagaggccctggtctcttttttccatgctgaagggcagggactgccgctcgaatccctgcgcgacgggtcatataagagacttaaggaggagcttaggctgcacaaatgcagtacccgggaatgtatcgaacaattctacctcgacaaactgaagcaaagaacgctcgagcaaaacagattcgggcgcctgagcgtgaggtgtcactacgaggcggccgagcagaggctggctgtggaggtccttcacgctgctgatctacttcctcttgatgcaaatggcctctcagatccttttgtgattgtggaactgggccctcctcacctcttccccctggtgcgcagccagcgcacacaggtgaagactaggaccctccatccggtatacgatgagctcttttacttctccgttccggcggaggcatgtagacgaagagccgcatgcgttctttttactgtcatggaccacgattggttgtccaccaatgatttcgccggtgaagccgcgttaggcctcggcggcgtgacaggcgtcgcacggccacaggtgggtggaggagctcgcgccggccagcccgtcacattgcacttgtgccggcctagggcccaagtccgctccgccctgcgacgcctggagggaaggacttcgaaagaagcccaggagtttgtcaagaagctgaaggaactggaaaagtgtatggaggcggacccatag

SEQ ID NO: 142215 - DNA, 3564 bp, Artificial Sequence
  derived and/or modified sequence
atgaggcccaggggggccgcctttgctgctggccccccaggggacctgcacctgggcacagccatcggctttgctggggccatctggaggagccgcagccctgccatgagcaccctgctggacatcaagagctctgtgctgcggcaggtgcaggtgtgccccagcttcagaagaagaacagagcaggaccccggcagcgccagcgctgacccccaggagcccgccaccggggcctggaagccaggagatggagtggagttctttgcccacatgaggctgatgctgaagaagggggagggccggcagggcctgccctgcctggaggtgcccctgcggagcggcagccctgcccctcctgagcctgtggaccccagcctgggcctgcgggccctggcccctgaggaggtggagatgctgtatgaggaggccctgtacacagtgctgtacagagctggcaccatgggccctgaccaggtggatgatgaggaggccctgctgagctacctgcagcaggtgtttggcaccagcctggaggagcacacagaggccatcgagcgggtgaggaaggccaaggcccccacctacgccctgaaggtgtctgtgatgagggccaagaacctgctggccaaggaccccaacggcttcagtgacccctactgcatgctgggcatcctgcctgccagtgatgccacccgggagccccgggcccagaaggagcagcgcttcggcttcaggaagggcagcaagagaggaggccccctgcctgccaagtgcatccaggtgacagaggtgaagagcagcaccctgaaccctgtgtggaaggagcacttcctgtttgaaattgaagatgtgtccacagaccagctgcacctggacatctgggaccatgatgatgatgtgtccctggtggaggcctgcaggaagctgaatgaggtgattggcctgaagggcatgggccgctacttcaagcagatcgtgaagagcgcccgggccaacggcacagctggccccacagaggaccacacagatgacttcctgggctgcctgaacatccctgtgcgggaggtgcctgtggccggcgtggaccgctggttcaagctggagcccaggagcagcgccagccgggtgcagggccactgccacctggtgctgaagctgatcaccacccagagggacacagccatgagccagaggggccgcagcggcttcctgagccacctgctgctgctgagccacctgctgcggctggagcacagcgctgaggagcccaacagcagctcctggagaggagagctgagcaccccagctgccaccatcctgtgcctgcatggagcccagagcaacctgagccccctgcagctggccgtgctgcactggcaggtgagcagccgccaccaccagacctgcaccctggactacagctacctgctgggcctgctggaggacatgcaggcccactgggaggaggcccccagcctgccccaggagcaggaggagagcctggccgacagcctgagcgccttcagcgagtttggcctgcagctgctgcggcagctgcgggactacttccctgccaccaacagcacagctgtgcaccggctggagctgctgctgaagtgcctgggcaagctgcagctgttccagcccagctttgagatctgcccctttgagagcgagctgaacatggacattgctgctgccctgaagaggggcaaccgggagtggtatgaccgcatcctgaatgacaagagcccccgggagcagcccggcccccagaggctgcccggcctggtggtgctggctgatgctgtgtatgatgacctgcagttctgctacagcgtgtatgccagcctcttccacagcatcctgaatgtggatgtgttcaccctgaccttccggcagctggagcggctggtggccgaggaggcctgggtgctgacagaggagctgagccccaagatgaccctggaggtggccagcggcctgtttgagctgtacctgaccctggccgacctgcagcgcttctgggacagcatccctggccgggacagccgcagcctggccctggccggcatccacgcccccttcctgcctgctgtgaagctgtggttccaggtgctgcgggaccaggccaagtggaggctgcagggcgctgtggacatggacaccctggagcctgtggatgccagcagccgccacagcagcagcgctgccacagctggcctgtgcctgagccacatccaggagctgtgggtgcggctggcctggccagaccctgcccaggcccagggcctgggcacccagctgggccaggatgtgtgtgaggccaccctcttctacacagagctgctgaggaagaaggtggacacccagcccggggctgctggggaggccgtgtctgaggccctgtgtgtggtgctgaacaacgtggagctggtgaggaaggctgctggccaggccctgaagggcctggcctggccagagggcgccactggacctgagggcgtgctgccccggcccctgctgagctgcacccaggccctggatgatgacctgcagcgggaggcccacacagtgacagcccacctgaccagcaagatggtgggggacatcagaaaatatgtgcagcacatcagcctgagcccagacagcatccagaatgatgaggccgtggcccccctgatgaagtacctggatgagaagctggccctgctgaatgccagcctggtgaagggcaacctgagccgggtgctggaggccctgtgggagctgctgctgcaggccatcctgcaggccctgggcgccaacagagatgtgtctgctgacttctacagccgcttccacttcaccctggaggccctggtgtccttcttccacgccgagggccagggcctgcccctggagagcctgagagatggcagctacaagaggctgaaggaggagctgcggctgcacaagtgcagcaccagagaatgtattgagcagttctacctggacaagctgaagcagaggaccctggagcagaacagatttggccgcctgtctgtgcgctgccactatgaggccgctgagcagaggctggccgtggaggtgctgcacgccgctgacctgctgcccctggatgccaacggcctgagtgacccctttgtgattgtggagctgggccccccccacctgttccccctggtgcgcagccagaggacccaggtgaagaccaggaccctgcaccctgtgtatgatgagctgttctacttctctgtgcctgctgaggcctgcagaagaagagctgcctgtgtgctcttcaccgtgatggaccatgactggctgagcaccaatgactttgctggggaggccgccctgggcctgggcggcgtgactggagtggcccggccccaggtgggcggcggggcccgggccggccagcctgtgaccctgcacctgtgccggccccgggcccaggtgcgcagcgccctgcggcggctggagggccgcaccagcaaggaggcccaggagtttgtgaagaagctgaaggagctggagaagtgcatggaggccgacccctag
